United States Patent Application Publication US 2011/0183924 A1 - sequence listing, part 257

SEQ ID NO: 735113 - DNA, 18783 bp, Homo sapiens
gtaagggtctttacatggtttccagatagttcattagttgttgctttctttttttgtctgttttctgttttttttttttaaataactgtggtatgatgtaataggaacttataatttctgagttgcttatttttcctttacagttatagtaaagttatactcatttattttctcctgctttctgcagagtaaaatactgatttttgtctagaaacaagacagtgcaagacaatgttgaaagtgaaattctatgttaaaatatgccagatttattttaagaatttaatatctgtagtcagttatcaatacaaccaaattacataattatgcatgataataggtaaatactgagaagttcacctcattttcttgttaaaggatttggctattaccgtatgtgtcagttagtactcttttgtatggtagtgaaagaaaactcaacccaaactgattcatgaagaagaaagtaaatctggttagatgtggtttgaattaggtaattcatgtcatgaggactcagatctcccatctctatttctacgttccacttttgcattggcttcattttcggttaggttctcccttggtggtggtaaggtggttgtagcaatgtcagcctcccatttttggaaccgagtccataggaggctattctttctagaccttaataggagtaacacaattattgctcatcaccctagctttggccatgtgtcaaatcctgaccagtcacaatttcacagtcatagattctaccctggagctgggatgttactggcctcactagaaacacattgctgatagggtagaaggtgtgttcatcctacccaacccgacccgcaccaaagtcagaatagggaaaaacagatgttgggtgacatgcaactaacgtctgccgtactacactgaagatatttttctatgtttattctccagtgaaagagcttatatttgtggtacataggggattttgttttaatttagaaaatttaattgtagaaaacatgttttataaccctttctctgtactttgttctatatcaggaattgacttgattagataaggtgacatagggtatcttaggccctacaagatagtaaaccccccatcacttgaaagtattcagtagaggcttaaaaaacattattaaaggatgtggttattaggggactttaagaaatgaatatgaaattgaagtaggaaatctttaagctactctgtgagttatgccttttaaaagcaatttgtaattcctgtagatttcttttaaatttaggcagtttcataaatgactatagcatcattttagcaaatttgtgatcctgtaagaggaggataagtgttttttgtttgtttgtttgttttttgtttttttgagacagagtctcactttgtaccccagaaagtaaatctagttagatgtggtttgtctcggctcactgcaacctccaccccgtgcgttctagcaattctcctgcctcagccaccacacctggcctaagaggggaggataagtgttttagtgatcatattagactgaatgtggcagatgagatttcccgcccccccattgttggttagactgacattcaacattcaacaagagccacctgcccttgtaggcatttctgccactatacccctacataaacctagagtgctattgcttacttgctttccttcaaatacattttttcatttgtggcctccacattcttgtgtgtgatgtcctttctctgtgaaatgtcttctaccctttttttcaaagcctagtttagaactgacctcttctatgaaccctctgccgactggcctttccttccccagtcccccaagttcaaaatgatctctttcctttgaatactatagtatttgcacaattcactatctccttatcatattcttcttgtttatttgttatcagctgatgttgacatcataagttcaggttcctaactagatccaatattggaatttttcagcttttgctaagaagagagcttgtatgtctttgggaataatgggcagaaaaagataactttgagaagtcttagacttctaatagctttgatatttaaaagtacatgtaatacaagaggtttttttcctacatttaatgcatggagaagataggacatttagaaatatggaattaatgttcatttgactggcaaaagattattttctcagatgtagtgaagtgtggtaaagaacttcactctagagccagaatgtctgtgtttgtatcccagagcccaccacttacatttaaccattaacattcaacttactgtctctgagtttcagtggcctcatctataaaatgaggataataagagtacctacttcatagagttgttttagtggttaaataaactaacgtaaacttgctagaacttgataaactaatattggatgagaactggttgaaataatgcctggctatagtaaaaacttggtaaatgttagttgccattacaatgcaactactgttcctaccattccctctgccagtgcctggtattcagtagcactcagtaaatgttagttaaatgaagaaataactgaaggaatgaatgaacaaatggttgatgtagagattgcttttccattgttgtttattgaatattttgagatgtataacatactgtctgttaggcactgtgggatgggcactcacggagctgtcttccaaaggggtataggagaggagacgcagtgatctcagcaacctacctttaaaacatatcctagtatctactgccatgttaggttctcttcttttgctttttttaaaaaaaaattctcacaaaactccccccacccacttcagtttatagatgaggaagctcctactacataatagtgcttcccagtctaattcttgacctcattgtatttatatgtcctttttttttttgacagagtctcactcattgcagtggcacaatcacagctcactgcaacctctgcctcccctgctcaagtgatcctcccacctcaacctcctgagtagctgggactacaggcatgcaccaccacgcctggctaatttttgtatttttttgtagagatgcggttttgccatgttggccaggctggtctcgaactcctgggctcaagccatctgcccactttggcctctgagagtgctgagattataggcatgagccaccattcccagccatgttttcctttttcattgaactttatctactttagccattaaactccactccattggtcttgtcattactaagagctgaaccacctgcaaaatattaagttaaaaagcgttttctttgacaacagttttcttttcttcatcttcctctatcactttacttctgaacttttattctctcattttgatctgacccctacttctctgtttttcctggccatttagtactttcttgttttgctcatcccatttcccagtggagaccttctggtctgctgctttatcactggttttgttagaagacatacaaatggcaaggaggtatatgaaaaggtgcctaacatcattgatcatcagagaaatgcagaccaaaactacaatgagatatcatttcaccccagttaaaatggctttttttttttttttccaaaagacaggcaataacaaagtactggtgaggatgtggagtaaagggaacccacatacactattagtaggaatgtaaattagtacagccactgtggagaacagtttgaaggttcctcaaaaaactaaaaatagagctaccatataatccagcaatcccactgctaggtatatatccaaaagaaaggcaatcaatatacggaagagatacctgcacacccaggtttattgcagcactattcacaatagccaagatttggaagcaacccaggtgtccaacagatgaatggataaagaaaacatggtatataaacacaatggaatactattcagctgtgaaaaagaatgaaatcctgtcatttgcaatcctgtcttgaatagaactggaggtcatgatgttaagtgaaataagacaggcacaaacttcacatgttctcacttatttgtgggagctaaaaattaaaacaatcgaactcatggagctagagaatagaattatggttaccagaggctggaagggtggttgggcgtataagtgtagggggagtggggatggttaatgggtacaaaaaaatgagaacgaataagatctacttgataacacaacagggtgactatagtcaacagtaattatacatttaaaaataactagaagagtataattagattgtaacacaaaagataaatgcttgaggtgatggatacctatttaccctgatgtgattattacttatttcatgcctatatcaaaatatttatactccaaaaatatatatacctactatgtacccacaaaaatttaaaaatttatatattgtttttgctatcacctttagaatttcttgtcattggatagttcgtctgtataccattctggtcttcattccccagggcccccgttgtctgatttttctgcttctagaactgttagaggtcacaaaagcaagatggttgtatctatcacaatttttgtctgactttaactgggtatctgttacgatttagtagtcatcttactgacttcttgttggtttccaattgaatcctcacagtagactgttttcattgtaatcagtatcgaattatagcctgttcccttcttcataaatgaaggctttcttcttcaacagttcttagtgacttcacctgtactttatttctctgctttgaatatttcgaagaaaacatattcttgctctttcccaaggttaacactacatacattaccttgaccacaggatgttttcttgcagattgtgacctaattccatcacccttcagcagcccccaccgttttcatggattcagctaaaccttctgtaagatgactctttttccccctaatctttatatctcttttgatatgtagctttagtctcactttttttccttttggattttgccagttagatgtctccctggaattccacttcagcatggctaagactaagcttgtcttctctttcctccccaaagcaaattgtaattaggatagactgaaggtgacagaagataactaagatcttcttcatcctttcggctcttatggaagctgaattccagtagtcattctaaatttgttgtatgtcagcttatggtatcttttcatgtctttacattcagccaaagaggaagttccttgaaggggagaccagagggcgtgctgtgcttcttaatcctctctttcttaaccagtaagaggcattcagtagatatctgatgatactgattaatagaggggaacttttcagattcttttttttttttaaccctagtaagctttagtacaaactaaatgctgagagattatcaagtaagggattgatcatcacaagaagactcaggatgttacatcctgtaggttttatagtttcctatattgtaaaaaatatgagttatagcagcttgtctggatgtcatacaggtataaaaatcagttttataaacttgagtaaattggggcccattttagaaaaaactcttgcaggctgtgaatgccaatatataagtaaagtattaagtataatgttatttaatgtgggcaaacataaagccaggtgtaaattttttaggtttaaaatcttatagaactatacatccaaaagaaaatttcaagttaaacataatacaaagcaatacaatctaaattaacattaatttaatgtgatgaatgatattgccttgctaaaagtgggtcactacttacaatgtgcaaatggtactcatcgttagggtatagattcttttaaactatgacatacgtacactaccatgtggaacgtgatgatgtgttctctgttctaactactgggaagacttccttggcatagcacatgccatggggtcagttggctttgacttcatatagatatgccatttacttggtcagtgtcacttctatgacaagtagtatgttgtgccagtttgattataagtacaaatatgggcaatgaagtaacttggttttaaggttgttactaagctgagtaacagtgtgtggctatacaaatttttataggctatcaggaatgaaaacacaggagattgttgtagattcaagtattttagattcaagtttgaagatgctcatgcagatgtttaactgagttgtatagacctttatgtttctttctttttctctttttttttttttgagacagagtcttgctctgtcacccaagctggagtgcaatggtgtgatctcggcttactgcaacctccgcctcccaggttcaagcaattctcctgcctcagcctcccaagtagctgggattacagatgtgcaccacgacgcccagctgattttttgtattttagtagaggcggggtctcaccatgttgtcaagatggtctcaatctcctgaccttgtgatccacccacctctgcctcccaaagtgctgtgattacaggcgtgagccaccgcgcctgactgacctttatgtttcttaactttatgctatacatcagttgatatttcaaaaatttaaatggtttctatgattattctttgggctaagaaattgggcattaattgtcctcatatgtatggtttttgtggctacttcatgtagattttatttttggtggttatcaaattggaatttttttttttttttttttttttgagacggagtctcattctgtttcccaggttggagtacagtggtgcaatctcagctcactgcagcctcgacctcccaggctcaagcagtcctctcacctcagccttctaagtagctgggactacaggcacgcaccaccacacctggctagttttttgtgtttttagtagagatggggttttaccctgttggccaggctggtcttgaactcctggcctcaagtgatccacctgcctcagcctcccaaagtgctgggattagaggcatgagccaccacacctggctgaaattggaatttcattggtactgcctgtaattttatgttaatttttttttttttttgtcgtcactagcttttatctaaagcccctagagagaaaggccatgataccttgtatacaaggttataagagtatacaagggaaagggagggctgaagggaacagggtgggctggtacaagcctcattagaaataccattgagtctgtgagtaaaacatcattatatgaaaaggagatgtggttttagggtggtccaattacttttgcaccagcctaataaaattacaagtcattatcaatagagacattgtaaaacctttttttttcccaaaagaagtatcaggtatgataattacatgtctgcccaactttcgttatagattaacataacttaattgtatttaaggtacaatttaggagagttgctgaaaaatgaatctttagtattgggatgccttgattctaccctcaatagctataatggattatgtgtctgagtagattaataaaaatcttttgagcatttttcttgaactacttcactgaagattagctttttgagcatccattttaatttctcagtatataaggatcggtttatcacaactgtattgttttccctggccttgttagattatattttcatatcatgtagaaaaataggtgtattcgttctcccttgaagtcctttgtctcccaaaggaaatggttgcaatacagatgtgtcacctcttccacaggtaaagtggaatggagaagtagccagttaaatagtgcatgctcaatttggaacatttagagcatacaggaaagttatttatttggtaaatattttttaagcatttactatgtttcatgcattgtactagttgtagaggatataattgaatacaactacatgtagcccttgactttatggaactagtctagtataaagatttaagattgcctggcatggtggctcacgccactaatcccagcactttgagaggccaaggcaggattgcttgaggccagaagtttaagagtagcttggtcaacataatgagactccatctctaaaataaatagatagatagatagatagatagatagatagatagatagatagaagtagttagacaacacaaagcagtttcactcatcttgtggcaaggagttatgtatttctaatcaaatttggcaactcaagcattttcaacaaaatctacatgttttttcagaataaagtgaccaacacagaatgttacctgtaaaaatcagagcaataattgctatctaaaataattttgaaaattaagtggtactgaaaggctcatatagcaaaaatatggcctcctgtcattgtactttcctacttcccagactcaccattttcaacattttttagtagtttattttgccattttatagcatagtacctgacattttatttattcaacagacatttcttaagtacctaatacatgccattccttgtttgaagggatgctaaggatacagtggtgaacaaggcgttgtggggttgtatagagggtattcattcctaaccttgaaccaaatatttctttctgttggataatgcattaaaaattgcaaacagtttacaaacttttggagcaatggtggccttgatcataaagtagggactgcttctaccgtatacatgcttggtggtgtatttgtgatatctggctaaagtttctacatggaaattgactgactttagttttgagacttctgggaaccagtcaggcaaaatagtgaaactgtgtatcctgtttccaagagttgtcttttaaggttatctgcttcattcatttggcctgacttgctaggcaaatgcctagggtaaatatgatttgattaactataacaacaacagcaacaacaacaactttattttttagagcagtttgaggttcacagcaaaattgagcagaatgtacagagattttccctatacccgcttcccctacgcatgtgcggcctcccctactatcaacatcccccaccagagtggtttgttacaattaatgaacctacattgacacatcattatcactcaaggtccgtagtttacattagagtccactcttggtgttgtgtatgggtttggtcgattttataatgacatttatccaccattatagtgtcatacatagtaattttgctaccctaaaaatccagtgtgctccacctgttcctccttccctcctccctcatccctggcaaccactgaactttttaacatctccatagttttgccttttccagaatgtcatatcattggaatcacacagtatgcagccttttcaaatgggcttctttccgttagtaataggcatttaagtttcatcctcatcttttcatggcttgatagctcatttctttccctccctcttttcttccctgtcttccttccttcctcttctttcctgtttcctctttcttcttccttttttaagagacaaggtgtctcactctgttgcccaggctggagtgcagtggcccaatcatagctcattgcagccttgaattcctgggctcaagtgatcctcctgcgttagcctcctgagtagctgggatcacaggctccagtcattttagtgctgaataatatttcattatctggatgtaccgcctattcattcacctactgaagaatatcttggttgcttctaagttttggcaattatgagtgaagttactataaacattgtatacaagttttatgtggatgtatgttgtcatctcccttgggcagataccaaggagtgccattgttggatcatatggtaaatatatctttagttttgtacagaattctaggttggtatttttttctctctcagtcctttattttatttggagacagtctcgctatgtcgcccaggctgccatacagtggtgccatctgggctcactgaaacctccacctcccaggttcaagcgattcttgtgccttggcctcccaagtagctgggattacaggagtgcgccaccacgcctgctaatttttgtatttttagtagagacagggttttgccatgttgcccaggctggtctcaaactcctgaccttaagtgattcacccacctcaatctcccaaaatcctgggattacaggcctgagctactgtgcctgatctctctcagtactttaaagaaatatttcattccacttttcttttttttcttctttttgagatggagtctcactctgtcgcctgggctggagtgcagtggcgcgatctcagctcactgccacctccgcctcctgggttcaagtgattctcctgcctcagcctcctgaatagctgagattacaggcgcccaccaccatgcccagctaattttttgcatttttagtagagacgggggttccaccatgttggccaggctggtctcgaactcctgacctcgtgattcgcacatctcggcctcccaaattgctgggattacaggtgtgagctaccacgcctggcccactcttcttgcttacatagtttctgaggagatgtcagatgtaatttttatttttgctcttctgtaggcaagttgagttttttccccctctagcttctctcaggatttttttctttatctttgattttcagtagtttgaaaattatatgcctagctgtcagggttttttgcttgtttgtttttgttttctcaggtgtgactccagaaaggttctaaagaggagctttacaatctcttctctggggtttatggagacttcctttacccttctgtgttagccccttaaagcactgcgtcaaccttaaaagggcacaggaaagggtgtctatgccatttttatgccatttatcctgcttggtgttttctgagctttcttcatctgcggtttaatgtctcacattaatttgtagaaattctctgtcattgtttcaaatttttcttcagttcttttctctgtttcttcttctggtgttcccattatgcttttgtggttgtcgtacagttattggatattttgttccaggcttttttttttccagtctttttttccttttgcttctcggttttgtaggtgtctgttgagatactctcaagtgcagatattctttcctcagctttgtctagtttactaataagcccattaaaggcagtcttcatttctgttacagtctttttgatcagtagcatttcttttttattctttcttaaaatttctgtctttctgcttacattgcccatctgttcttgcatggtttctactttgtccattagagttcttaggatatttatcataattatttcaaatttctggtgtaacaattccaacatccctgcaacatccaagtctagtttcgatgcttactgtgtctcttccagctgtgttttttcctatttaatatgtcttataattttttcttgatagccatacatgatgcattaggtaacagaaactgctgtgagtggacctttagtaatgtggtggtaaggtgtgcatggaggggaaacattttcagtctgttagtgaacttttgtcaacttcacatgtgcttctcaagtccatcctgtaagtgggagagtagggctagagaggactgaagttgggtatatattaaatactttctcctacaaagaagcctagaggggacgcattaggggattttttttcccccagtattcactgtgatgacccttattgagctcctggaggtaaaactcacaaaactgtggttctcccccctgcccatattactacatgtccctggagtttatatctttcagacttgtctgcactgagcttccaccaatttgtcaaatacagatcaggtttccctaccacccgtgcagttgaaaacccacatacaacttttgactcctccagagcttaactactcatagcctgctattgactggaagccttgccaataacataaacagttgattaatacatattttatatgttttctgtattatatattgtattcttacaataaagagaaaagaagatgttattaagaaaatcataaggaagataaaatatatttactgttcattaagtggttcccatgggtgctggttcccatggaggttgccccttgtgagtttttgctcagggaagttgtgattctctatatttgcctgttggtctcctaatttgggagtcatcagttttccctgtgacctcacttctcttacagagttaagaacagttgttggtttttcagtttgttcagtgttttacatgttgttagaacacagtggtacttctaagtttcttaacatgctagatcagaaacctgaagtctcacctaatttggctttttatattttttcttcttttttttcttccattgctaccaaagcatttttcatctgtgtctggggtgacattagagcagaatgtgatttctaggtaaacattattgggctccctagcagaaaaatttttgaaagtagtacatgaattctgtataattaaaattttcttttcatcttaataggtataggtaataggcacggcctattttttttttgctcaacagtctaaaatagtaatttaatcacctaatagccttagttatatagttgaaagaagagttggaaatctgattcatgggttggaaatcacctgtcacatatgagttttaggcactggtcactttattttgaaacagctttggggttttttcctttttcaactcataataggctttaacagcttttagttttgtttctgtttttttaacagcatgagttgccaaatttggttatagcttcttggtacaagatgggtaaatttgctttgtgttgtgtaattactttttattttaaatgctacctcttttatgaacactaactttacactaagattaggaaaatgagaattgcatgtctgcaacaaatagctatctgtagtattaaattgtgaaaatgtagactttggattggagctggcatctcttaatatgtaattgtaacatagagtaaataagtattttgtcccttgtagggtcaaacagtacagtgcatgggcagaattagagatgtaggcttttttttttttttttttttttactggcttagagaaccgtttgatcagctaatatggaattaagtccctagggctgcccaggcacaacattaactgctattaaaggaaaatttaaaagagtattagtgaaggttaaatactgaccatggacatctggcaaaattgatgttttttttcccctccaccattgtttatagtttattgttatttatcagagaattaatgtttattttcagaatctattaccataagaaatctgtttgaggacttcgtatgtgccaggaattctactaaataatgatataatgctgaacagaattagataggatcctcacttcgttaagcttacagtctagtggtatagatcaacattaatcaaagaataacacaaatagaaagcagagcagtggttcatgggattgactgtagagaagcatgagggaagttcccaggtgatggaaaatactttatttcttaatcgtggtggttacatgtgtgcatatgtttatgaaaatatattgtacatttaaagtggatacattttatcacatgtaaattatgactctataaagttaattaaaaagaataactcaggtaaggtggtgtgtgcgcctgtagtcccagctatttctgaggcaggaagatcacttgagcccaggagtttgagttcagcatgggcaacatgagacctgtgagactttgtctctaaaaaaatttaaataaataactaagataaatgtaaaattacagctgtagtaagttctacaaaggagagttacatgggctatgacgatgtaagatagcaagaactgacattggcagggaggaaatgatgatgagtagaagtaaataagtgaagtgtggggattgatgtcaaggggacagtataaaagaaataacagcatgcgccaaggccctaaaattggaaagtccttggcaaattaaaggagtttgaaaaaggccattgtgtgcaaagcagaaaataggtactacaaggtaaaagatggagctaagcggtaggtaaggctaaaccttgtcagccattgttaaatattgaattgtatcctaagcacaactcagtggaaagcagttaaagttctttaattgggggaggcaatgaaggggtaataaaattggttatagaaatactgctctggctctagtgttgagaatgaattggagtagccagagtagattcaagaagactttagtaagattattccaacaggccaggacctgttatagggtggtggcaatggagagagatggacagaatggagagtgtatttaggaggtaaaaatgacagaacttggtgatgcactgaatgtgaaatggggaaggtgtctaggaggactactaggtttatggtttgcgtattagggtggatgatagcagtttcatttactgagacagggagccctggcagagtacccagcttttagagtgggtagggggaaggggagagtgcatctggtgttgggcattttgaagtgatttacatacaacaaactgaaggtatctttaacactgagtccagcaggttagcatatttattcagcaagcattgcacctttttttgttgtttttggggtcttcaactcctggcctcgaatcctccctccttcccccgcctctcccagcctccgcctcccaaagtgctgggatttcaggagtgagccaccgcgcctggccagcatcgcgctgtttgtgcagtgtgccctgtgctaggtcttgcagtgggtaccagtagagacataaaagtacaaaagataattggacgtttagtagagtcctgaaagggggcgggataggaagatacctaaccataagaaaaaccagcaagagcggaaaaggagctagtcctccagatcaataagttaatcacttatgtttgtgattccctgcattttgggtgattctctgtcgaggtcctcttaagtccagacttttgatataatctgcagtttgcgccatttggattcctgaagcatctttacaagccacctacattccttatggagctgtggcacaacagcaagcccacgatgtctcaccggattaataaaaatataggcgctcacgcttttgtttaccgatatagtatctcctcctcccctcactccatcaacccccacgcgacacaactttccggaagtaagcaaaatccgttatcaaggtgaaactccggggaccaggctccacagctgccataaactggatggcacgttagaagccggtgggtgtaggtgaggcacgctggcgcccgcgggcccttctccagccgctacccagtgggaatccgcggggctgaagccccgaaaccaggctgagcgtcccagagcgcaacctccctttcccccagcagcgccggcgccgcagaagccgcgtgtccccaggcgcactcccccaaggtgaacccccgccccccacggaggcggctgggtcgcgggtctgggcggggcgctccggacgccctcccgccgctgcgcacccctcccgcgagctgccagctccctcggcctctccacccaaaactggcccaaccgccaatcgtctgcctctcacctcctacagcaggtgacccatggccaatcgccaggggtctctttgccaggagccgccagggccagccaatcggggcgacccctccgccggggaggggacgggaaaggggtggggggtgaagggggtgaagggggtgtcccgggggacgggctgaacctcagtcaggaccgcctgcaccgcagtccggggatcgggtcgaggggagaagaaaaaggggtgctcgggagcagcccccggctacctcccctggaggcacagagggcgggggccttggcgaatggctttcttgctggccacttgcggagtgagtagaccccgagggtctgggagaggggccggcccctacccctgagtccccggggtcccggccgccaggccggagcgcgaatgtcgtgctcaccctgcctccttcccgccgccccctgggggtttggattcaggatttgttcctagtgtccaagattttgataagaaacttacagaagctgatgcttacctacaaatcttgattgaacaattaaagctttttgatgacaagcttcaaaactgcaaagaagatgaacagagaaagaaaattgaaactctcaaagagacaacaaatagcatggtagaatcaattaaacactgcattgtgttgctgcagattgccaaaagtactattaatcccgtagatgcaatatatcaacctagtcctttggaacctgtgatcagcacaatgccttcccagactgtgttacctccagaacctgttcagttgtgtaagtcagagcagcgtccatcttccctaccagttggacctgtgttggctaccttgggacatcatcagactcctacaccaaatagtacaggcagtggccattcaccaccgagtagcagtctcacttctccaagccacgtgaacttgtctccaaatacagtcccagagttctcttactccagcagtgaagatgaattttatgatgctgatgaattccatcaaagtggctcatccccaaagcgcttaatagattcttctggatctgcctcagtcctgacacacagcagctcgggaaatagtctaaaacgcccagataccacagaatcacttaattcttccttgtccaatggaacaagtgatgctgacctgtttgattcacatgatgacagagatgatgatgcggaggcagggtctgtggaggagcacaagagcgttatcatgcatctcttgtcgcaggttagacttggaatggatcttactaaggtagttcttccaacgtttattcttgaaagaagatctcttttagaaatgtatgcagacttttttgcacatccggacctgtttgtgagcattagtgaccagaaggatcccaaggatcgaatggttcaggttgtgaaatggtacctctcagcctttcatgcgggaaggaaaggatcagttgccaaaaagccatacaatcccattttgggcgagatttttcagtgtcattggacattaccaaatgatactgaagagaacacagaactagtttcagaaggaccagttccctgggtttccaaaaacagtgtaacatttgtggctgagcaggtttcccatcatccacccatttcagccttttatgctgagtgttttaacaagaagatacaattcaatgctcatatctggaccaaatcaaaattccttgggatgtcaattggggtgcacaacatagggcagggctgtgtctcatgtctagactatgatgaacattacattctcacattccccaatggctatggaaggcaagtgtgtccatttcctctgatcagcagtagactctgctgttccttgagacatgccccttccccctcttcctcttaactgtcaaccttacctaaaaacttttgattttgcaggtctatcctcacagtgccctgggtggaattaggaggagaatgcaatattaattgttccaaaacaggctatagtgcaaatatcatcttccacactaaacccttctatgggggcaagaagcacagaattactgccgagattttttctccaaatgacaagaagtctttttgctcaattgaaggggaatggaatggtgtgatgtatgcaaaatatgcaacaggggaaaatacagtctttgtagataccaagaagttgcctataatcaagaagaaagtgaggaagttggaagatcagaacgagtatgaatcccgcagcctttggaaggatgtcactttcaacttaaaaatcagagacattgatgcagcaactgaagcaaagcacaggcttgaagaaagacaaagagcagaagcccgagaaaggaaggagaaggaaattcagtgggagacaaggttatttcatgaagatggagaatgctgggtttatgatgaaccattactgaaacgtcttggtgctgccaagcattaggttggaagatgcaaagtttatacctgatgatcagggcagtaggcataattcagcaacaaacaatcttcctttgggagaaacctgttcattccaatcttctaattacagtggttcctatctcagggatactggactttctgacgcagatgaacaattaaggggaaaagcttcccttttccctctgtggcagttacgattttgacttcagtcctgagaaaaacttcaggttttgaaaatcagatgatgtcttctccttttccaaacaccacacgttgaaagcatttataaatccaagtctgaaactctgcgctctagtactgctgttaagatacacaacttgtttcttagttcatataatctcgggatacacacacacacacacatatatatacacacacatacgtatacacacacatacatatatataaatatacctgatgccagatttttttcataaatattctgcctactgtaaatatgggttcctctgagttgttttagaaaattagcgcaatgtattaaaatcaagtgttaggaaatttcatggtcttacctacaataacttttattttggaattgaactattattaaattgtatctaatcctggaaaaaaaacaaaaatgctagtaaaatgataatgtaccgaaattggagaaatattcaattgtaactcacttttaaaaataataaaaccttagggggggtcccggtacaaatttccccttatagagggcggttttaaatttaattggcggcttttaacaacgtt

SEQ ID NO: 735114 - DNA, 18573 bp, Homo sapiens
  misc_feature (18497)..(18497): n is a, c, g, or t
  misc_feature (18508)..(18508): n is a, c, g, or t
  misc_feature (18513)..(18513): n is a, c, g, or t
  misc_feature (18516)..(18516): n is a, c, g, or t
  misc_feature (18518)..(18518): n is a, c, g, or t
gtaagggtctttacatggtttccagatagttcattagttgttgctttctttttttgtctgttttctgttttttttttttaaataactgtggtatgatgtaataggaacttataatttctgagttgcttatttttcctttacagttatagtaaagttatactcatttattttctcctgctttctgcagagtaaaatactgatttttgtctagaaacaagacagtgcaagacaatgttgaaagtgaaattctatgttaaaatatgccagatttattttaagaatttaatatctgtagtcagttatcaatacaaccaaattacataattatgcatgataataggtaaatactgagaagttcacctcattttcttgttaaaggatttggctattaccgtatgtgtcagttagtactcttttgtatggtagtgaaagaaaactcaacccaaactgattcatgaagaagaaagtaaatctggttagatgtggtttgaattaggtaattcatgtcatgaggactcagatctcccatctctatttctacgttccacttttgcattggcttcattttcggttaggttctcccttggtggtggtaaggtggttgtagcaatgtcagcctcccatttttggaaccgagtccataggaggctattctttctagaccttaataggagtaacacaattattgctcatcaccctagctttggccatgtgtcaaatcctgaccagtcacaatttcacagtcatagattctaccctggagctgggatgttactggcctcactagaaacacattgctgatagggtagaaggtgtgttcatcctacccaacccgacccgcaccaaagtcagaatagggaaaaacagatgttgggtgacatgcaactaacgtctgccgtactacactgaagatatttttctatgtttattctccagtgaaagagcttatatttgtggtacataggggattttgttttaatttagaaaatttaattgtagaaaacatgttttataaccctttctctgtactttgttctatatcaggaattgacttgattagataaggtgacatagggtatcttaggccctacaagatagtaaaccccccatcacttgaaagtattcagtagaggcttaaaaaacattattaaaggatgtggttattaggggactttaagaaatgaatatgaaattgaagtaggaaatctttaagctactctgtgagttatgccttttaaaagcaatttgtaattcctgtagatttcttttaaatttaggcagtttcataaatgactatagcatcattttagcaaatttgtgatcctgtaagaggaggataagtgttttttgtttgtttgtttgttttttgtttttttgagacagagtctcactttgtaccccagaaagtaaatctagttagatgtggtttgtctcggctcactgcaacctccaccccgtgcgttctagcaattctcctgcctcagccaccacacctggcctaagaggggaggataagtgttttagtgatcatattagactgaatgtggcagatgagatttcccgcccccccattgttggttagactgacattcaacattcaacaagagccacctgcccttgtaggcatttctgccactatacccctacataaacctagagtgctattgcttacttgctttccttcaaatacattttttcatttgtggcctccacattcttgtgtgtgatgtcctttctctgtgaaatgtcttctaccctttttttcaaagcctagtttagaactgacctcttctatgaaccctctgccgactggcctttccttccccagtcccccaagttcaaaatgatctctttcctttgaatactatagtatttgcacaattcactatctccttatcatattcttcttgtttatttgttatcagctgatgttgacatcataagttcaggttcctaactagatccaatattggaatttttcagcttttgctaagaagagagcttgtatgtctttgggaataatgggcagaaaaagataactttgagaagtcttagacttctaatagctttgatatttaaaagtacatgtaatacaagaggtttttttcctacatttaatgcatggagaagataggacatttagaaatatggaattaatgttcatttgactggcaaaagattattttctcagatgtagtgaagtgtggtaaagaacttcactctagagccagaatgtctgtgtttgtatcccagagcccaccacttacatttaaccattaacattcaacttactgtctctgagtttcagtggcctcatctataaaatgaggataataagagtacctacttcatagagttgttttagtggttaaataaactaacgtaaacttgctagaacttgataaactaatattggatgagaactggttgaaataatgcctggctatagtaaaaacttggtaaatgttagttgccattacaatgcaactactgttcctaccattccctctgccagtgcctggtattcagtagcactcagtaaatgttagttaaatgaagaaataactgaaggaatgaatgaacaaatggttgatgtagagattgcttttccattgttgtttattgaatattttgagatgtataacatactgtctgttaggcactgtgggatgggcactcacggagctgtcttccaaaggggtataggagaggagacgcagtgatctcagcaacctacctttaaaacatatcctagtatctactgccatgttaggttctcttcttttgctttttttaaaaaaaaattctcacaaaactccccccacccacttcagtttatagatgaggaagctcctactacataatagtgcttcccagtctaattcttgacctcattgtatttatatgtcctttttttttttgacagagtctcactcattgcagtggcacaatcacagctcactgcaacctctgcctcccctgctcaagtgatcctcccacctcaacctcctgagtagctgggactacaggcatgcaccaccacgcctggctaatttttgtatttttttgtagagatgcggttttgccatgttggccaggctggtctcgaactcctgggctcaagccatctgcccactttggcctctgagagtgctgagattataggcatgagccaccattcccagccatgttttcctttttcattgaactttatctactttagccattaaactccactccattggtcttgtcattactaagagctgaaccacctgcaaaatattaagttaaaaagcgttttctttgacaacagttttcttttcttcatcttcctctatcactttacttctgaacttttattctctcattttgatctgacccctacttctctgtttttcctggccatttagtactttcttgttttgctcatcccatttcccagtggagaccttctggtctgctgctttatcactggttttgttagaagacatacaaatggcaaggaggtatatgaaaaggtgcctaacatcattgatcatcagagaaatgcagaccaaaactacaatgagatatcatttcaccccagttaaaatggctttttttttttttttccaaaagacaggcaataacaaagtactggtgaggatgtggagtaaagggaacccacatacactattagtaggaatgtaaattagtacagccactgtggagaacagtttgaaggttcctcaaaaaactaaaaatagagctaccatataatccagcaatcccactgctaggtatatatccaaaagaaaggcaatcaatatacggaagagatacctgcacacccaggtttattgcagcactattcacaatagccaagatttggaagcaacccaggtgtccaacagatgaatggataaagaaaacatggtatataaacacaatggaatactattcagctgtgaaaaagaatgaaatcctgtcatttgcaatcctgtcttgaatagaactggaggtcatgatgttaagtgaaataagacaggcacaaacttcacatgttctcacttatttgtgggagctaaaaattaaaacaatcgaactcatggagctagagaatagaattatggttaccagaggctggaagggtggttgggcgtataagtgtagggggagtggggatggttaatgggtacaaaaaaatgagaacgaataagatctacttgataacacaacagggtgactatagtcaacagtaattatacatttaaaaataactagaagagtataattagattgtaacacaaaagataaatgcttgaggtgatggatacctatttaccctgatgtgattattacttatttcatgcctatatcaaaatatttatactccaaaaatatatatacctactatgtacccacaaaaatttaaaaatttatatattgtttttgctatcacctttagaatttcttgtcattggatagttcgtctgtataccattctggtcttcattccccagggcccccgttgtctgatttttctgcttctagaactgttagaggtcacaaaagcaagatggttgtatctatcacaatttttgtctgactttaactgggtatctgttacgatttagtagtcatcttactgacttcttgttggtttccaattgaatcctcacagtagactgttttcattgtaatcagtatcgaattatagcctgttcccttcttcataaatgaaggctttcttcttcaacagttcttagtgacttcacctgtactttatttctctgctttgaatatttcgaagaaaacatattcttgctctttcccaaggttaacactacatacattaccttgaccacaggatgttttcttgcagattgtgacctaattccatcacccttcagcagcccccaccgttttcatggattcagctaaaccttctgtaagatgactctttttccccctaatctttatatctcttttgatatgtagctttagtctcactttttttccttttggattttgccagttagatgtctccctggaattccacttcagcatggctaagactaagcttgtcttctctttcctccccaaagcaaattgtaattaggatagactgaaggtgacagaagataactaagatcttcttcatcctttcggctcttatggaagctgaattccagtagtcattctaaatttgttgtatgtcagcttatggtatcttttcatgtctttacattcagccaaagaggaagttccttgaaggggagaccagagggcgtgctgtgcttcttaatcctctctttcttaaccagtaagaggcattcagtagatatctgatgatactgattaatagaggggaacttttcagattcttttttttttttaaccctagtaagctttagtacaaactaaatgctgagagattatcaagtaagggattgatcatcacaagaagactcaggatgttacatcctgtaggttttatagtttcctatattgtaaaaaatatgagttatagcagcttgtctggatgtcatacaggtataaaaatcagttttataaacttgagtaaattggggcccattttagaaaaaactcttgcaggctgtgaatgccaatatataagtaaagtattaagtataatgttatttaatgtgggcaaacataaagccaggtgtaaattttttaggtttaaaatcttatagaactatacatccaaaagaaaatttcaagttaaacataatacaaagcaatacaatctaaattaacattaatttaatgtgatgaatgatattgccttgctaaaagtgggtcactacttacaatgtgcaaatggtactcatcgttagggtatagattcttttaaactatgacatacgtacactaccatgtggaacgtgatgatgtgttctctgttctaactactgggaagacttccttggcatagcacatgccatggggtcagttggctttgacttcatatagatatgccatttacttggtcagtgtcacttctatgacaagtagtatgttgtgccagtttgattataagtacaaatatgggcaatgaagtaacttggttttaaggttgttactaagctgagtaacagtgtgtggctatacaaatttttataggctatcaggaatgaaaacacaggagattgttgtagattcaagtattttagattcaagtttgaagatgctcatgcagatgtttaactgagttgtatagacctttatgtttctttctttttctctttttttttttttgagacagagtcttgctctgtcacccaagctggagtgcaatggtgtgatctcggcttactgcaacctccgcctcccaggttcaagcaattctcctgcctcagcctcccaagtagctgggattacagatgtgcaccacgacgcccagctgattttttgtattttagtagaggcggggtctcaccatgttgtcaagatggtctcaatctcctgaccttgtgatccacccacctctgcctcccaaagtgctgtgattacaggcgtgagccaccgcgcctgactgacctttatgtttcttaactttatgctatacatcagttgatatttcaaaaatttaaatggtttctatgattattctttgggctaagaaattgggcattaattgtcctcatatgtatggtttttgtggctacttcatgtagattttatttttggtggttatcaaattggaatttttttttttttttttttttttgagacggagtctcattctgtttcccaggttggagtacagtggtgcaatctcagctcactgcagcctcgacctcccaggctcaagcagtcctctcacctcagccttctaagtagctgggactacaggcacgcaccaccacacctggctagttttttgtgtttttagtagagatggggttttaccctgttggccaggctggtcttgaactcctggcctcaagtgatccacctgcctcagcctcccaaagtgctgggattagaggcatgagccaccacacctggctgaaattggaatttcattggtactgcctgtaattttatgttaatttttttttttttttgtcgtcactagcttttatctaaagcccctagagagaaaggccatgataccttgtatacaaggttataagagtatacaagggaaagggagggctgaagggaacagggtgggctggtacaagcctcattagaaataccattgagtctgtgagtaaaacatcattatatgaaaaggagatgtggttttagggtggtccaattacttttgcaccagcctaataaaattacaagtcattatcaatagagacattgtaaaacctttttttttcccaaaagaagtatcaggtatgataattacatgtctgcccaactttcgttatagattaacataacttaattgtatttaaggtacaatttaggagagttgctgaaaaatgaatctttagtattgggatgccttgattctaccctcaatagctataatggattatgtgtctgagtagattaataaaaatcttttgagcatttttcttgaactacttcactgaagattagctttttgagcatccattttaatttctcagtatataaggatcggtttatcacaactgtattgttttccctggccttgttagattatattttcatatcatgtagaaaaataggtgtattcgttctcccttgaagtcctttgtctcccaaaggaaatggttgcaatacagatgtgtcacctcttccacaggtaaagtggaatggagaagtagccagttaaatagtgcatgctcaatttggaacatttagagcatacaggaaagttatttatttggtaaatattttttaagcatttactatgtttcatgcattgtactagttgtagaggatataattgaatacaactacatgtagcccttgactttatggaactagtctagtataaagatttaagattgcctggcatggtggctcacgccactaatcccagcactttgagaggccaaggcaggattgcttgaggccagaagtttaagagtagcttggtcaacataatgagactccatctctaaaataaatagatagatagatagatagatagatagatagatagatagatagaagtagttagacaacacaaagcagtttcactcatcttgtggcaaggagttatgtatttctaatcaaatttggcaactcaagcattttcaacaaaatctacatgttttttcagaataaagtgaccaacacagaatgttacctgtaaaaatcagagcaataattgctatctaaaataattttgaaaattaagtggtactgaaaggctcatatagcaaaaatatggcctcctgtcattgtactttcctacttcccagactcaccattttcaacattttttagtagtttattttgccattttatagcatagtacctgacattttatttattcaacagacatttcttaagtacctaatacatgccattccttgtttgaagggatgctaaggatacagtggtgaacaaggcgttgtggggttgtatagagggtattcattcctaaccttgaaccaaatatttctttctgttggataatgcattaaaaattgcaaacagtttacaaacttttggagcaatggtggccttgatcataaagtagggactgcttctaccgtatacatgcttggtggtgtatttgtgatatctggctaaagtttctacatggaaattgactgactttagttttgagacttctgggaaccagtcaggcaaaatagtgaaactgtgtatcctgtttccaagagttgtcttttaaggttatctgcttcattcatttggcctgacttgctaggcaaatgcctagggtaaatatgatttgattaactataacaacaacagcaacaacaacaactttattttttagagcagtttgaggttcacagcaaaattgagcagaatgtacagagattttccctatacccgcttcccctacgcatgtgcggcctcccctactatcaacatcccccaccagagtggtttgttacaattaatgaacctacattgacacatcattatcactcaaggtccgtagtttacattagagtccactcttggtgttgtgtatgggtttggtcgattttataatgacatttatccaccattatagtgtcatacatagtaattttgctaccctaaaaatccagtgtgctccacctgttcctccttccctcctccctcatccctggcaaccactgaactttttaacatctccatagttttgccttttccagaatgtcatatcattggaatcacacagtatgcagccttttcaaatgggcttctttccgttagtaataggcatttaagtttcatcctcatcttttcatggcttgatagctcatttctttccctccctcttttcttccctgtcttccttccttcctcttctttcctgtttcctctttcttcttccttttttaagagacaaggtgtctcactctgttgcccaggctggagtgcagtggcccaatcatagctcattgcagccttgaattcctgggctcaagtgatcctcctgcgttagcctcctgagtagctgggatcacaggctccagtcattttagtgctgaataatatttcattatctggatgtaccgcctattcattcacctactgaagaatatcttggttgcttctaagttttggcaattatgagtgaagttactataaacattgtatacaagttttatgtggatgtatgttgtcatctcccttgggcagataccaaggagtgccattgttggatcatatggtaaatatatctttagttttgtacagaattctaggttggtatttttttctctctcagtcctttattttatttggagacagtctcgctatgtcgcccaggctgccatacagtggtgccatctgggctcactgaaacctccacctcccaggttcaagcgattcttgtgccttggcctcccaagtagctgggattacaggagtgcgccaccacgcctgctaatttttgtatttttagtagagacagggttttgccatgttgcccaggctggtctcaaactcctgaccttaagtgattcacccacctcaatctcccaaaatcctgggattacaggcctgagctactgtgcctgatctctctcagtactttaaagaaatatttcattccacttttcttttttttcttctttttgagatggagtctcactctgtcgcctgggctggagtgcagtggcgcgatctcagctcactgccacctccgcctcctgggttcaagtgattctcctgcctcagcctcctgaatagctgagattacaggcgcccaccaccatgcccagctaattttttgcatttttagtagagacgggggttccaccatgttggccaggctggtctcgaactcctgacctcgtgattcgcacatctcggcctcccaaattgctgggattacaggtgtgagctaccacgcctggcccactcttcttgcttacatagtttctgaggagatgtcagatgtaatttttatttttgctcttctgtaggcaagttgagttttttccccctctagcttctctcaggatttttttctttatctttgattttcagtagtttgaaaattatatgcctagctgtcagggttttttgcttgtttgtttttgttttctcaggtgtgactccagaaaggttctaaagaggagctttacaatctcttctctggggtttatggagacttcctttacccttctgtgttagccccttaaagcactgcgtcaaccttaaaagggcacaggaaagggtgtctatgccatttttatgccatttatcctgcttggtgttttctgagctttcttcatctgcggtttaatgtctcacattaatttgtagaaattctctgtcattgtttcaaatttttcttcagttcttttctctgtttcttcttctggtgttcccattatgcttttgtggttgtcgtacagttattggatattttgttccaggcttttttttttccagtctttttttccttttgcttctcggttttgtaggtgtctgttgagatactctcaagtgcagatattctttcctcagctttgtctagtttactaataagcccattaaaggcagtcttcatttctgttacagtctttttgatcagtagcatttcttttttattctttcttaaaatttctgtctttctgcttacattgcccatctgttcttgcatggtttctactttgtccattagagttcttaggatatttatcataattatttcaaatttctggtgtaacaattccaacatccctgcaacatccaagtctagtttcgatgcttactgtgtctcttccagctgtgttttttcctatttaatatgtcttataattttttcttgatagccatacatgatgcattaggtaacagaaactgctgtgagtggacctttagtaatgtggtggtaaggtgtgcatggaggggaaacattttcagtctgttagtgaacttttgtcaacttcacatgtgcttctcaagtccatcctgtaagtgggagagtagggctagagaggactgaagttgggtatatattaaatactttctcctacaaagaagcctagaggggacgcattaggggattttttttcccccagtattcactgtgatgacccttattgagctcctggaggtaaaactcacaaaactgtggttctcccccctgcccatattactacatgtccctggagtttatatctttcagacttgtctgcactgagcttccaccaatttgtcaaatacagatcaggtttccctaccacccgtgcagttgaaaacccacatacaacttttgactcctccagagcttaactactcatagcctgctattgactggaagccttgccaataacataaacagttgattaatacatattttatatgttttctgtattatatattgtattcttacaataaagagaaaagaagatgttattaagaaaatcataaggaagataaaatatatttactgttcattaagtggttcccatgggtgctggttcccatggaggttgccccttgtgagtttttgctcagggaagttgtgattctctatatttgcctgttggtctcctaatttgggagtcatcagttttccctgtgacctcacttctcttacagagttaagaacagttgttggtttttcagtttgttcagtgttttacatgttgttagaacacagtggtacttctaagtttcttaacatgctagatcagaaacctgaagtctcacctaatttggctttttatattttttcttcttttttttcttccattgctaccaaagcatttttcatctgtgtctggggtgacattagagcagaatgtgatttctaggtaaacattattgggctccctagcagaaaaatttttgaaagtagtacatgaattctgtataattaaaattttcttttcatcttaataggtataggtaataggcacggcctattttttttttgctcaacagtctaaaatagtaatttaatcacctaatagccttagttatatagttgaaagaagagttggaaatctgattcatgggttggaaatcacctgtcacatatgagttttaggcactggtcactttattttgaaacagctttggggttttttcctttttcaactcataataggctttaacagcttttagttttgtttctgtttttttaacagcatgagttgccaaatttggttatagcttcttggtacaagatgggtaaatttgctttgtgttgtgtaattactttttattttaaatgctacctcttttatgaacactaactttacactaagattaggaaaatgagaattgcatgtctgcaacaaatagctatctgtagtattaaattgtgaaaatgtagactttggattggagctggcatctcttaatatgtaattgtaacatagagtaaataagtattttgtcccttgtagggtcaaacagtacagtgcatgggcagaattagagatgtaggcttttttttttttttttttttttactggcttagagaaccgtttgatcagctaatatggaattaagtccctagggctgcccaggcacaacattaactgctattaaaggaaaatttaaaagagtattagtgaaggttaaatactgaccatggacatctggcaaaattgatgttttttttcccctccaccattgtttatagtttattgttatttatcagagaattaatgtttattttcagaatctattaccataagaaatctgtttgaggacttcgtatgtgccaggaattctactaaataatgatataatgctgaacagaattagataggatcctcacttcgttaagcttacagtctagtggtatagatcaacattaatcaaagaataacacaaatagaaagcagagcagtggttcatgggattgactgtagagaagcatgagggaagttcccaggtgatggaaaatactttatttcttaatcgtggtggttacatgtgtgcatatgtttatgaaaatatattgtacatttaaagtggatacattttatcacatgtaaattatgactctataaagttaattaaaaagaataactcaggtaaggtggtgtgtgcgcctgtagtcccagctatttctgaggcaggaagatcacttgagcccaggagtttgagttcagcatgggcaacatgagacctgtgagactttgtctctaaaaaaatttaaataaataactaagataaatgtaaaattacagctgtagtaagttctacaaaggagagttacatgggctatgacgatgtaagatagcaagaactgacattggcagggaggaaatgatgatgagtagaagtaaataagtgaagtgtggggattgatgtcaaggggacagtataaaagaaataacagcatgcgccaaggccctaaaattggaaagtccttggcaaattaaaggagtttgaaaaaggccattgtgtgcaaagcagaaaataggtactacaaggtaaaagatggagctaagcggtaggtaaggctaaaccttgtcagccattgttaaatattgaattgtatcctaagcacaactcagtggaaagcagttaaagttctttaattgggggaggcaatgaaggggtaataaaattggttatagaaatactgctctggctctagtgttgagaatgaattggagtagccagagtagattcaagaagactttagtaagattattccaacaggccaggacctgttatagggtggtggcaatggagagagatggacagaatggagagtgtatttaggaggtaaaaatgacagaacttggtgatgcactgaatgtgaaatggggaaggtgtctaggaggactactaggtttatggtttgcgtattagggtggatgatagcagtttcatttactgagacagggagccctggcagagtacccagcttttagagtgggtagggggaaggggagagtgcatctggtgttgggcattttgaagtgatttacatacaacaaactgaaggtatctttaacactgagtccagcaggttagcatatttattcagcaagcattgcacctttttttgttgtttttggggtcttcaactcctggcctcgaatcctccctccttcccccgcctctcccagcctccgcctcccaaagtgctgggatttcaggagtgagccaccgcgcctggccagcatcgcgctgtttgtgcagtgtgccctgtgctaggtcttgcagtgggtaccagtagagacataaaagtacaaaagataattggacgtttagtagagtcctgaaagggggcgggataggaagatacctaaccataagaaaaaccagcaagagcggaaaaggagctagtcctccagatcaataagttaatcacttatgtttgtgattccctgcattttgggtgattctctgtcgaggtcctcttaagtccagacttttgatataatctgcagtttgcgccatttggattcctgaagcatctttacaagccacctacattccttatggagctgtggcacaacagcaagcccacgatgtctcaccggattaataaaaatataggcgctcacgcttttgtttaccgatatagtatctcctcctcccctcactccatcaacccccacgcgacacaactttccggaagtaagcaaaatccgttatcaaggtgaaactccggggaccaggctccacagctgccataaactggatggcacgttagaagccggtgggtgtaggtgaggcacgctggcgcccgcgggcccttctccagccgctacccagtgggaatccgcggggctgaagccccgaaaccaggctgagcgtcccagagcgcaacctccctttcccccagcagcgccggcgccgcagaagccgcgtgtccccaggcgcactcccccaaggtgaacccccgccccccacggaggcggctgggtcgcgggtctgggcggggcgctccggacgccctcccgccgctgcgcacccctcccgcgagctgccagctccctcggcctctccacccaaaactggcccaaccgccaatcgtctgcctctcacctcctacagcaggtgacccatggccaatcgccaggggtctctttgccaggagccgccagggccagccaatcggggcgacccctccgccggggaggggacgggaaaggggtggggggtgaagggggtgaagggggtgtcccgggggacgggctgaacctcagtcaggaccgcctgcaccgcagtccggggatcgggtcgaggggagaagaaaaaggggtgctcgggagcagcccccggctacctcccctggaggcacagagggcgggggccttggcgaatggctttcttgctggccacttgcggagtgagtagaccccgagggtctgggagaggggccggcccctacccctgagtccccggggtcccggccgccaggccggagcgcgaatgtcgtgctcaccctgcctccttcccgccgccccctgggggtttggattcaggatttgttcctagtgtccaagattttgataagaaacttacagaagctgatgcttacctacaaatcttgattgaacaattaaagctttttgatgacaagcttcaaaactgcaaagaagatgaacagagaaagaaaattgaaactctcaaagagacaacaaatagcatggtagaatcaattaaacactgcattgtgttgctgcagattgccaaaagtactattaatcccgtagatgcaatatatcaacctagtcctttggaacctgtgatcagcacaatgccttcccagactgtgttacctccagaacctgttcagttgtgtaagtcagagcagcgtccatcttccctaccagttggacctgtgttggctaccttgggacatcatcagactcctacaccaaatagtacaggcagtggccattcaccaccgagtagcagtctcacttctccaagccacgtgaacttgtctccaaatacagtcccagagttctcttactccagcagtgaagatgaattttatgatgctgatgaattccatcaaagtggctcatccccaaagcgcttaatagattcttctggatctgcctcagtcctgacacacagcagctcgggaaatagtctaaaacgcccagataccacagaatcacttaattcttccttgtccaatggaacaagtgatgctgacctgtttgattcacatgatgacagagatgatgatgcggaggcagggtctgtggaggagcacaagagcgttatcatgcatctcttgtcgcaggttagacttggaatggatcttactaaggtagttcttccaacgtttattcttgaaagaagatctcttttagaaatgtatgcagacttttttgcacatccggacctgtttgtgagcattagtgaccagaaggatcccaaggatcgaatggttcaggttgtgaaatggtacctctcagcctttcatgcgggaaggaaaggatcagttgccaaaaagccatacaatcccattttgggcgagatttttcagtgtcattggacattaccaaatgatactgaagagaacacagaactagtttcagaaggaccagttccctgggtttccaaaaacagtgtaacatttgtggctgagcaggtttcccatcatccacccatttcagccttttatgctgagtgttttaacaagaagatacaattcaatgctcatatctggaccaaatcaaaattccttgggatgtcaattggggtgcacaacatagggcagggctgtgtctcatgtctagactatgatgaacattacattctcacattccccaatggctatggaaggcaagtgtgtccatttcctctgatcagcagtagactctgctgttccttgagacatgccccttccccctcttcctcttaactgtcaaccttacctaaaaacttttgattttgcaggtctatcctcacagtgccctgggtggaattaggaggagaatgcaatattaattgttccaaaacaggctatagtgcaaatatcatcttccacactaaacccttctatgggggcaagaagcacagaattactgccgagattttttctccaaatgacaagaagtctttttgctcaattgaaggggaatggaatggtgtgatgtatgcaaaatatgcaacaggggaaaatacagtctttgtagataccaagaagttgcctataatcaagaagaaagtgaggaagttggaagatcagaacgagtatgaatcccgcagcctttggaaggatgtcactttcaacttaaaaatcagagacattgatgcagcaactgaagcaaagcacaggcttgaagaaagacaaagagcagaagcccgagaaaggaaggagaaggaaattcagtgggagacaaggttatttcatgaagatggagaatgctgggtttatgatgaaccattactgaaacgtcttggtgctgccaagcattaggttggaagatgcaaagtttatacctgatgatcagggcagtaggcataattcagcaacaaacaatcttcctttgggagaaacctgttcattccaatcttctaattacagtggttcctatctcagggatactggactttctgacgcagatgaacaattaaggggaaaagcttcccttttccctctgtggcagttacgattttgacttcagtcctgagaaaaacttcaggttttgaaaatcagatgatgtcttctccttttccaaacaccacacgttgaaagcatttataaatccaagtctgaaactctgcgctctagtactgctgttaagatacacaacttgtttcttagttcatataatctcgggatacacacacacacacacatatatatacacacacatacgtatacacacacatacatatatataaatatacctgatgccagatttttttcataaatattctgcctactgtaaatatggggnccccgggtggntaaanatngngccggtttaacccggggggaattcggggtaccacacaaaaccattgggaggcaca

SEQ ID NO: 735115 - DNA, 18742 bp, Homo sapiens
gtaagggtctttacatggtttccagatagttcattagttgttgctttctttttttgtctgttttctgttttttttttttaaataactgtggtatgatgtaataggaacttataatttctgagttgcttatttttcctttacagttatagtaaagttatactcatttattttctcctgctttctgcagagtaaaatactgatttttgtctagaaacaagacagtgcaagacaatgttgaaagtgaaattctatgttaaaatatgccagatttattttaagaatttaatatctgtagtcagttatcaatacaaccaaattacataattatgcatgataataggtaaatactgagaagttcacctcattttcttgttaaaggatttggctattaccgtatgtgtcagttagtactcttttgtatggtagtgaaagaaaactcaacccaaactgattcatgaagaagaaagtaaatctggttagatgtggtttgaattaggtaattcatgtcatgaggactcagatctcccatctctatttctacgttccacttttgcattggcttcattttcggttaggttctcccttggtggtggtaaggtggttgtagcaatgtcagcctcccatttttggaaccgagtccataggaggctattctttctagaccttaataggagtaacacaattattgctcatcaccctagctttggccatgtgtcaaatcctgaccagtcacaatttcacagtcatagattctaccctggagctgggatgttactggcctcactagaaacacattgctgatagggtagaaggtgtgttcatcctacccaacccgacccgcaccaaagtcagaatagggaaaaacagatgttgggtgacatgcaactaacgtctgccgtactacactgaagatatttttctatgtttattctccagtgaaagagcttatatttgtggtacataggggattttgttttaatttagaaaatttaattgtagaaaacatgttttataaccctttctctgtactttgttctatatcaggaattgacttgattagataaggtgacatagggtatcttaggccctacaagatagtaaaccccccatcacttgaaagtattcagtagaggcttaaaaaacattattaaaggatgtggttattaggggactttaagaaatgaatatgaaattgaagtaggaaatctttaagctactctgtgagttatgccttttaaaagcaatttgtaattcctgtagatttcttttaaatttaggcagtttcataaatgactatagcatcattttagcaaatttgtgatcctgtaagaggaggataagtgttttttgtttgtttgtttgttttttgtttttttgagacagagtctcactttgtaccccagaaagtaaatctagttagatgtggtttgtctcggctcactgcaacctccaccccgtgcgttctagcaattctcctgcctcagccaccacacctggcctaagaggggaggataagtgttttagtgatcatattagactgaatgtggcagatgagatttcccgcccccccattgttggttagactgacattcaacattcaacaagagccacctgcccttgtaggcatttctgccactatacccctacataaacctagagtgctattgcttacttgctttccttcaaatacattttttcatttgtggcctccacattcttgtgtgtgatgtcctttctctgtgaaatgtcttctaccctttttttcaaagcctagtttagaactgacctcttctatgaaccctctgccgactggcctttccttccccagtcccccaagttcaaaatgatctctttcctttgaatactatagtatttgcacaattcactatctccttatcatattcttcttgtttatttgttatcagctgatgttgacatcataagttcaggttcctaactagatccaatattggaatttttcagcttttgctaagaagagagcttgtatgtctttgggaataatgggcagaaaaagataactttgagaagtcttagacttctaatagctttgatatttaaaagtacatgtaatacaagaggtttttttcctacatttaatgcatggagaagataggacatttagaaatatggaattaatgttcatttgactggcaaaagattattttctcagatgtagtgaagtgtggtaaagaacttcactctagagccagaatgtctgtgtttgtatcccagagcccaccacttacatttaaccattaacattcaacttactgtctctgagtttcagtggcctcatctataaaatgaggataataagagtacctacttcatagagttgttttagtggttaaataaactaacgtaaacttgctagaacttgataaactaatattggatgagaactggttgaaataatgcctggctatagtaaaaacttggtaaatgttagttgccattacaatgcaactactgttcctaccattccctctgccagtgcctggtattcagtagcactcagtaaatgttagttaaatgaagaaataactgaaggaatgaatgaacaaatggttgatgtagagattgcttttccattgttgtttattgaatattttgagatgtataacatactgtctgttaggcactgtgggatgggcactcacggagctgtcttccaaaggggtataggagaggagacgcagtgatctcagcaacctacctttaaaacatatcctagtatctactgccatgttaggttctcttcttttgctttttttaaaaaaaaattctcacaaaactccccccacccacttcagtttatagatgaggaagctcctactacataatagtgcttcccagtctaattcttgacctcattgtatttatatgtcctttttttttttgacagagtctcactcattgcagtggcacaatcacagctcactgcaacctctgcctcccctgctcaagtgatcctcccacctcaacctcctgagtagctgggactacaggcatgcaccaccacgcctggctaatttttgtatttttttgtagagatgcggttttgccatgttggccaggctggtctcgaactcctgggctcaagccatctgcccactttggcctctgagagtgctgagattataggcatgagccaccattcccagccatgttttcctttttcattgaactttatctactttagccattaaactccactccattggtcttgtcattactaagagctgaaccacctgcaaaatattaagttaaaaagcgttttctttgacaacagttttcttttcttcatcttcctctatcactttacttctgaacttttattctctcattttgatctgacccctacttctctgtttttcctggccatttagtactttcttgttttgctcatcccatttcccagtggagaccttctggtctgctgctttatcactggttttgttagaagacatacaaatggcaaggaggtatatgaaaaggtgcctaacatcattgatcatcagagaaatgcagaccaaaactacaatgagatatcatttcaccccagttaaaatggctttttttttttttttccaaaagacaggcaataacaaagtactggtgaggatgtggagtaaagggaacccacatacactattagtaggaatgtaaattagtacagccactgtggagaacagtttgaaggttcctcaaaaaactaaaaatagagctaccatataatccagcaatcccactgctaggtatatatccaaaagaaaggcaatcaatatacggaagagatacctgcacacccaggtttattgcagcactattcacaatagccaagatttggaagcaacccaggtgtccaacagatgaatggataaagaaaacatggtatataaacacaatggaatactattcagctgtgaaaaagaatgaaatcctgtcatttgcaatcctgtcttgaatagaactggaggtcatgatgttaagtgaaataagacaggcacaaacttcacatgttctcacttatttgtgggagctaaaaattaaaacaatcgaactcatggagctagagaatagaattatggttaccagaggctggaagggtggttgggcgtataagtgtagggggagtggggatggttaatgggtacaaaaaaatgagaacgaataagatctacttgataacacaacagggtgactatagtcaacagtaattatacatttaaaaataactagaagagtataattagattgtaacacaaaagataaatgcttgaggtgatggatacctatttaccctgatgtgattattacttatttcatgcctatatcaaaatatttatactccaaaaatatatatacctactatgtacccacaaaaatttaaaaatttatatattgtttttgctatcacctttagaatttcttgtcattggatagttcgtctgtataccattctggtcttcattccccagggcccccgttgtctgatttttctgcttctagaactgttagaggtcacaaaagcaagatggttgtatctatcacaatttttgtctgactttaactgggtatctgttacgatttagtagtcatcttactgacttcttgttggtttccaattgaatcctcacagtagactgttttcattgtaatcagtatcgaattatagcctgttcccttcttcataaatgaaggctttcttcttcaacagttcttagtgacttcacctgtactttatttctctgctttgaatatttcgaagaaaacatattcttgctctttcccaaggttaacactacatacattaccttgaccacaggatgttttcttgcagattgtgacctaattccatcacccttcagcagcccccaccgttttcatggattcagctaaaccttctgtaagatgactctttttccccctaatctttatatctcttttgatatgtagctttagtctcactttttttccttttggattttgccagttagatgtctccctggaattccacttcagcatggctaagactaagcttgtcttctctttcctccccaaagcaaattgtaattaggatagactgaaggtgacagaagataactaagatcttcttcatcctttcggctcttatggaagctgaattccagtagtcattctaaatttgttgtatgtcagcttatggtatcttttcatgtctttacattcagccaaagaggaagttccttgaaggggagaccagagggcgtgctgtgcttcttaatcctctctttcttaaccagtaagaggcattcagtagatatctgatgatactgattaatagaggggaacttttcagattcttttttttttttaaccctagtaagctttagtacaaactaaatgctgagagattatcaagtaagggattgatcatcacaagaagactcaggatgttacatcctgtaggttttatagtttcctatattgtaaaaaatatgagttatagcagcttgtctggatgtcatacaggtataaaaatcagttttataaacttgagtaaattggggcccattttagaaaaaactcttgcaggctgtgaatgccaatatataagtaaagtattaagtataatgttatttaatgtgggcaaacataaagccaggtgtaaattttttaggtttaaaatcttatagaactatacatccaaaagaaaatttcaagttaaacataatacaaagcaatacaatctaaattaacattaatttaatgtgatgaatgatattgccttgctaaaagtgggtcactacttacaatgtgcaaatggtactcatcgttagggtatagattcttttaaactatgacatacgtacactaccatgtggaacgtgatgatgtgttctctgttctaactactgggaagacttccttggcatagcacatgccatggggtcagttggctttgacttcatatagatatgccatttacttggtcagtgtcacttctatgacaagtagtatgttgtgccagtttgattataagtacaaatatgggcaatgaagtaacttggttttaaggttgttactaagctgagtaacagtgtgtggctatacaaatttttataggctatcaggaatgaaaacacaggagattgttgtagattcaagtattttagattcaagtttgaagatgctcatgcagatgtttaactgagttgtatagacctttatgtttctttctttttctctttttttttttttgagacagagtcttgctctgtcacccaagctggagtgcaatggtgtgatctcggcttactgcaacctccgcctcccaggttcaagcaattctcctgcctcagcctcccaagtagctgggattacagatgtgcaccacgacgcccagctgattttttgtattttagtagaggcggggtctcaccatgttgtcaagatggtctcaatctcctgaccttgtgatccacccacctctgcctcccaaagtgctgtgattacaggcgtgagccaccgcgcctgactgacctttatgtttcttaactttatgctatacatcagttgatatttcaaaaatttaaatggtttctatgattattctttgggctaagaaattgggcattaattgtcctcatatgtatggtttttgtggctacttcatgtagattttatttttggtggttatcaaattggaatttttttttttttttttttttttgagacggagtctcattctgtttcccaggttggagtacagtggtgcaatctcagctcactgcagcctcgacctcccaggctcaagcagtcctctcacctcagccttctaagtagctgggactacaggcacgcaccaccacacctggctagttttttgtgtttttagtagagatggggttttaccctgttggccaggctggtcttgaactcctggcctcaagtgatccacctgcctcagcctcccaaagtgctgggattagaggcatgagccaccacacctggctgaaattggaatttcattggtactgcctgtaattttatgttaatttttttttttttttgtcgtcactagcttttatctaaagcccctagagagaaaggccatgataccttgtatacaaggttataagagtatacaagggaaagggagggctgaagggaacagggtgggctggtacaagcctcattagaaataccattgagtctgtgagtaaaacatcattatatgaaaaggagatgtggttttagggtggtccaattacttttgcaccagcctaataaaattacaagtcattatcaatagagacattgtaaaacctttttttttcccaaaagaagtatcaggtatgataattacatgtctgcccaactttcgttatagattaacataacttaattgtatttaaggtacaatttaggagagttgctgaaaaatgaatctttagtattgggatgccttgattctaccctcaatagctataatggattatgtgtctgagtagattaataaaaatcttttgagcatttttcttgaactacttcactgaagattagctttttgagcatccattttaatttctcagtatataaggatcggtttatcacaactgtattgttttccctggccttgttagattatattttcatatcatgtagaaaaataggtgtattcgttctcccttgaagtcctttgtctcccaaaggaaatggttgcaatacagatgtgtcacctcttccacaggtaaagtggaatggagaagtagccagttaaatagtgcatgctcaatttggaacatttagagcatacaggaaagttatttatttggtaaatattttttaagcatttactatgtttcatgcattgtactagttgtagaggatataattgaatacaactacatgtagcccttgactttatggaactagtctagtataaagatttaagattgcctggcatggtggctcacgccactaatcccagcactttgagaggccaaggcaggattgcttgaggccagaagtttaagagtagcttggtcaacataatgagactccatctctaaaataaatagatagatagatagatagatagatagatagatagatagatagaagtagttagacaacacaaagcagtttcactcatcttgtggcaaggagttatgtatttctaatcaaatttggcaactcaagcattttcaacaaaatctacatgttttttcagaataaagtgaccaacacagaatgttacctgtaaaaatcagagcaataattgctatctaaaataattttgaaaattaagtggtactgaaaggctcatatagcaaaaatatggcctcctgtcattgtactttcctacttcccagactcaccattttcaacattttttagtagtttattttgccattttatagcatagtacctgacattttatttattcaacagacatttcttaagtacctaatacatgccattccttgtttgaagggatgctaaggatacagtggtgaacaaggcgttgtggggttgtatagagggtattcattcctaaccttgaaccaaatatttctttctgttggataatgcattaaaaattgcaaacagtttacaaacttttggagcaatggtggccttgatcataaagtagggactgcttctaccgtatacatgcttggtggtgtatttgtgatatctggctaaagtttctacatggaaattgactgactttagttttgagacttctgggaaccagtcaggcaaaatagtgaaactgtgtatcctgtttccaagagttgtcttttaaggttatctgcttcattcatttggcctgacttgctaggcaaatgcctagggtaaatatgatttgattaactataacaacaacagcaacaacaacaactttattttttagagcagtttgaggttcacagcaaaattgagcagaatgtacagagattttccctatacccgcttcccctacgcatgtgcggcctcccctactatcaacatcccccaccagagtggtttgttacaattaatgaacctacattgacacatcattatcactcaaggtccgtagtttacattagagtccactcttggtgttgtgtatgggtttggtcgattttataatgacatttatccaccattatagtgtcatacatagtaattttgctaccctaaaaatccagtgtgctccacctgttcctccttccctcctccctcatccctggcaaccactgaactttttaacatctccatagttttgccttttccagaatgtcatatcattggaatcacacagtatgcagccttttcaaatgggcttctttccgttagtaataggcatttaagtttcatcctcatcttttcatggcttgatagctcatttctttccctccctcttttcttccctgtcttccttccttcctcttctttcctgtttcctctttcttcttccttttttaagagacaaggtgtctcactctgttgcccaggctggagtgcagtggcccaatcatagctcattgcagccttgaattcctgggctcaagtgatcctcctgcgttagcctcctgagtagctgggatcacaggctccagtcattttagtgctgaataatatttcattatctggatgtaccgcctattcattcacctactgaagaatatcttggttgcttctaagttttggcaattatgagtgaagttactataaacattgtatacaagttttatgtggatgtatgttgtcatctcccttgggcagataccaaggagtgccattgttggatcatatggtaaatatatctttagttttgtacagaattctaggttggtatttttttctctctcagtcctttattttatttggagacagtctcgctatgtcgcccaggctgccatacagtggtgccatctgggctcactgaaacctccacctcccaggttcaagcgattcttgtgccttggcctcccaagtagctgggattacaggagtgcgccaccacgcctgctaatttttgtatttttagtagagacagggttttgccatgttgcccaggctggtctcaaactcctgaccttaagtgattcacccacctcaatctcccaaaatcctgggattacaggcctgagctactgtgcctgatctctctcagtactttaaagaaatatttcattccacttttcttttttttcttctttttgagatggagtctcactctgtcgcctgggctggagtgcagtggcgcgatctcagctcactgccacctccgcctcctgggttcaagtgattctcctgcctcagcctcctgaatagctgagattacaggcgcccaccaccatgcccagctaattttttgcatttttagtagagacgggggttccaccatgttggccaggctggtctcgaactcctgacctcgtgattcgcacatctcggcctcccaaattgctgggattacaggtgtgagctaccacgcctggcccactcttcttgcttacatagtttctgaggagatgtcagatgtaatttttatttttgctcttctgtaggcaagttgagttttttccccctctagcttctctcaggatttttttctttatctttgattttcagtagtttgaaaattatatgcctagctgtcagggttttttgcttgtttgtttttgttttctcaggtgtgactccagaaaggttctaaagaggagctttacaatctcttctctggggtttatggagacttcctttacccttctgtgttagccccttaaagcactgcgtcaaccttaaaagggcacaggaaagggtgtctatgccatttttatgccatttatcctgcttggtgttttctgagctttcttcatctgcggtttaatgtctcacattaatttgtagaaattctctgtcattgtttcaaatttttcttcagttcttttctctgtttcttcttctggtgttcccattatgcttttgtggttgtcgtacagttattggatattttgttccaggcttttttttttccagtctttttttccttttgcttctcggttttgtaggtgtctgttgagatactctcaagtgcagatattctttcctcagctttgtctagtttactaataagcccattaaaggcagtcttcatttctgttacagtctttttgatcagtagcatttcttttttattctttcttaaaatttctgtctttctgcttacattgcccatctgttcttgcatggtttctactttgtccattagagttcttaggatatttatcataattatttcaaatttctggtgtaacaattccaacatccctgcaacatccaagtctagtttcgatgcttactgtgtctcttccagctgtgttttttcctatttaatatgtcttataattttttcttgatagccatacatgatgcattaggtaacagaaactgctgtgagtggacctttagtaatgtggtggtaaggtgtgcatggaggggaaacattttcagtctgttagtgaacttttgtcaacttcacatgtgcttctcaagtccatcctgtaagtgggagagtagggctagagaggactgaagttgggtatatattaaatactttctcctacaaagaagcctagaggggacgcattaggggattttttttcccccagtattcactgtgatgacccttattgagctcctggaggtaaaactcacaaaactgtggttctcccccctgcccatattactacatgtccctggagtttatatctttcagacttgtctgcactgagcttccaccaatttgtcaaatacagatcaggtttccctaccacccgtgcagttgaaaacccacatacaacttttgactcctccagagcttaactactcatagcctgctattgactggaagccttgccaataacataaacagttgattaatacatattttatatgttttctgtattatatattgtattcttacaataaagagaaaagaagatgttattaagaaaatcataaggaagataaaatatatttactgttcattaagtggttcccatgggtgctggttcccatggaggttgccccttgtgagtttttgctcagggaagttgtgattctctatatttgcctgttggtctcctaatttgggagtcatcagttttccctgtgacctcacttctcttacagagttaagaacagttgttggtttttcagtttgttcagtgttttacatgttgttagaacacagtggtacttctaagtttcttaacatgctagatcagaaacctgaagtctcacctaatttggctttttatattttttcttcttttttttcttccattgctaccaaagcatttttcatctgtgtctggggtgacattagagcagaatgtgatttctaggtaaacattattgggctccctagcagaaaaatttttgaaagtagtacatgaattctgtataattaaaattttcttttcatcttaataggtataggtaataggcacggcctattttttttttgctcaacagtctaaaatagtaatttaatcacctaatagccttagttatatagttgaaagaagagttggaaatctgattcatgggttggaaatcacctgtcacatatgagttttaggcactggtcactttattttgaaacagctttggggttttttcctttttcaactcataataggctttaacagcttttagttttgtttctgtttttttaacagcatgagttgccaaatttggttatagcttcttggtacaagatgggtaaatttgctttgtgttgtgtaattactttttattttaaatgctacctcttttatgaacactaactttacactaagattaggaaaatgagaattgcatgtctgcaacaaatagctatctgtagtattaaattgtgaaaatgtagactttggattggagctggcatctcttaatatgtaattgtaacatagagtaaataagtattttgtcccttgtagggtcaaacagtacagtgcatgggcagaattagagatgtaggcttttttttttttttttttttttactggcttagagaaccgtttgatcagctaatatggaattaagtccctagggctgcccaggcacaacattaactgctattaaaggaaaatttaaaagagtattagtgaaggttaaatactgaccatggacatctggcaaaattgatgttttttttcccctccaccattgtttatagtttattgttatttatcagagaattaatgtttattttcagaatctattaccataagaaatctgtttgaggacttcgtatgtgccaggaattctactaaataatgatataatgctgaacagaattagataggatcctcacttcgttaagcttacagtctagtggtatagatcaacattaatcaaagaataacacaaatagaaagcagagcagtggttcatgggattgactgtagagaagcatgagggaagttcccaggtgatggaaaatactttatttcttaatcgtggtggttacatgtgtgcatatgtttatgaaaatatattgtacatttaaagtggatacattttatcacatgtaaattatgactctataaagttaattaaaaagaataactcaggtaaggtggtgtgtgcgcctgtagtcccagctatttctgaggcaggaagatcacttgagcccaggagtttgagttcagcatgggcaacatgagacctgtgagactttgtctctaaaaaaatttaaataaataactaagataaatgtaaaattacagctgtagtaagttctacaaaggagagttacatgggctatgacgatgtaagatagcaagaactgacattggcagggaggaaatgatgatgagtagaagtaaataagtgaagtgtggggattgatgtcaaggggacagtataaaagaaataacagcatgcgccaaggccctaaaattggaaagtccttggcaaattaaaggagtttgaaaaaggccattgtgtgcaaagcagaaaataggtactacaaggtaaaagatggagctaagcggtaggtaaggctaaaccttgtcagccattgttaaatattgaattgtatcctaagcacaactcagtggaaagcagttaaagttctttaattgggggaggcaatgaaggggtaataaaattggttatagaaatactgctctggctctagtgttgagaatgaattggagtagccagagtagattcaagaagactttagtaagattattccaacaggccaggacctgttatagggtggtggcaatggagagagatggacagaatggagagtgtatttaggaggtaaaaatgacagaacttggtgatgcactgaatgtgaaatggggaaggtgtctaggaggactactaggtttatggtttgcgtattagggtggatgatagcagtttcatttactgagacagggagccctggcagagtacccagcttttagagtgggtagggggaaggggagagtgcatctggtgttgggcattttgaagtgatttacatacaacaaactgaaggtatctttaacactgagtccagcaggttagcatatttattcagcaagcattgcacctttttttgttgtttttggggtcttcaactcctggcctcgaatcctccctccttcccccgcctctcccagcctccgcctcccaaagtgctgggatttcaggagtgagccaccgcgcctggccagcatcgcgctgtttgtgcagtgtgccctgtgctaggtcttgcagtgggtaccagtagagacataaaagtacaaaagataattggacgtttagtagagtcctgaaagggggcgggataggaagatacctaaccataagaaaaaccagcaagagcggaaaaggagctagtcctccagatcaataagttaatcacttatgtttgtgattccctgcattttgggtgattctctgtcgaggtcctcttaagtccagacttttgatataatctgcagtttgcgccatttggattcctgaagcatctttacaagccacctacattccttatggagctgtggcacaacagcaagcccacgatgtctcaccggattaataaaaatataggcgctcacgcttttgtttaccgatatagtatctcctcctcccctcactccatcaacccccacgcgacacaactttccggaagtaagcaaaatccgttatcaaggtgaaactccggggaccaggctccacagctgccataaactggatggcacgttagaagccggtgggtgtaggtgaggcacgctggcgcccgcgggcccttctccagccgctacccagtgggaatccgcggggctgaagccccgaaaccaggctgagcgtcccagagcgcaacctccctttcccccagcagcgccggcgccgcagaagccgcgtgtccccaggcgcactcccccaaggtgaacccccgccccccacggaggcggctgggtcgcgggtctgggcggggcgctccggacgccctcccgccgctgcgcacccctcccgcgagctgccagctccctcggcctctccacccaaaactggcccaaccgccaatcgtctgcctctcacctcctacagcaggtgacccatggccaatcgccaggggtctctttgccaggagccgccagggccagccaatcggggcgacccctccgccggggaggggacgggaaaggggtggggggtgaagggggtgaagggggtgtcccgggggacgggctgaacctcagtcaggaccgcctgcaccgcagtccggggatcgggtcgaggggagaagaaaaaggggtgctcgggagcagcccccggctacctcccctggaggcacagagggcgggggccttggcgaatggctttcttgctggccacttgcggagtgagtagaccccgagggtctgggagaggggccggcccctacccctgagtccccggggtcccggccgccaggccggagcgcgaatgtcgtgctcaccctgcctccttcccgccgccccctgggggtttggattcaggatttgttcctagtgtccaagattttgataagaaacttacagaagctgatgcttacctacaaatcttgattgaacaattaaagctttttgatgacaagcttcaaaactgcaaagaagatgaacagagaaagaaaattgaaactctcaaagagacaacaaatagcatggtagaatcaattaaacactgcattgtgttgctgcagattgccaaaagtactattaatcccgtagatgcaatatatcaacctagtcctttggaacctgtgatcagcacaatgccttcccagactgtgttacctccagaacctgttcagttgtgtaagtcagagcagcgtccatcttccctaccagttggacctgtgttggctaccttgggacatcatcagactcctacaccaaatagtacaggcagtggccattcaccaccgagtagcagtctcacttctccaagccacgtgaacttgtctccaaatacagtcccagagttctcttactccagcagtgaagatgaattttatgatgctgatgaattccatcaaagtggctcatccccaaagcgcttaatagattcttctggatctgcctcagtcctgacacacagcagctcgggaaatagtctaaaacgcccagataccacagaatcacttaattcttccttgtccaatggaacaagtgatgctgacctgtttgattcacatgatgacagagatgatgatgcggaggcagggtctgtggaggagcacaagagcgttatcatgcatctcttgtcgcaggttagacttggaatggatcttactaaggtagttcttccaacgtttattcttgaaagaagatctcttttagaaatgtatgcagacttttttgcacatccggacctgtttgtgagcattagtgaccagaaggatcccaaggatcgaatggttcaggttgtgaaatggtacctctcagcctttcatgcgggaaggaaaggatcagttgccaaaaagccatacaatcccattttgggcgagatttttcagtgtcattggacattaccaaatgatactgaagagaacacagaactagtttcagaaggaccagttccctgggtttccaaaaacagtgtaacatttgtggctgagcaggtttcccatcatccacccatttcagccttttatgctgagtgttttaacaagaagatacaattcaatgctcatatctggaccaaatcaaaattccttgggatgtcaattggggtgcacaacatagggcagggctgtgtctcatgtctagactatgatgaacattacattctcacattccccaatggctatggaaggtctatcctcacagtgccctgggtggaattaggaggagaatgcaatattaattgttccaaaacaggctatagtgcaaatatcatcttccacactaaacccttctatgggggcaagaagcacagaattactgccgagattttgtaggtattttttctgccttagagctcttatgcttttctgaaataactgccttttgtcttgaactacagcttctggattaggagtgtgaaagaatggttctgtctttgtaagcgtgtttcacattttatgtgtcatgtcttttgctgaagtcccatatcagaagaagacctaaaacatatattcagagcagtcagaggtcattgataggtttccttcctaaaaacctgacttgcaatgttgaactaaaagaggccttcctaggttgcctagctaaaccagattatggatccctaatttattcttgccagattgaatgatgagctggtccttacagcagactttgtgacccctgcagcactgcctcctggtcctcacagctatccctttttctgtgcctttgctggggaaaaacagtaaccatcacattttgcacgcatctggcttgcttccacttgacactcttgggtcacgtgcagatgactgtgccagtcagtggaaagtctatagtgatggcaccatgactctctctgcctctggaacccttaactgggggggaaggggacagtgggaaagaaagtttcaggcgttgatagcagctctcctccctctgccctggtcatgtctcccttttctggcctctttcaatcctgtttatgccttgcccttcctaaccaggcctttgctgtgttgcttatcttctcacattccatagttgtgtgtccaagtagaggtctgttacggcttttgcagaatggatccttgctcagggaaagtattcacaccatctggcacagaggtccctttcaacctgaggatgaaagcctgcattatattcttaagcaaagccttccctgacccccagtgcccatgtaagctcaccacagcacttaccacctagaatttcaatggtggttacgtctctctccactacgctgtgaacagcttgaggatagggaatttgccaactctgttatggtccttgcacccagaataggacgttcttgcccaaacccaccattcttgggatctcaagttcataagcgtcctgttgaaggccctcattcttatagttagccctggggagtccagttctgttaagatgctttcatcaaaaacttcacagttgctcttctgtgctctactctgtagttgggccacactgagcagattctttggtagaattttcaacttgagactaacacaagtatttccttttctgttcag

SEQ ID NO: 735116 - DNA, 19138 bp, Homo sapiens
gtaagggtctttacatggtttccagatagttcattagttgttgctttctttttttgtctgttttctgttttttttttttaaataactgtggtatgatgtaataggaacttataatttctgagttgcttatttttcctttacagttatagtaaagttatactcatttattttctcctgctttctgcagagtaaaatactgatttttgtctagaaacaagacagtgcaagacaatgttgaaagtgaaattctatgttaaaatatgccagatttattttaagaatttaatatctgtagtcagttatcaatacaaccaaattacataattatgcatgataataggtaaatactgagaagttcacctcattttcttgttaaaggatttggctattaccgtatgtgtcagttagtactcttttgtatggtagtgaaagaaaactcaacccaaactgattcatgaagaagaaagtaaatctggttagatgtggtttgaattaggtaattcatgtcatgaggactcagatctcccatctctatttctacgttccacttttgcattggcttcattttcggttaggttctcccttggtggtggtaaggtggttgtagcaatgtcagcctcccatttttggaaccgagtccataggaggctattctttctagaccttaataggagtaacacaattattgctcatcaccctagctttggccatgtgtcaaatcctgaccagtcacaatttcacagtcatagattctaccctggagctgggatgttactggcctcactagaaacacattgctgatagggtagaaggtgtgttcatcctacccaacccgacccgcaccaaagtcagaatagggaaaaacagatgttgggtgacatgcaactaacgtctgccgtactacactgaagatatttttctatgtttattctccagtgaaagagcttatatttgtggtacataggggattttgttttaatttagaaaatttaattgtagaaaacatgttttataaccctttctctgtactttgttctatatcaggaattgacttgattagataaggtgacatagggtatcttaggccctacaagatagtaaaccccccatcacttgaaagtattcagtagaggcttaaaaaacattattaaaggatgtggttattaggggactttaagaaatgaatatgaaattgaagtaggaaatctttaagctactctgtgagttatgccttttaaaagcaatttgtaattcctgtagatttcttttaaatttaggcagtttcataaatgactatagcatcattttagcaaatttgtgatcctgtaagaggaggataagtgttttttgtttgtttgtttgttttttgtttttttgagacagagtctcactttgtaccccagaaagtaaatctagttagatgtggtttgtctcggctcactgcaacctccaccccgtgcgttctagcaattctcctgcctcagccaccacacctggcctaagaggggaggataagtgttttagtgatcatattagactgaatgtggcagatgagatttcccgcccccccattgttggttagactgacattcaacattcaacaagagccacctgcccttgtaggcatttctgccactatacccctacataaacctagagtgctattgcttacttgctttccttcaaatacattttttcatttgtggcctccacattcttgtgtgtgatgtcctttctctgtgaaatgtcttctaccctttttttcaaagcctagtttagaactgacctcttctatgaaccctctgccgactggcctttccttccccagtcccccaagttcaaaatgatctctttcctttgaatactatagtatttgcacaattcactatctccttatcatattcttcttgtttatttgttatcagctgatgttgacatcataagttcaggttcctaactagatccaatattggaatttttcagcttttgctaagaagagagcttgtatgtctttgggaataatgggcagaaaaagataactttgagaagtcttagacttctaatagctttgatatttaaaagtacatgtaatacaagaggtttttttcctacatttaatgcatggagaagataggacatttagaaatatggaattaatgttcatttgactggcaaaagattattttctcagatgtagtgaagtgtggtaaagaacttcactctagagccagaatgtctgtgtttgtatcccagagcccaccacttacatttaaccattaacattcaacttactgtctctgagtttcagtggcctcatctataaaatgaggataataagagtacctacttcatagagttgttttagtggttaaataaactaacgtaaacttgctagaacttgataaactaatattggatgagaactggttgaaataatgcctggctatagtaaaaacttggtaaatgttagttgccattacaatgcaactactgttcctaccattccctctgccagtgcctggtattcagtagcactcagtaaatgttagttaaatgaagaaataactgaaggaatgaatgaacaaatggttgatgtagagattgcttttccattgttgtttattgaatattttgagatgtataacatactgtctgttaggcactgtgggatgggcactcacggagctgtcttccaaaggggtataggagaggagacgcagtgatctcagcaacctacctttaaaacatatcctagtatctactgccatgttaggttctcttcttttgctttttttaaaaaaaaattctcacaaaactccccccacccacttcagtttatagatgaggaagctcctactacataatagtgcttcccagtctaattcttgacctcattgtatttatatgtcctttttttttttgacagagtctcactcattgcagtggcacaatcacagctcactgcaacctctgcctcccctgctcaagtgatcctcccacctcaacctcctgagtagctgggactacaggcatgcaccaccacgcctggctaatttttgtatttttttgtagagatgcggttttgccatgttggccaggctggtctcgaactcctgggctcaagccatctgcccactttggcctctgagagtgctgagattataggcatgagccaccattcccagccatgttttcctttttcattgaactttatctactttagccattaaactccactccattggtcttgtcattactaagagctgaaccacctgcaaaatattaagttaaaaagcgttttctttgacaacagttttcttttcttcatcttcctctatcactttacttctgaacttttattctctcattttgatctgacccctacttctctgtttttcctggccatttagtactttcttgttttgctcatcccatttcccagtggagaccttctggtctgctgctttatcactggttttgttagaagacatacaaatggcaaggaggtatatgaaaaggtgcctaacatcattgatcatcagagaaatgcagaccaaaactacaatgagatatcatttcaccccagttaaaatggctttttttttttttttccaaaagacaggcaataacaaagtactggtgaggatgtggagtaaagggaacccacatacactattagtaggaatgtaaattagtacagccactgtggagaacagtttgaaggttcctcaaaaaactaaaaatagagctaccatataatccagcaatcccactgctaggtatatatccaaaagaaaggcaatcaatatacggaagagatacctgcacacccaggtttattgcagcactattcacaatagccaagatttggaagcaacccaggtgtccaacagatgaatggataaagaaaacatggtatataaacacaatggaatactattcagctgtgaaaaagaatgaaatcctgtcatttgcaatcctgtcttgaatagaactggaggtcatgatgttaagtgaaataagacaggcacaaacttcacatgttctcacttatttgtgggagctaaaaattaaaacaatcgaactcatggagctagagaatagaattatggttaccagaggctggaagggtggttgggcgtataagtgtagggggagtggggatggttaatgggtacaaaaaaatgagaacgaataagatctacttgataacacaacagggtgactatagtcaacagtaattatacatttaaaaataactagaagagtataattagattgtaacacaaaagataaatgcttgaggtgatggatacctatttaccctgatgtgattattacttatttcatgcctatatcaaaatatttatactccaaaaatatatatacctactatgtacccacaaaaatttaaaaatttatatattgtttttgctatcacctttagaatttcttgtcattggatagttcgtctgtataccattctggtcttcattccccagggcccccgttgtctgatttttctgcttctagaactgttagaggtcacaaaagcaagatggttgtatctatcacaatttttgtctgactttaactgggtatctgttacgatttagtagtcatcttactgacttcttgttggtttccaattgaatcctcacagtagactgttttcattgtaatcagtatcgaattatagcctgttcccttcttcataaatgaaggctttcttcttcaacagttcttagtgacttcacctgtactttatttctctgctttgaatatttcgaagaaaacatattcttgctctttcccaaggttaacactacatacattaccttgaccacaggatgttttcttgcagattgtgacctaattccatcacccttcagcagcccccaccgttttcatggattcagctaaaccttctgtaagatgactctttttccccctaatctttatatctcttttgatatgtagctttagtctcactttttttccttttggattttgccagttagatgtctccctggaattccacttcagcatggctaagactaagcttgtcttctctttcctccccaaagcaaattgtaattaggatagactgaaggtgacagaagataactaagatcttcttcatcctttcggctcttatggaagctgaattccagtagtcattctaaatttgttgtatgtcagcttatggtatcttttcatgtctttacattcagccaaagaggaagttccttgaaggggagaccagagggcgtgctgtgcttcttaatcctctctttcttaaccagtaagaggcattcagtagatatctgatgatactgattaatagaggggaacttttcagattcttttttttttttaaccctagtaagctttagtacaaactaaatgctgagagattatcaagtaagggattgatcatcacaagaagactcaggatgttacatcctgtaggttttatagtttcctatattgtaaaaaatatgagttatagcagcttgtctggatgtcatacaggtataaaaatcagttttataaacttgagtaaattggggcccattttagaaaaaactcttgcaggctgtgaatgccaatatataagtaaagtattaagtataatgttatttaatgtgggcaaacataaagccaggtgtaaattttttaggtttaaaatcttatagaactatacatccaaaagaaaatttcaagttaaacataatacaaagcaatacaatctaaattaacattaatttaatgtgatgaatgatattgccttgctaaaagtgggtcactacttacaatgtgcaaatggtactcatcgttagggtatagattcttttaaactatgacatacgtacactaccatgtggaacgtgatgatgtgttctctgttctaactactgggaagacttccttggcatagcacatgccatggggtcagttggctttgacttcatatagatatgccatttacttggtcagtgtcacttctatgacaagtagtatgttgtgccagtttgattataagtacaaatatgggcaatgaagtaacttggttttaaggttgttactaagctgagtaacagtgtgtggctatacaaatttttataggctatcaggaatgaaaacacaggagattgttgtagattcaagtattttagattcaagtttgaagatgctcatgcagatgtttaactgagttgtatagacctttatgtttctttctttttctctttttttttttttgagacagagtcttgctctgtcacccaagctggagtgcaatggtgtgatctcggcttactgcaacctccgcctcccaggttcaagcaattctcctgcctcagcctcccaagtagctgggattacagatgtgcaccacgacgcccagctgattttttgtattttagtagaggcggggtctcaccatgttgtcaagatggtctcaatctcctgaccttgtgatccacccacctctgcctcccaaagtgctgtgattacaggcgtgagccaccgcgcctgactgacctttatgtttcttaactttatgctatacatcagttgatatttcaaaaatttaaatggtttctatgattattctttgggctaagaaattgggcattaattgtcctcatatgtatggtttttgtggctacttcatgtagattttatttttggtggttatcaaattggaatttttttttttttttttttttttgagacggagtctcattctgtttcccaggttggagtacagtggtgcaatctcagctcactgcagcctcgacctcccaggctcaagcagtcctctcacctcagccttctaagtagctgggactacaggcacgcaccaccacacctggctagttttttgtgtttttagtagagatggggttttaccctgttggccaggctggtcttgaactcctggcctcaagtgatccacctgcctcagcctcccaaagtgctgggattagaggcatgagccaccacacctggctgaaattggaatttcattggtactgcctgtaattttatgttaatttttttttttttttgtcgtcactagcttttatctaaagcccctagagagaaaggccatgataccttgtatacaaggttataagagtatacaagggaaagggagggctgaagggaacagggtgggctggtacaagcctcattagaaataccattgagtctgtgagtaaaacatcattatatgaaaaggagatgtggttttagggtggtccaattacttttgcaccagcctaataaaattacaagtcattatcaatagagacattgtaaaacctttttttttcccaaaagaagtatcaggtatgataattacatgtctgcccaactttcgttatagattaacataacttaattgtatttaaggtacaatttaggagagttgctgaaaaatgaatctttagtattgggatgccttgattctaccctcaatagctataatggattatgtgtctgagtagattaataaaaatcttttgagcatttttcttgaactacttcactgaagattagctttttgagcatccattttaatttctcagtatataaggatcggtttatcacaactgtattgttttccctggccttgttagattatattttcatatcatgtagaaaaataggtgtattcgttctcccttgaagtcctttgtctcccaaaggaaatggttgcaatacagatgtgtcacctcttccacaggtaaagtggaatggagaagtagccagttaaatagtgcatgctcaatttggaacatttagagcatacaggaaagttatttatttggtaaatattttttaagcatttactatgtttcatgcattgtactagttgtagaggatataattgaatacaactacatgtagcccttgactttatggaactagtctagtataaagatttaagattgcctggcatggtggctcacgccactaatcccagcactttgagaggccaaggcaggattgcttgaggccagaagtttaagagtagcttggtcaacataatgagactccatctctaaaataaatagatagatagatagatagatagatagatagatagatagatagaagtagttagacaacacaaagcagtttcactcatcttgtggcaaggagttatgtatttctaatcaaatttggcaactcaagcattttcaacaaaatctacatgttttttcagaataaagtgaccaacacagaatgttacctgtaaaaatcagagcaataattgctatctaaaataattttgaaaattaagtggtactgaaaggctcatatagcaaaaatatggcctcctgtcattgtactttcctacttcccagactcaccattttcaacattttttagtagtttattttgccattttatagcatagtacctgacattttatttattcaacagacatttcttaagtacctaatacatgccattccttgtttgaagggatgctaaggatacagtggtgaacaaggcgttgtggggttgtatagagggtattcattcctaaccttgaaccaaatatttctttctgttggataatgcattaaaaattgcaaacagtttacaaacttttggagcaatggtggccttgatcataaagtagggactgcttctaccgtatacatgcttggtggtgtatttgtgatatctggctaaagtttctacatggaaattgactgactttagttttgagacttctgggaaccagtcaggcaaaatagtgaaactgtgtatcctgtttccaagagttgtcttttaaggttatctgcttcattcatttggcctgacttgctaggcaaatgcctagggtaaatatgatttgattaactataacaacaacagcaacaacaacaactttattttttagagcagtttgaggttcacagcaaaattgagcagaatgtacagagattttccctatacccgcttcccctacgcatgtgcggcctcccctactatcaacatcccccaccagagtggtttgttacaattaatgaacctacattgacacatcattatcactcaaggtccgtagtttacattagagtccactcttggtgttgtgtatgggtttggtcgattttataatgacatttatccaccattatagtgtcatacatagtaattttgctaccctaaaaatccagtgtgctccacctgttcctccttccctcctccctcatccctggcaaccactgaactttttaacatctccatagttttgccttttccagaatgtcatatcattggaatcacacagtatgcagccttttcaaatgggcttctttccgttagtaataggcatttaagtttcatcctcatcttttcatggcttgatagctcatttctttccctccctcttttcttccctgtcttccttccttcctcttctttcctgtttcctctttcttcttccttttttaagagacaaggtgtctcactctgttgcccaggctggagtgcagtggcccaatcatagctcattgcagccttgaattcctgggctcaagtgatcctcctgcgttagcctcctgagtagctgggatcacaggctccagtcattttagtgctgaataatatttcattatctggatgtaccgcctattcattcacctactgaagaatatcttggttgcttctaagttttggcaattatgagtgaagttactataaacattgtatacaagttttatgtggatgtatgttgtcatctcccttgggcagataccaaggagtgccattgttggatcatatggtaaatatatctttagttttgtacagaattctaggttggtatttttttctctctcagtcctttattttatttggagacagtctcgctatgtcgcccaggctgccatacagtggtgccatctgggctcactgaaacctccacctcccaggttcaagcgattcttgtgccttggcctcccaagtagctgggattacaggagtgcgccaccacgcctgctaatttttgtatttttagtagagacagggttttgccatgttgcccaggctggtctcaaactcctgaccttaagtgattcacccacctcaatctcccaaaatcctgggattacaggcctgagctactgtgcctgatctctctcagtactttaaagaaatatttcattccacttttcttttttttcttctttttgagatggagtctcactctgtcgcctgggctggagtgcagtggcgcgatctcagctcactgccacctccgcctcctgggttcaagtgattctcctgcctcagcctcctgaatagctgagattacaggcgcccaccaccatgcccagctaattttttgcatttttagtagagacgggggttccaccatgttggccaggctggtctcgaactcctgacctcgtgattcgcacatctcggcctcccaaattgctgggattacaggtgtgagctaccacgcctggcccactcttcttgcttacatagtttctgaggagatgtcagatgtaatttttatttttgctcttctgtaggcaagttgagttttttccccctctagcttctctcaggatttttttctttatctttgattttcagtagtttgaaaattatatgcctagctgtcagggttttttgcttgtttgtttttgttttctcaggtgtgactccagaaaggttctaaagaggagctttacaatctcttctctggggtttatggagacttcctttacccttctgtgttagccccttaaagcactgcgtcaaccttaaaagggcacaggaaagggtgtctatgccatttttatgccatttatcctgcttggtgttttctgagctttcttcatctgcggtttaatgtctcacattaatttgtagaaattctctgtcattgtttcaaatttttcttcagttcttttctctgtttcttcttctggtgttcccattatgcttttgtggttgtcgtacagttattggatattttgttccaggcttttttttttccagtctttttttccttttgcttctcggttttgtaggtgtctgttgagatactctcaagtgcagatattctttcctcagctttgtctagtttactaataagcccattaaaggcagtcttcatttctgttacagtctttttgatcagtagcatttcttttttattctttcttaaaatttctgtctttctgcttacattgcccatctgttcttgcatggtttctactttgtccattagagttcttaggatatttatcataattatttcaaatttctggtgtaacaattccaacatccctgcaacatccaagtctagtttcgatgcttactgtgtctcttccagctgtgttttttcctatttaatatgtcttataattttttcttgatagccatacatgatgcattaggtaacagaaactgctgtgagtggacctttagtaatgtggtggtaaggtgtgcatggaggggaaacattttcagtctgttagtgaacttttgtcaacttcacatgtgcttctcaagtccatcctgtaagtgggagagtagggctagagaggactgaagttgggtatatattaaatactttctcctacaaagaagcctagaggggacgcattaggggattttttttcccccagtattcactgtgatgacccttattgagctcctggaggtaaaactcacaaaactgtggttctcccccctgcccatattactacatgtccctggagtttatatctttcagacttgtctgcactgagcttccaccaatttgtcaaatacagatcaggtttccctaccacccgtgcagttgaaaacccacatacaacttttgactcctccagagcttaactactcatagcctgctattgactggaagccttgccaataacataaacagttgattaatacatattttatatgttttctgtattatatattgtattcttacaataaagagaaaagaagatgttattaagaaaatcataaggaagataaaatatatttactgttcattaagtggttcccatgggtgctggttcccatggaggttgccccttgtgagtttttgctcagggaagttgtgattctctatatttgcctgttggtctcctaatttgggagtcatcagttttccctgtgacctcacttctcttacagagttaagaacagttgttggtttttcagtttgttcagtgttttacatgttgttagaacacagtggtacttctaagtttcttaacatgctagatcagaaacctgaagtctcacctaatttggctttttatattttttcttcttttttttcttccattgctaccaaagcatttttcatctgtgtctggggtgacattagagcagaatgtgatttctaggtaaacattattgggctccctagcagaaaaatttttgaaagtagtacatgaattctgtataattaaaattttcttttcatcttaataggtataggtaataggcacggcctattttttttttgctcaacagtctaaaatagtaatttaatcacctaatagccttagttatatagttgaaagaagagttggaaatctgattcatgggttggaaatcacctgtcacatatgagttttaggcactggtcactttattttgaaacagctttggggttttttcctttttcaactcataataggctttaacagcttttagttttgtttctgtttttttaacagcatgagttgccaaatttggttatagcttcttggtacaagatgggtaaatttgctttgtgttgtgtaattactttttattttaaatgctacctcttttatgaacactaactttacactaagattaggaaaatgagaattgcatgtctgcaacaaatagctatctgtagtattaaattgtgaaaatgtagactttggattggagctggcatctcttaatatgtaattgtaacatagagtaaataagtattttgtcccttgtagggtcaaacagtacagtgcatgggcagaattagagatgtaggcttttttttttttttttttttttactggcttagagaaccgtttgatcagctaatatggaattaagtccctagggctgcccaggcacaacattaactgctattaaaggaaaatttaaaagagtattagtgaaggttaaatactgaccatggacatctggcaaaattgatgttttttttcccctccaccattgtttatagtttattgttatttatcagagaattaatgtttattttcagaatctattaccataagaaatctgtttgaggacttcgtatgtgccaggaattctactaaataatgatataatgctgaacagaattagataggatcctcacttcgttaagcttacagtctagtggtatagatcaacattaatcaaagaataacacaaatagaaagcagagcagtggttcatgggattgactgtagagaagcatgagggaagttcccaggtgatggaaaatactttatttcttaatcgtggtggttacatgtgtgcatatgtttatgaaaatatattgtacatttaaagtggatacattttatcacatgtaaattatgactctataaagttaattaaaaagaataactcaggtaaggtggtgtgtgcgcctgtagtcccagctatttctgaggcaggaagatcacttgagcccaggagtttgagttcagcatgggcaacatgagacctgtgagactttgtctctaaaaaaatttaaataaataactaagataaatgtaaaattacagctgtagtaagttctacaaaggagagttacatgggctatgacgatgtaagatagcaagaactgacattggcagggaggaaatgatgatgagtagaagtaaataagtgaagtgtggggattgatgtcaaggggacagtataaaagaaataacagcatgcgccaaggccctaaaattggaaagtccttggcaaattaaaggagtttgaaaaaggccattgtgtgcaaagcagaaaataggtactacaaggtaaaagatggagctaagcggtaggtaaggctaaaccttgtcagccattgttaaatattgaattgtatcctaagcacaactcagtggaaagcagttaaagttctttaattgggggaggcaatgaaggggtaataaaattggttatagaaatactgctctggctctagtgttgagaatgaattggagtagccagagtagattcaagaagactttagtaagattattccaacaggccaggacctgttatagggtggtggcaatggagagagatggacagaatggagagtgtatttaggaggtaaaaatgacagaacttggtgatgcactgaatgtgaaatggggaaggtgtctaggaggactactaggtttatggtttgcgtattagggtggatgatagcagtttcatttactgagacagggagccctggcagagtacccagcttttagagtgggtagggggaaggggagagtgcatctggtgttgggcattttgaagtgatttacatacaacaaactgaaggtatctttaacactgagtccagcaggttagcatatttattcagcaagcattgcacctttttttgttgtttttggggtcttcaactcctggcctcgaatcctccctccttcccccgcctctcccagcctccgcctcccaaagtgctgggatttcaggagtgagccaccgcgcctggccagcatcgcgctgtttgtgcagtgtgccctgtgctaggtcttgcagtgggtaccagtagagacataaaagtacaaaagataattggacgtttagtagagtcctgaaagggggcgggataggaagatacctaaccataagaaaaaccagcaagagcggaaaaggagctagtcctccagatcaataagttaatcacttatgtttgtgattccctgcattttgggtgattctctgtcgaggtcctcttaagtccagacttttgatataatctgcagtttgcgccatttggattcctgaagcatctttacaagccacctacattccttatggagctgtggcacaacagcaagcccacgatgtctcaccggattaataaaaatataggcgctcacgcttttgtttaccgatatagtatctcctcctcccctcactccatcaacccccacgcgacacaactttccggaagtaagcaaaatccgttatcaaggtgaaactccggggaccaggctccacagctgccataaactggatggcacgttagaagccggtgggtgtaggtgaggcacgctggcgcccgcgggcccttctccagccgctacccagtgggaatccgcggggctgaagccccgaaaccaggctgagcgtcccagagcgcaacctccctttcccccagcagcgccggcgccgcagaagccgcgtgtccccaggcgcactcccccaaggtgaacccccgccccccacggaggcggctgggtcgcgggtctgggcggggcgctccggacgccctcccgccgctgcgcacccctcccgcgagctgccagctccctcggcctctccacccaaaactggcccaaccgccaatcgtctgcctctcacctcctacagcaggtgacccatggccaatcgccaggggtctctttgccaggagccgccagggccagccaatcggggcgacccctccgccggggaggggacgggaaaggggtggggggtgaagggggtgaagggggtgtcccgggggacgggctgaacctcagtcaggaccgcctgcaccgcagtccggggatcgggtcgaggggagaagaaaaaggggtgctcgggagcagcccccggctacctcccctggaggcacagagggcgggggccttggcgaatggctttcttgctggccacttgcggagtgagtagaccccgagggtctgggagaggggccggcccctacccctgagtccccggggtcccggccgccaggccggagcgcgaatgtcgtgctcaccctgcctccttcccgccgccccctgggggtttggattcaggatttgttcctagtgtccaagattttgataagaaacttacagaagctgatgcttacctacaaatcttgattgaacaattaaagctttttgatgacaagcttcaaaactgcaaagaagatgaacagagaaagaaaattgaaactctcaaagagacaacaaatagcatggtagaatcaattaaacactgcattgtgttgctgcagattgccaaaagtactattaatcccgtagatgcaatatatcaacctagtcctttggaacctgtgatcagcacaatgccttcccagactgtgttacctccagaacctgttcagttgtgtaagtcagagcagcgtccatcttccctaccagttggacctgtgttggctaccttgggacatcatcagactcctacaccaaatagtacaggcagtggccattcaccaccgagtagcagtctcacttctccaagccacgtgaacttgtctccaaatacagtcccagagttctcttactccagcagtgaagatgaattttatgatgctgatgaattccatcaaagtggctcatccccaaagcgcttaatagattcttctggatctgcctcagtcctgacacacagcagctcgggaaatagtctaaaacgcccagataccacagaatcacttaattcttccttgtccaatggaacaagtgatgctgacctgtttgattcacatgatgacagagatgatgatgcggaggcagggtctgtggaggagcacaagagcgttatcatgcatctcttgtcgcaggttagacttggaatggatcttactaaggtagttcttccaacgtttattcttgaaagaagatctcttttagaaatgtatgcagacttttttgcacatccggacctgtttgtgagcattagtgaccagaaggatcccaaggatcgaatggttcaggttgtgaaatggtacctctcagcctttcatgcgggaaggaaaggatcagttgccaaaaagccatacaatcccattttgggcgagatttttcagtgtcattggacattaccaaatgatactgaagagaacacagaactagtttcagaaggaccagttccctgggtttccaaaaacagtgtaacatttgtggctgagcaggtttcccatcatccacccatttcagccttttatgctgagtgttttaacaagaagatacaattcaatgctcatatctggaccaaatcaaaattccttgggatgtcaattggggtgcacaacatagggcagggctgtgtctcatgtctagactatgatgaacattacattctcacattccccaatggctatggaaggtctatcctcacagtgccctgggtggaattaggaggagaatgcaatattaattgttccaaaacaggctatagtgcaaatatcatcttccacactaaacccttctatgggggcaagaagcacagaattactgccgagattttttctccaaatgacaagaagtctttttgctcaattgaaggggaatggaatggtgtgatgtatgcaaaatatgcaacaggggaaaatacagtctttgtagataccaagaagttgcctataatcaagaagaaagtgaggaagttggaagatcagaacgagtatgaatcccgcagcctttggaaggatgtcactttcaacttaaaaatcagagacattgatgcagcaactgaagcaaagcacaggcttgaagaaagacaaagagcagaagcccgagaaaggaaggagaaggaaattcagtgggagacaaggttatttcatgaagatggagaatgctgggtttatgatgaaccattactgaaacgtcttggtgctgccaagcattaggttggaagatgcaaagtttatacctgatgatcagggcagtaggcataattcagcaacaaacaatcttcctttgggagaaacctgttcattccaatcttctaattacagtggttcctatctcagggatactggactttctgacgcagatgaacaattaaggggaaaagcttcccttttccctctgtggcagttacgattttgacttcagtcctgagaaaaacttcaggttttgaaaatcagatgatgtcttctccttttccaaacaccacacgttgaaagcatttataaatccaagtctgaaactctgcgctctagtactgctgttaagatacacaacttgtttcttagttcatataatctcgggatacacacacacacacacatatatatacacacacatacgtatacacacacatacatatatataaatatacctgatgccagatttttttcataaatattctgcctactgtaaatatgggttcctctgagttgttttagaaaattagcgcaatgtattaaaatcaagtgttaggaaatttcatggtcttacctacaataacttttattttggaattgaactattattaaattgtatctaatcctggattacagtttaattaattattcttagtgcttaaggcttcataaagtaatttttccaacctttttttaaaaagagcatcttttattatcttttatggttaaacttggaagccaattatttggcaaccttgaatacaagagctagcttttcaaagaaagacacttgaaataatggaggatccattcttttcctctgtcagattgtatgttctgtctttagcccctgccaggcaattccccagaatcttcacttaactcatattgcacatgtagggctgcctaccaacattttatccaaaaatgttttattgccttagagggtttgggaagagtgtgtatttatagatccccaccccacagtgaacaaaaatagatagatagatagaataaaatgaatgccacagcagcagatggctcattctgaagggaaatacagaactatatctatctatctatctatcatcttttttatttaaaaatacattaaaaaaacaggtattagtacctagcatttagttagttattcaatatactggttacgtaaggcctttcaagaagtagattctcagtctgagaggacacaggccagggcttctcaaagtgctgctgcaggctttctggtctcgcttggcc

SEQ ID NO: 735117 - DNA, 19180 bp, Homo sapiens
  misc_feature (19180)..(19180): n is a, c, g, or t
gtaagggtctttacatggtttccagatagttcattagttgttgctttctttttttgtctgttttctgttttttttttttaaataactgtggtatgatgtaataggaacttataatttctgagttgcttatttttcctttacagttatagtaaagttatactcatttattttctcctgctttctgcagagtaaaatactgatttttgtctagaaacaagacagtgcaagacaatgttgaaagtgaaattctatgttaaaatatgccagatttattttaagaatttaatatctgtagtcagttatcaatacaaccaaattacataattatgcatgataataggtaaatactgagaagttcacctcattttcttgttaaaggatttggctattaccgtatgtgtcagttagtactcttttgtatggtagtgaaagaaaactcaacccaaactgattcatgaagaagaaagtaaatctggttagatgtggtttgaattaggtaattcatgtcatgaggactcagatctcccatctctatttctacgttccacttttgcattggcttcattttcggttaggttctcccttggtggtggtaaggtggttgtagcaatgtcagcctcccatttttggaaccgagtccataggaggctattctttctagaccttaataggagtaacacaattattgctcatcaccctagctttggccatgtgtcaaatcctgaccagtcacaatttcacagtcatagattctaccctggagctgggatgttactggcctcactagaaacacattgctgatagggtagaaggtgtgttcatcctacccaacccgacccgcaccaaagtcagaatagggaaaaacagatgttgggtgacatgcaactaacgtctgccgtactacactgaagatatttttctatgtttattctccagtgaaagagcttatatttgtggtacataggggattttgttttaatttagaaaatttaattgtagaaaacatgttttataaccctttctctgtactttgttctatatcaggaattgacttgattagataaggtgacatagggtatcttaggccctacaagatagtaaaccccccatcacttgaaagtattcagtagaggcttaaaaaacattattaaaggatgtggttattaggggactttaagaaatgaatatgaaattgaagtaggaaatctttaagctactctgtgagttatgccttttaaaagcaatttgtaattcctgtagatttcttttaaatttaggcagtttcataaatgactatagcatcattttagcaaatttgtgatcctgtaagaggaggataagtgttttttgtttgtttgtttgttttttgtttttttgagacagagtctcactttgtaccccagaaagtaaatctagttagatgtggtttgtctcggctcactgcaacctccaccccgtgcgttctagcaattctcctgcctcagccaccacacctggcctaagaggggaggataagtgttttagtgatcatattagactgaatgtggcagatgagatttcccgcccccccattgttggttagactgacattcaacattcaacaagagccacctgcccttgtaggcatttctgccactatacccctacataaacctagagtgctattgcttacttgctttccttcaaatacattttttcatttgtggcctccacattcttgtgtgtgatgtcctttctctgtgaaatgtcttctaccctttttttcaaagcctagtttagaactgacctcttctatgaaccctctgccgactggcctttccttccccagtcccccaagttcaaaatgatctctttcctttgaatactatagtatttgcacaattcactatctccttatcatattcttcttgtttatttgttatcagctgatgttgacatcataagttcaggttcctaactagatccaatattggaatttttcagcttttgctaagaagagagcttgtatgtctttgggaataatgggcagaaaaagataactttgagaagtcttagacttctaatagctttgatatttaaaagtacatgtaatacaagaggtttttttcctacatttaatgcatggagaagataggacatttagaaatatggaattaatgttcatttgactggcaaaagattattttctcagatgtagtgaagtgtggtaaagaacttcactctagagccagaatgtctgtgtttgtatcccagagcccaccacttacatttaaccattaacattcaacttactgtctctgagtttcagtggcctcatctataaaatgaggataataagagtacctacttcatagagttgttttagtggttaaataaactaacgtaaacttgctagaacttgataaactaatattggatgagaactggttgaaataatgcctggctatagtaaaaacttggtaaatgttagttgccattacaatgcaactactgttcctaccattccctctgccagtgcctggtattcagtagcactcagtaaatgttagttaaatgaagaaataactgaaggaatgaatgaacaaatggttgatgtagagattgcttttccattgttgtttattgaatattttgagatgtataacatactgtctgttaggcactgtgggatgggcactcacggagctgtcttccaaaggggtataggagaggagacgcagtgatctcagcaacctacctttaaaacatatcctagtatctactgccatgttaggttctcttcttttgctttttttaaaaaaaaattctcacaaaactccccccacccacttcagtttatagatgaggaagctcctactacataatagtgcttcccagtctaattcttgacctcattgtatttatatgtcctttttttttttgacagagtctcactcattgcagtggcacaatcacagctcactgcaacctctgcctcccctgctcaagtgatcctcccacctcaacctcctgagtagctgggactacaggcatgcaccaccacgcctggctaatttttgtatttttttgtagagatgcggttttgccatgttggccaggctggtctcgaactcctgggctcaagccatctgcccactttggcctctgagagtgctgagattataggcatgagccaccattcccagccatgttttcctttttcattgaactttatctactttagccattaaactccactccattggtcttgtcattactaagagctgaaccacctgcaaaatattaagttaaaaagcgttttctttgacaacagttttcttttcttcatcttcctctatcactttacttctgaacttttattctctcattttgatctgacccctacttctctgtttttcctggccatttagtactttcttgttttgctcatcccatttcccagtggagaccttctggtctgctgctttatcactggttttgttagaagacatacaaatggcaaggaggtatatgaaaaggtgcctaacatcattgatcatcagagaaatgcagaccaaaactacaatgagatatcatttcaccccagttaaaatggctttttttttttttttccaaaagacaggcaataacaaagtactggtgaggatgtggagtaaagggaacccacatacactattagtaggaatgtaaattagtacagccactgtggagaacagtttgaaggttcctcaaaaaactaaaaatagagctaccatataatccagcaatcccactgctaggtatatatccaaaagaaaggcaatcaatatacggaagagatacctgcacacccaggtttattgcagcactattcacaatagccaagatttggaagcaacccaggtgtccaacagatgaatggataaagaaaacatggtatataaacacaatggaatactattcagctgtgaaaaagaatgaaatcctgtcatttgcaatcctgtcttgaatagaactggaggtcatgatgttaagtgaaataagacaggcacaaacttcacatgttctcacttatttgtgggagctaaaaattaaaacaatcgaactcatggagctagagaatagaattatggttaccagaggctggaagggtggttgggcgtataagtgtagggggagtggggatggttaatgggtacaaaaaaatgagaacgaataagatctacttgataacacaacagggtgactatagtcaacagtaattatacatttaaaaataactagaagagtataattagattgtaacacaaaagataaatgcttgaggtgatggatacctatttaccctgatgtgattattacttatttcatgcctatatcaaaatatttatactccaaaaatatatatacctactatgtacccacaaaaatttaaaaatttatatattgtttttgctatcacctttagaatttcttgtcattggatagttcgtctgtataccattctggtcttcattccccagggcccccgttgtctgatttttctgcttctagaactgttagaggtcacaaaagcaagatggttgtatctatcacaatttttgtctgactttaactgggtatctgttacgatttagtagtcatcttactgacttcttgttggtttccaattgaatcctcacagtagactgttttcattgtaatcagtatcgaattatagcctgttcccttcttcataaatgaaggctttcttcttcaacagttcttagtgacttcacctgtactttatttctctgctttgaatatttcgaagaaaacatattcttgctctttcccaaggttaacactacatacattaccttgaccacaggatgttttcttgcagattgtgacctaattccatcacccttcagcagcccccaccgttttcatggattcagctaaaccttctgtaagatgactctttttccccctaatctttatatctcttttgatatgtagctttagtctcactttttttccttttggattttgccagttagatgtctccctggaattccacttcagcatggctaagactaagcttgtcttctctttcctccccaaagcaaattgtaattaggatagactgaaggtgacagaagataactaagatcttcttcatcctttcggctcttatggaagctgaattccagtagtcattctaaatttgttgtatgtcagcttatggtatcttttcatgtctttacattcagccaaagaggaagttccttgaaggggagaccagagggcgtgctgtgcttcttaatcctctctttcttaaccagtaagaggcattcagtagatatctgatgatactgattaatagaggggaacttttcagattcttttttttttttaaccctagtaagctttagtacaaactaaatgctgagagattatcaagtaagggattgatcatcacaagaagactcaggatgttacatcctgtaggttttatagtttcctatattgtaaaaaatatgagttatagcagcttgtctggatgtcatacaggtataaaaatcagttttataaacttgagtaaattggggcccattttagaaaaaactcttgcaggctgtgaatgccaatatataagtaaagtattaagtataatgttatttaatgtgggcaaacataaagccaggtgtaaattttttaggtttaaaatcttatagaactatacatccaaaagaaaatttcaagttaaacataatacaaagcaatacaatctaaattaacattaatttaatgtgatgaatgatattgccttgctaaaagtgggtcactacttacaatgtgcaaatggtactcatcgttagggtatagattcttttaaactatgacatacgtacactaccatgtggaacgtgatgatgtgttctctgttctaactactgggaagacttccttggcatagcacatgccatggggtcagttggctttgacttcatatagatatgccatttacttggtcagtgtcacttctatgacaagtagtatgttgtgccagtttgattataagtacaaatatgggcaatgaagtaacttggttttaaggttgttactaagctgagtaacagtgtgtggctatacaaatttttataggctatcaggaatgaaaacacaggagattgttgtagattcaagtattttagattcaagtttgaagatgctcatgcagatgtttaactgagttgtatagacctttatgtttctttctttttctctttttttttttttgagacagagtcttgctctgtcacccaagctggagtgcaatggtgtgatctcggcttactgcaacctccgcctcccaggttcaagcaattctcctgcctcagcctcccaagtagctgggattacagatgtgcaccacgacgcccagctgattttttgtattttagtagaggcggggtctcaccatgttgtcaagatggtctcaatctcctgaccttgtgatccacccacctctgcctcccaaagtgctgtgattacaggcgtgagccaccgcgcctgactgacctttatgtttcttaactttatgctatacatcagttgatatttcaaaaatttaaatggtttctatgattattctttgggctaagaaattgggcattaattgtcctcatatgtatggtttttgtggctacttcatgtagattttatttttggtggttatcaaattggaatttttttttttttttttttttttgagacggagtctcattctgtttcccaggttggagtacagtggtgcaatctcagctcactgcagcctcgacctcccaggctcaagcagtcctctcacctcagccttctaagtagctgggactacaggcacgcaccaccacacctggctagttttttgtgtttttagtagagatggggttttaccctgttggccaggctggtcttgaactcctggcctcaagtgatccacctgcctcagcctcccaaagtgctgggattagaggcatgagccaccacacctggctgaaattggaatttcattggtactgcctgtaattttatgttaatttttttttttttttgtcgtcactagcttttatctaaagcccctagagagaaaggccatgataccttgtatacaaggttataagagtatacaagggaaagggagggctgaagggaacagggtgggctggtacaagcctcattagaaataccattgagtctgtgagtaaaacatcattatatgaaaaggagatgtggttttagggtggtccaattacttttgcaccagcctaataaaattacaagtcattatcaatagagacattgtaaaacctttttttttcccaaaagaagtatcaggtatgataattacatgtctgcccaactttcgttatagattaacataacttaattgtatttaaggtacaatttaggagagttgctgaaaaatgaatctttagtattgggatgccttgattctaccctcaatagctataatggattatgtgtctgagtagattaataaaaatcttttgagcatttttcttgaactacttcactgaagattagctttttgagcatccattttaatttctcagtatataaggatcggtttatcacaactgtattgttttccctggccttgttagattatattttcatatcatgtagaaaaataggtgtattcgttctcccttgaagtcctttgtctcccaaaggaaatggttgcaatacagatgtgtcacctcttccacaggtaaagtggaatggagaagtagccagttaaatagtgcatgctcaatttggaacatttagagcatacaggaaagttatttatttggtaaatattttttaagcatttactatgtttcatgcattgtactagttgtagaggatataattgaatacaactacatgtagcccttgactttatggaactagtctagtataaagatttaagattgcctggcatggtggctcacgccactaatcccagcactttgagaggccaaggcaggattgcttgaggccagaagtttaagagtagcttggtcaacataatgagactccatctctaaaataaatagatagatagatagatagatagatagatagatagatagatagaagtagttagacaacacaaagcagtttcactcatcttgtggcaaggagttatgtatttctaatcaaatttggcaactcaagcattttcaacaaaatctacatgttttttcagaataaagtgaccaacacagaatgttacctgtaaaaatcagagcaataattgctatctaaaataattttgaaaattaagtggtactgaaaggctcatatagcaaaaatatggcctcctgtcattgtactttcctacttcccagactcaccattttcaacattttttagtagtttattttgccattttatagcatagtacctgacattttatttattcaacagacatttcttaagtacctaatacatgccattccttgtttgaagggatgctaaggatacagtggtgaacaaggcgttgtggggttgtatagagggtattcattcctaaccttgaaccaaatatttctttctgttggataatgcattaaaaattgcaaacagtttacaaacttttggagcaatggtggccttgatcataaagtagggactgcttctaccgtatacatgcttggtggtgtatttgtgatatctggctaaagtttctacatggaaattgactgactttagttttgagacttctgggaaccagtcaggcaaaatagtgaaactgtgtatcctgtttccaagagttgtcttttaaggttatctgcttcattcatttggcctgacttgctaggcaaatgcctagggtaaatatgatttgattaactataacaacaacagcaacaacaacaactttattttttagagcagtttgaggttcacagcaaaattgagcagaatgtacagagattttccctatacccgcttcccctacgcatgtgcggcctcccctactatcaacatcccccaccagagtggtttgttacaattaatgaacctacattgacacatcattatcactcaaggtccgtagtttacattagagtccactcttggtgttgtgtatgggtttggtcgattttataatgacatttatccaccattatagtgtcatacatagtaattttgctaccctaaaaatccagtgtgctccacctgttcctccttccctcctccctcatccctggcaaccactgaactttttaacatctccatagttttgccttttccagaatgtcatatcattggaatcacacagtatgcagccttttcaaatgggcttctttccgttagtaataggcatttaagtttcatcctcatcttttcatggcttgatagctcatttctttccctccctcttttcttccctgtcttccttccttcctcttctttcctgtttcctctttcttcttccttttttaagagacaaggtgtctcactctgttgcccaggctggagtgcagtggcccaatcatagctcattgcagccttgaattcctgggctcaagtgatcctcctgcgttagcctcctgagtagctgggatcacaggctccagtcattttagtgctgaataatatttcattatctggatgtaccgcctattcattcacctactgaagaatatcttggttgcttctaagttttggcaattatgagtgaagttactataaacattgtatacaagttttatgtggatgtatgttgtcatctcccttgggcagataccaaggagtgccattgttggatcatatggtaaatatatctttagttttgtacagaattctaggttggtatttttttctctctcagtcctttattttatttggagacagtctcgctatgtcgcccaggctgccatacagtggtgccatctgggctcactgaaacctccacctcccaggttcaagcgattcttgtgccttggcctcccaagtagctgggattacaggagtgcgccaccacgcctgctaatttttgtatttttagtagagacagggttttgccatgttgcccaggctggtctcaaactcctgaccttaagtgattcacccacctcaatctcccaaaatcctgggattacaggcctgagctactgtgcctgatctctctcagtactttaaagaaatatttcattccacttttcttttttttcttctttttgagatggagtctcactctgtcgcctgggctggagtgcagtggcgcgatctcagctcactgccacctccgcctcctgggttcaagtgattctcctgcctcagcctcctgaatagctgagattacaggcgcccaccaccatgcccagctaattttttgcatttttagtagagacgggggttccaccatgttggccaggctggtctcgaactcctgacctcgtgattcgcacatctcggcctcccaaattgctgggattacaggtgtgagctaccacgcctggcccactcttcttgcttacatagtttctgaggagatgtcagatgtaatttttatttttgctcttctgtaggcaagttgagttttttccccctctagcttctctcaggatttttttctttatctttgattttcagtagtttgaaaattatatgcctagctgtcagggttttttgcttgtttgtttttgttttctcaggtgtgactccagaaaggttctaaagaggagctttacaatctcttctctggggtttatggagacttcctttacccttctgtgttagccccttaaagcactgcgtcaaccttaaaagggcacaggaaagggtgtctatgccatttttatgccatttatcctgcttggtgttttctgagctttcttcatctgcggtttaatgtctcacattaatttgtagaaattctctgtcattgtttcaaatttttcttcagttcttttctctgtttcttcttctggtgttcccattatgcttttgtggttgtcgtacagttattggatattttgttccaggcttttttttttccagtctttttttccttttgcttctcggttttgtaggtgtctgttgagatactctcaagtgcagatattctttcctcagctttgtctagtttactaataagcccattaaaggcagtcttcatttctgttacagtctttttgatcagtagcatttcttttttattctttcttaaaatttctgtctttctgcttacattgcccatctgttcttgcatggtttctactttgtccattagagttcttaggatatttatcataattatttcaaatttctggtgtaacaattccaacatccctgcaacatccaagtctagtttcgatgcttactgtgtctcttccagctgtgttttttcctatttaatatgtcttataattttttcttgatagccatacatgatgcattaggtaacagaaactgctgtgagtggacctttagtaatgtggtggtaaggtgtgcatggaggggaaacattttcagtctgttagtgaacttttgtcaacttcacatgtgcttctcaagtccatcctgtaagtgggagagtagggctagagaggactgaagttgggtatatattaaatactttctcctacaaagaagcctagaggggacgcattaggggattttttttcccccagtattcactgtgatgacccttattgagctcctggaggtaaaactcacaaaactgtggttctcccccctgcccatattactacatgtccctggagtttatatctttcagacttgtctgcactgagcttccaccaatttgtcaaatacagatcaggtttccctaccacccgtgcagttgaaaacccacatacaacttttgactcctccagagcttaactactcatagcctgctattgactggaagccttgccaataacataaacagttgattaatacatattttatatgttttctgtattatatattgtattcttacaataaagagaaaagaagatgttattaagaaaatcataaggaagataaaatatatttactgttcattaagtggttcccatgggtgctggttcccatggaggttgccccttgtgagtttttgctcagggaagttgtgattctctatatttgcctgttggtctcctaatttgggagtcatcagttttccctgtgacctcacttctcttacagagttaagaacagttgttggtttttcagtttgttcagtgttttacatgttgttagaacacagtggtacttctaagtttcttaacatgctagatcagaaacctgaagtctcacctaatttggctttttatattttttcttcttttttttcttccattgctaccaaagcatttttcatctgtgtctggggtgacattagagcagaatgtgatttctaggtaaacattattgggctccctagcagaaaaatttttgaaagtagtacatgaattctgtataattaaaattttcttttcatcttaataggtataggtaataggcacggcctattttttttttgctcaacagtctaaaatagtaatttaatcacctaatagccttagttatatagttgaaagaagagttggaaatctgattcatgggttggaaatcacctgtcacatatgagttttaggcactggtcactttattttgaaacagctttggggttttttcctttttcaactcataataggctttaacagcttttagttttgtttctgtttttttaacagcatgagttgccaaatttggttatagcttcttggtacaagatgggtaaatttgctttgtgttgtgtaattactttttattttaaatgctacctcttttatgaacactaactttacactaagattaggaaaatgagaattgcatgtctgcaacaaatagctatctgtagtattaaattgtgaaaatgtagactttggattggagctggcatctcttaatatgtaattgtaacatagagtaaataagtattttgtcccttgtagggtcaaacagtacagtgcatgggcagaattagagatgtaggcttttttttttttttttttttttactggcttagagaaccgtttgatcagctaatatggaattaagtccctagggctgcccaggcacaacattaactgctattaaaggaaaatttaaaagagtattagtgaaggttaaatactgaccatggacatctggcaaaattgatgttttttttcccctccaccattgtttatagtttattgttatttatcagagaattaatgtttattttcagaatctattaccataagaaatctgtttgaggacttcgtatgtgccaggaattctactaaataatgatataatgctgaacagaattagataggatcctcacttcgttaagcttacagtctagtggtatagatcaacattaatcaaagaataacacaaatagaaagcagagcagtggttcatgggattgactgtagagaagcatgagggaagttcccaggtgatggaaaatactttatttcttaatcgtggtggttacatgtgtgcatatgtttatgaaaatatattgtacatttaaagtggatacattttatcacatgtaaattatgactctataaagttaattaaaaagaataactcaggtaaggtggtgtgtgcgcctgtagtcccagctatttctgaggcaggaagatcacttgagcccaggagtttgagttcagcatgggcaacatgagacctgtgagactttgtctctaaaaaaatttaaataaataactaagataaatgtaaaattacagctgtagtaagttctacaaaggagagttacatgggctatgacgatgtaagatagcaagaactgacattggcagggaggaaatgatgatgagtagaagtaaataagtgaagtgtggggattgatgtcaaggggacagtataaaagaaataacagcatgcgccaaggccctaaaattggaaagtccttggcaaattaaaggagtttgaaaaaggccattgtgtgcaaagcagaaaataggtactacaaggtaaaagatggagctaagcggtaggtaaggctaaaccttgtcagccattgttaaatattgaattgtatcctaagcacaactcagtggaaagcagttaaagttctttaattgggggaggcaatgaaggggtaataaaattggttatagaaatactgctctggctctagtgttgagaatgaattggagtagccagagtagattcaagaagactttagtaagattattccaacaggccaggacctgttatagggtggtggcaatggagagagatggacagaatggagagtgtatttaggaggtaaaaatgacagaacttggtgatgcactgaatgtgaaatggggaaggtgtctaggaggactactaggtttatggtttgcgtattagggtggatgatagcagtttcatttactgagacagggagccctggcagagtacccagcttttagagtgggtagggggaaggggagagtgcatctggtgttgggcattttgaagtgatttacatacaacaaactgaaggtatctttaacactgagtccagcaggttagcatatttattcagcaagcattgcacctttttttgttgtttttggggtcttcaactcctggcctcgaatcctccctccttcccccgcctctcccagcctccgcctcccaaagtgctgggatttcaggagtgagccaccgcgcctggccagcatcgcgctgtttgtgcagtgtgccctgtgctaggtcttgcagtgggtaccagtagagacataaaagtacaaaagataattggacgtttagtagagtcctgaaagggggcgggataggaagatacctaaccataagaaaaaccagcaagagcggaaaaggagctagtcctccagatcaataagttaatcacttatgtttgtgattccctgcattttgggtgattctctgtcgaggtcctcttaagtccagacttttgatataatctgcagtttgcgccatttggattcctgaagcatctttacaagccacctacattccttatggagctgtggcacaacagcaagcccacgatgtctcaccggattaataaaaatataggcgctcacgcttttgtttaccgatatagtatctcctcctcccctcactccatcaacccccacgcgacacaactttccggaagtaagcaaaatccgttatcaaggtgaaactccggggaccaggctccacagctgccataaactggatggcacgttagaagccggtgggtgtaggtgaggcacgctggcgcccgcgggcccttctccagccgctacccagtgggaatccgcggggctgaagccccgaaaccaggctgagcgtcccagagcgcaacctccctttcccccagcagcgccggcgccgcagaagccgcgtgtccccaggcgcactcccccaaggtgaacccccgccccccacggaggcggctgggtcgcgggtctgggcggggcgctccggacgccctcccgccgctgcgcacccctcccgcgagctgccagctccctcggcctctccacccaaaactggcccaaccgccaatcgtctgcctctcacctcctacagcaggtgacccatggccaatcgccaggggtctctttgccaggagccgccagggccagccaatcggggcgacccctccgccggggaggggacgggaaaggggtggggggtgaagggggtgaagggggtgtcccgggggacgggctgaacctcagtcaggaccgcctgcaccgcagtccggggatcgggtcgaggggagaagaaaaaggggtgctcgggagcagcccccggctacctcccctggaggcacagagggcgggggccttggcgaatggctttcttgctggccacttgcggagtgagtagaccccgagggtctgggagaggggccggcccctacccctgagtccccggggtcccggccgccaggccggagcgcgaatgtcgtgctcaccctgcctccttcccgccgccccctgggggtttggattcaggatttgttcctagtgtccaagattttgataagaaacttacagaagctgatgcttacctacaaatcttgattgaacaattaaagctttttgatgacaagcttcaaaactgcaaagaagatgaacagagaaagaaaattgaaactctcaaagagacaacaaatagcatggtagaatcaattaaacactgcattgtgttgctgcagattgccaaaagtactattaatcccgtagatgcaatatatcaacctagtcctttggaacctgtgatcagcacaatgccttcccagactgtgttacctccagaacctgttcagttgtgtaagtcagagcagcgtccatcttccctaccagttggacctgtgttggctaccttgggacatcatcagactcctacaccaaatagtacaggcagtggccattcaccaccgagtagcagtctcacttctccaagccacgtgaacttgtctccaaatacagtcccagagttctcttactccagcagtgaagatgaattttatgatgctgatgaattccatcaaagtggctcatccccaaagcgcttaatagattcttctggatctgcctcagtcctgacacacagcagctcgggaaatagtctaaaacgcccagataccacagaatcacttaattcttccttgtccaatggaacaagtgatgctgacctgtttgattcacatgatgacagagatgatgatgcggaggcagggtctgtggaggagcacaagagcgttatcatgcatctcttgtcgcaggttagacttggaatggatcttactaaggtagttcttccaacgtttattcttgaaagaagatctcttttagaaatgtatgcagacttttttgcacatccggacctgtttgtgagcattagtgaccagaaggatcccaaggatcgaatggttcaggttgtgaaatggtacctctcagcctttcatgcgggaaggaaaggatcagttgccaaaaagccatacaatcccattttgggcgagatttttcagtgtcattggacattaccaaatgatactgaagagaacacagaactagtttcagaaggaccagttccctgggtttccaaaaacagtgtaacatttgtggctgagcaggtttcccatcatccacccatttcagccttttatgctgagtgttttaacaagaagatacaattcaatgctcatatctggaccaaatcaaaattccttgggatgtcaattggggtgcacaacatagggcagggctgtgtctcatgtctagactatgatgaacattacattctcacattccccaatggctatggaaggtctatcctcacagtgccctgggtggaattaggaggagaatgcaatattaattgttccaaaacaggctatagtgcaaatatcatcttccacactaaacccttctatgggggcaagaagcacagaattactgccgagattttttctccaaatgacaagaagtctttttgctcaattgaaggggaatggaatggtgtgatgtatgcaaaatatgcaacaggggaaaatacagtctttgtagataccaagaagttgcctataatcaagaagaaagtgaggaagttggaagatcagaacgagtatgaatcccgcagcctttggaaggatgtcactttcaacttaaaaatcagagacattgatgcagcaactgaagcaaagcacaggcttgaagaaagacaaagagcagaagcccgagaaaggaaggagaaggaaattcagtgggagacaaggttatttcatgaagatggagaatgctgggtttatgatgaaccattactgaaacgtcttggtgctgccaagcattaggttggaagatgcaaagtttatacctgatgatcagggcagtaggcataattcagcaacaaacaatcttcctttgggagaaacctgttcattccaatcttctaattacagtggttcctatctcagggatactggactttctgacgcagatgaacaattaaggggaaaagcttcccttttccctctgtggcagttacgattttgacttcagtcctgagaaaaacttcaggttttgaaaatcagatgatgtcttctccttttccaaacaccacacgttgaaagcatttataaatccaagtctgaaactctgcgctctagtactgctgttaagatacacaacttgtttcttagttcatataatctcgggatacacacacacacacacatatatatacacacacatacgtatacacacacatacatatatataaatatacctgatgccagatttttttcataaatattctgcctactgtaaatatgggttcctctgagttgttttagaaaattagcgcaatgtattaaaatcaagtgttaggaaatttcatggtcttacctacaataacttttattttggaattgaactattattaaattgtatctaatcctggaaaaaaaaaaaaaaaaaaaaaaaaaaaaaaaacaaaaaaaagaacaaaataaaaaaaaagaaaacaacaaaaaaaaaaacaacaaaaaacaaaagagagggaggaggcgcaacaagcacaacgaagcactaccccgggagggggcacgccgcacacagaacgccggagcggcacgcccggaccccactatctagaaacgacaaagcgtgtgcccacacaaaacaaaagtaaaaagagcgcagacttatcaatcagacacacgccaagcgacgagacgcggccgcagatcctcaacaaacacagcacactgaatagcaaggtggagagaaacacaacctggtggctgacgcagcgacacacatcctgcgaaggaaaagacgagacactcacactaccatgggagagtggaggagcaaaacaacacacaggcgagaagaacaacaaaaacccagccacaccagcaaacataaacacgccaccatgacaacggcgacaacacaacaacgaccacgtctcaagcccgagtcactaactgagcacagacaacaccgcacacacaactacaatcagccgcggaacaaaggacaactaactacgaacgacaaccgactgatcagagcagagacaaacactcaactccaaccgagggagcgatcaaagaacaaataaggan

SEQ ID NO: 735118 - DNA, 18669 bp, Homo sapiens
gtaagggtctttacatggtttccagatagttcattagttgttgctttctttttttgtctgttttctgttttttttttttaaataactgtggtatgatgtaataggaacttataatttctgagttgcttatttttcctttacagttatagtaaagttatactcatttattttctcctgctttctgcagagtaaaatactgatttttgtctagaaacaagacagtgcaagacaatgttgaaagtgaaattctatgttaaaatatgccagatttattttaagaatttaatatctgtagtcagttatcaatacaaccaaattacataattatgcatgataataggtaaatactgagaagttcacctcattttcttgttaaaggatttggctattaccgtatgtgtcagttagtactcttttgtatggtagtgaaagaaaactcaacccaaactgattcatgaagaagaaagtaaatctggttagatgtggtttgaattaggtaattcatgtcatgaggactcagatctcccatctctatttctacgttccacttttgcattggcttcattttcggttaggttctcccttggtggtggtaaggtggttgtagcaatgtcagcctcccatttttggaaccgagtccataggaggctattctttctagaccttaataggagtaacacaattattgctcatcaccctagctttggccatgtgtcaaatcctgaccagtcacaatttcacagtcatagattctaccctggagctgggatgttactggcctcactagaaacacattgctgatagggtagaaggtgtgttcatcctacccaacccgacccgcaccaaagtcagaatagggaaaaacagatgttgggtgacatgcaactaacgtctgccgtactacactgaagatatttttctatgtttattctccagtgaaagagcttatatttgtggtacataggggattttgttttaatttagaaaatttaattgtagaaaacatgttttataaccctttctctgtactttgttctatatcaggaattgacttgattagataaggtgacatagggtatcttaggccctacaagatagtaaaccccccatcacttgaaagtattcagtagaggcttaaaaaacattattaaaggatgtggttattaggggactttaagaaatgaatatgaaattgaagtaggaaatctttaagctactctgtgagttatgccttttaaaagcaatttgtaattcctgtagatttcttttaaatttaggcagtttcataaatgactatagcatcattttagcaaatttgtgatcctgtaagaggaggataagtgttttttgtttgtttgtttgttttttgtttttttgagacagagtctcactttgtaccccagaaagtaaatctagttagatgtggtttgtctcggctcactgcaacctccaccccgtgcgttctagcaattctcctgcctcagccaccacacctggcctaagaggggaggataagtgttttagtgatcatattagactgaatgtggcagatgagatttcccgcccccccattgttggttagactgacattcaacattcaacaagagccacctgcccttgtaggcatttctgccactatacccctacataaacctagagtgctattgcttacttgctttccttcaaatacattttttcatttgtggcctccacattcttgtgtgtgatgtcctttctctgtgaaatgtcttctaccctttttttcaaagcctagtttagaactgacctcttctatgaaccctctgccgactggcctttccttccccagtcccccaagttcaaaatgatctctttcctttgaatactatagtatttgcacaattcactatctccttatcatattcttcttgtttatttgttatcagctgatgttgacatcataagttcaggttcctaactagatccaatattggaatttttcagcttttgctaagaagagagcttgtatgtctttgggaataatgggcagaaaaagataactttgagaagtcttagacttctaatagctttgatatttaaaagtacatgtaatacaagaggtttttttcctacatttaatgcatggagaagataggacatttagaaatatggaattaatgttcatttgactggcaaaagattattttctcagatgtagtgaagtgtggtaaagaacttcactctagagccagaatgtctgtgtttgtatcccagagcccaccacttacatttaaccattaacattcaacttactgtctctgagtttcagtggcctcatctataaaatgaggataataagagtacctacttcatagagttgttttagtggttaaataaactaacgtaaacttgctagaacttgataaactaatattggatgagaactggttgaaataatgcctggctatagtaaaaacttggtaaatgttagttgccattacaatgcaactactgttcctaccattccctctgccagtgcctggtattcagtagcactcagtaaatgttagttaaatgaagaaataactgaaggaatgaatgaacaaatggttgatgtagagattgcttttccattgttgtttattgaatattttgagatgtataacatactgtctgttaggcactgtgggatgggcactcacggagctgtcttccaaaggggtataggagaggagacgcagtgatctcagcaacctacctttaaaacatatcctagtatctactgccatgttaggttctcttcttttgctttttttaaaaaaaaattctcacaaaactccccccacccacttcagtttatagatgaggaagctcctactacataatagtgcttcccagtctaattcttgacctcattgtatttatatgtcctttttttttttgacagagtctcactcattgcagtggcacaatcacagctcactgcaacctctgcctcccctgctcaagtgatcctcccacctcaacctcctgagtagctgggactacaggcatgcaccaccacgcctggctaatttttgtatttttttgtagagatgcggttttgccatgttggccaggctggtctcgaactcctgggctcaagccatctgcccactttggcctctgagagtgctgagattataggcatgagccaccattcccagccatgttttcctttttcattgaactttatctactttagccattaaactccactccattggtcttgtcattactaagagctgaaccacctgcaaaatattaagttaaaaagcgttttctttgacaacagttttcttttcttcatcttcctctatcactttacttctgaacttttattctctcattttgatctgacccctacttctctgtttttcctggccatttagtactttcttgttttgctcatcccatttcccagtggagaccttctggtctgctgctttatcactggttttgttagaagacatacaaatggcaaggaggtatatgaaaaggtgcctaacatcattgatcatcagagaaatgcagaccaaaactacaatgagatatcatttcaccccagttaaaatggctttttttttttttttccaaaagacaggcaataacaaagtactggtgaggatgtggagtaaagggaacccacatacactattagtaggaatgtaaattagtacagccactgtggagaacagtttgaaggttcctcaaaaaactaaaaatagagctaccatataatccagcaatcccactgctaggtatatatccaaaagaaaggcaatcaatatacggaagagatacctgcacacccaggtttattgcagcactattcacaatagccaagatttggaagcaacccaggtgtccaacagatgaatggataaagaaaacatggtatataaacacaatggaatactattcagctgtgaaaaagaatgaaatcctgtcatttgcaatcctgtcttgaatagaactggaggtcatgatgttaagtgaaataagacaggcacaaacttcacatgttctcacttatttgtgggagctaaaaattaaaacaatcgaactcatggagctagagaatagaattatggttaccagaggctggaagggtggttgggcgtataagtgtagggggagtggggatggttaatgggtacaaaaaaatgagaacgaataagatctacttgataacacaacagggtgactatagtcaacagtaattatacatttaaaaataactagaagagtataattagattgtaacacaaaagataaatgcttgaggtgatggatacctatttaccctgatgtgattattacttatttcatgcctatatcaaaatatttatactccaaaaatatatatacctactatgtacccacaaaaatttaaaaatttatatattgtttttgctatcacctttagaatttcttgtcattggatagttcgtctgtataccattctggtcttcattccccagggcccccgttgtctgatttttctgcttctagaactgttagaggtcacaaaagcaagatggttgtatctatcacaatttttgtctgactttaactgggtatctgttacgatttagtagtcatcttactgacttcttgttggtttccaattgaatcctcacagtagactgttttcattgtaatcagtatcgaattatagcctgttcccttcttcataaatgaaggctttcttcttcaacagttcttagtgacttcacctgtactttatttctctgctttgaatatttcgaagaaaacatattcttgctctttcccaaggttaacactacatacattaccttgaccacaggatgttttcttgcagattgtgacctaattccatcacccttcagcagcccccaccgttttcatggattcagctaaaccttctgtaagatgactctttttccccctaatctttatatctcttttgatatgtagctttagtctcactttttttccttttggattttgccagttagatgtctccctggaattccacttcagcatggctaagactaagcttgtcttctctttcctccccaaagcaaattgtaattaggatagactgaaggtgacagaagataactaagatcttcttcatcctttcggctcttatggaagctgaattccagtagtcattctaaatttgttgtatgtcagcttatggtatcttttcatgtctttacattcagccaaagaggaagttccttgaaggggagaccagagggcgtgctgtgcttcttaatcctctctttcttaaccagtaagaggcattcagtagatatctgatgatactgattaatagaggggaacttttcagattcttttttttttttaaccctagtaagctttagtacaaactaaatgctgagagattatcaagtaagggattgatcatcacaagaagactcaggatgttacatcctgtaggttttatagtttcctatattgtaaaaaatatgagttatagcagcttgtctggatgtcatacaggtataaaaatcagttttataaacttgagtaaattggggcccattttagaaaaaactcttgcaggctgtgaatgccaatatataagtaaagtattaagtataatgttatttaatgtgggcaaacataaagccaggtgtaaattttttaggtttaaaatcttatagaactatacatccaaaagaaaatttcaagttaaacataatacaaagcaatacaatctaaattaacattaatttaatgtgatgaatgatattgccttgctaaaagtgggtcactacttacaatgtgcaaatggtactcatcgttagggtatagattcttttaaactatgacatacgtacactaccatgtggaacgtgatgatgtgttctctgttctaactactgggaagacttccttggcatagcacatgccatggggtcagttggctttgacttcatatagatatgccatttacttggtcagtgtcacttctatgacaagtagtatgttgtgccagtttgattataagtacaaatatgggcaatgaagtaacttggttttaaggttgttactaagctgagtaacagtgtgtggctatacaaatttttataggctatcaggaatgaaaacacaggagattgttgtagattcaagtattttagattcaagtttgaagatgctcatgcagatgtttaactgagttgtatagacctttatgtttctttctttttctctttttttttttttgagacagagtcttgctctgtcacccaagctggagtgcaatggtgtgatctcggcttactgcaacctccgcctcccaggttcaagcaattctcctgcctcagcctcccaagtagctgggattacagatgtgcaccacgacgcccagctgattttttgtattttagtagaggcggggtctcaccatgttgtcaagatggtctcaatctcctgaccttgtgatccacccacctctgcctcccaaagtgctgtgattacaggcgtgagccaccgcgcctgactgacctttatgtttcttaactttatgctatacatcagttgatatttcaaaaatttaaatggtttctatgattattctttgggctaagaaattgggcattaattgtcctcatatgtatggtttttgtggctacttcatgtagattttatttttggtggttatcaaattggaatttttttttttttttttttttttgagacggagtctcattctgtttcccaggttggagtacagtggtgcaatctcagctcactgcagcctcgacctcccaggctcaagcagtcctctcacctcagccttctaagtagctgggactacaggcacgcaccaccacacctggctagttttttgtgtttttagtagagatggggttttaccctgttggccaggctggtcttgaactcctggcctcaagtgatccacctgcctcagcctcccaaagtgctgggattagaggcatgagccaccacacctggctgaaattggaatttcattggtactgcctgtaattttatgttaatttttttttttttttgtcgtcactagcttttatctaaagcccctagagagaaaggccatgataccttgtatacaaggttataagagtatacaagggaaagggagggctgaagggaacagggtgggctggtacaagcctcattagaaataccattgagtctgtgagtaaaacatcattatatgaaaaggagatgtggttttagggtggtccaattacttttgcaccagcctaataaaattacaagtcattatcaatagagacattgtaaaacctttttttttcccaaaagaagtatcaggtatgataattacatgtctgcccaactttcgttatagattaacataacttaattgtatttaaggtacaatttaggagagttgctgaaaaatgaatctttagtattgggatgccttgattctaccctcaatagctataatggattatgtgtctgagtagattaataaaaatcttttgagcatttttcttgaactacttcactgaagattagctttttgagcatccattttaatttctcagtatataaggatcggtttatcacaactgtattgttttccctggccttgttagattatattttcatatcatgtagaaaaataggtgtattcgttctcccttgaagtcctttgtctcccaaaggaaatggttgcaatacagatgtgtcacctcttccacaggtaaagtggaatggagaagtagccagttaaatagtgcatgctcaatttggaacatttagagcatacaggaaagttatttatttggtaaatattttttaagcatttactatgtttcatgcattgtactagttgtagaggatataattgaatacaactacatgtagcccttgactttatggaactagtctagtataaagatttaagattgcctggcatggtggctcacgccactaatcccagcactttgagaggccaaggcaggattgcttgaggccagaagtttaagagtagcttggtcaacataatgagactccatctctaaaataaatagatagatagatagatagatagatagatagatagatagatagaagtagttagacaacacaaagcagtttcactcatcttgtggcaaggagttatgtatttctaatcaaatttggcaactcaagcattttcaacaaaatctacatgttttttcagaataaagtgaccaacacagaatgttacctgtaaaaatcagagcaataattgctatctaaaataattttgaaaattaagtggtactgaaaggctcatatagcaaaaatatggcctcctgtcattgtactttcctacttcccagactcaccattttcaacattttttagtagtttattttgccattttatagcatagtacctgacattttatttattcaacagacatttcttaagtacctaatacatgccattccttgtttgaagggatgctaaggatacagtggtgaacaaggcgttgtggggttgtatagagggtattcattcctaaccttgaaccaaatatttctttctgttggataatgcattaaaaattgcaaacagtttacaaacttttggagcaatggtggccttgatcataaagtagggactgcttctaccgtatacatgcttggtggtgtatttgtgatatctggctaaagtttctacatggaaattgactgactttagttttgagacttctgggaaccagtcaggcaaaatagtgaaactgtgtatcctgtttccaagagttgtcttttaaggttatctgcttcattcatttggcctgacttgctaggcaaatgcctagggtaaatatgatttgattaactataacaacaacagcaacaacaacaactttattttttagagcagtttgaggttcacagcaaaattgagcagaatgtacagagattttccctatacccgcttcccctacgcatgtgcggcctcccctactatcaacatcccccaccagagtggtttgttacaattaatgaacctacattgacacatcattatcactcaaggtccgtagtttacattagagtccactcttggtgttgtgtatgggtttggtcgattttataatgacatttatccaccattatagtgtcatacatagtaattttgctaccctaaaaatccagtgtgctccacctgttcctccttccctcctccctcatccctggcaaccactgaactttttaacatctccatagttttgccttttccagaatgtcatatcattggaatcacacagtatgcagccttttcaaatgggcttctttccgttagtaataggcatttaagtttcatcctcatcttttcatggcttgatagctcatttctttccctccctcttttcttccctgtcttccttccttcctcttctttcctgtttcctctttcttcttccttttttaagagacaaggtgtctcactctgttgcccaggctggagtgcagtggcccaatcatagctcattgcagccttgaattcctgggctcaagtgatcctcctgcgttagcctcctgagtagctgggatcacaggctccagtcattttagtgctgaataatatttcattatctggatgtaccgcctattcattcacctactgaagaatatcttggttgcttctaagttttggcaattatgagtgaagttactataaacattgtatacaagttttatgtggatgtatgttgtcatctcccttgggcagataccaaggagtgccattgttggatcatatggtaaatatatctttagttttgtacagaattctaggttggtatttttttctctctcagtcctttattttatttggagacagtctcgctatgtcgcccaggctgccatacagtggtgccatctgggctcactgaaacctccacctcccaggttcaagcgattcttgtgccttggcctcccaagtagctgggattacaggagtgcgccaccacgcctgctaatttttgtatttttagtagagacagggttttgccatgttgcccaggctggtctcaaactcctgaccttaagtgattcacccacctcaatctcccaaaatcctgggattacaggcctgagctactgtgcctgatctctctcagtactttaaagaaatatttcattccacttttcttttttttcttctttttgagatggagtctcactctgtcgcctgggctggagtgcagtggcgcgatctcagctcactgccacctccgcctcctgggttcaagtgattctcctgcctcagcctcctgaatagctgagattacaggcgcccaccaccatgcccagctaattttttgcatttttagtagagacgggggttccaccatgttggccaggctggtctcgaactcctgacctcgtgattcgcacatctcggcctcccaaattgctgggattacaggtgtgagctaccacgcctggcccactcttcttgcttacatagtttctgaggagatgtcagatgtaatttttatttttgctcttctgtaggcaagttgagttttttccccctctagcttctctcaggatttttttctttatctttgattttcagtagtttgaaaattatatgcctagctgtcagggttttttgcttgtttgtttttgttttctcaggtgtgactccagaaaggttctaaagaggagctttacaatctcttctctggggtttatggagacttcctttacccttctgtgttagccccttaaagcactgcgtcaaccttaaaagggcacaggaaagggtgtctatgccatttttatgccatttatcctgcttggtgttttctgagctttcttcatctgcggtttaatgtctcacattaatttgtagaaattctctgtcattgtttcaaatttttcttcagttcttttctctgtttcttcttctggtgttcccattatgcttttgtggttgtcgtacagttattggatattttgttccaggcttttttttttccagtctttttttccttttgcttctcggttttgtaggtgtctgttgagatactctcaagtgcagatattctttcctcagctttgtctagtttactaataagcccattaaaggcagtcttcatttctgttacagtctttttgatcagtagcatttcttttttattctttcttaaaatttctgtctttctgcttacattgcccatctgttcttgcatggtttctactttgtccattagagttcttaggatatttatcataattatttcaaatttctggtgtaacaattccaacatccctgcaacatccaagtctagtttcgatgcttactgtgtctcttccagctgtgttttttcctatttaatatgtcttataattttttcttgatagccatacatgatgcattaggtaacagaaactgctgtgagtggacctttagtaatgtggtggtaaggtgtgcatggaggggaaacattttcagtctgttagtgaacttttgtcaacttcacatgtgcttctcaagtccatcctgtaagtgggagagtagggctagagaggactgaagttgggtatatattaaatactttctcctacaaagaagcctagaggggacgcattaggggattttttttcccccagtattcactgtgatgacccttattgagctcctggaggtaaaactcacaaaactgtggttctcccccctgcccatattactacatgtccctggagtttatatctttcagacttgtctgcactgagcttccaccaatttgtcaaatacagatcaggtttccctaccacccgtgcagttgaaaacccacatacaacttttgactcctccagagcttaactactcatagcctgctattgactggaagccttgccaataacataaacagttgattaatacatattttatatgttttctgtattatatattgtattcttacaataaagagaaaagaagatgttattaagaaaatcataaggaagataaaatatatttactgttcattaagtggttcccatgggtgctggttcccatggaggttgccccttgtgagtttttgctcagggaagttgtgattctctatatttgcctgttggtctcctaatttgggagtcatcagttttccctgtgacctcacttctcttacagagttaagaacagttgttggtttttcagtttgttcagtgttttacatgttgttagaacacagtggtacttctaagtttcttaacatgctagatcagaaacctgaagtctcacctaatttggctttttatattttttcttcttttttttcttccattgctaccaaagcatttttcatctgtgtctggggtgacattagagcagaatgtgatttctaggtaaacattattgggctccctagcagaaaaatttttgaaagtagtacatgaattctgtataattaaaattttcttttcatcttaataggtataggtaataggcacggcctattttttttttgctcaacagtctaaaatagtaatttaatcacctaatagccttagttatatagttgaaagaagagttggaaatctgattcatgggttggaaatcacctgtcacatatgagttttaggcactggtcactttattttgaaacagctttggggttttttcctttttcaactcataataggctttaacagcttttagttttgtttctgtttttttaacagcatgagttgccaaatttggttatagcttcttggtacaagatgggtaaatttgctttgtgttgtgtaattactttttattttaaatgctacctcttttatgaacactaactttacactaagattaggaaaatgagaattgcatgtctgcaacaaatagctatctgtagtattaaattgtgaaaatgtagactttggattggagctggcatctcttaatatgtaattgtaacatagagtaaataagtattttgtcccttgtagggtcaaacagtacagtgcatgggcagaattagagatgtaggcttttttttttttttttttttttactggcttagagaaccgtttgatcagctaatatggaattaagtccctagggctgcccaggcacaacattaactgctattaaaggaaaatttaaaagagtattagtgaaggttaaatactgaccatggacatctggcaaaattgatgttttttttcccctccaccattgtttatagtttattgttatttatcagagaattaatgtttattttcagaatctattaccataagaaatctgtttgaggacttcgtatgtgccaggaattctactaaataatgatataatgctgaacagaattagataggatcctcacttcgttaagcttacagtctagtggtatagatcaacattaatcaaagaataacacaaatagaaagcagagcagtggttcatgggattgactgtagagaagcatgagggaagttcccaggtgatggaaaatactttatttcttaatcgtggtggttacatgtgtgcatatgtttatgaaaatatattgtacatttaaagtggatacattttatcacatgtaaattatgactctataaagttaattaaaaagaataactcaggtaaggtggtgtgtgcgcctgtagtcccagctatttctgaggcaggaagatcacttgagcccaggagtttgagttcagcatgggcaacatgagacctgtgagactttgtctctaaaaaaatttaaataaataactaagataaatgtaaaattacagctgtagtaagttctacaaaggagagttacatgggctatgacgatgtaagatagcaagaactgacattggcagggaggaaatgatgatgagtagaagtaaataagtgaagtgtggggattgatgtcaaggggacagtataaaagaaataacagcatgcgccaaggccctaaaattggaaagtccttggcaaattaaaggagtttgaaaaaggccattgtgtgcaaagcagaaaataggtactacaaggtaaaagatggagctaagcggtaggtaaggctaaaccttgtcagccattgttaaatattgaattgtatcctaagcacaactcagtggaaagcagttaaagttctttaattgggggaggcaatgaaggggtaataaaattggttatagaaatactgctctggctctagtgttgagaatgaattggagtagccagagtagattcaagaagactttagtaagattattccaacaggccaggacctgttatagggtggtggcaatggagagagatggacagaatggagagtgtatttaggaggtaaaaatgacagaacttggtgatgcactgaatgtgaaatggggaaggtgtctaggaggactactaggtttatggtttgcgtattagggtggatgatagcagtttcatttactgagacagggagccctggcagagtacccagcttttagagtgggtagggggaaggggagagtgcatctggtgttgggcattttgaagtgatttacatacaacaaactgaaggtatctttaacactgagtccagcaggttagcatatttattcagcaagcattgcacctttttttgttgtttttggggtcttcaactcctggcctcgaatcctccctccttcccccgcctctcccagcctccgcctcccaaagtgctgggatttcaggagtgagccaccgcgcctggccagcatcgcgctgtttgtgcagtgtgccctgtgctaggtcttgcagtgggtaccagtagagacataaaagtacaaaagataattggacgtttagtagagtcctgaaagggggcgggataggaagatacctaaccataagaaaaaccagcaagagcggaaaaggagctagtcctccagatcaataagttaatcacttatgtttgtgattccctgcattttgggtgattctctgtcgaggtcctcttaagtccagacttttgatataatctgcagtttgcgccatttggattcctgaagcatctttacaagccacctacattccttatggagctgtggcacaacagcaagcccacgatgtctcaccggattaataaaaatataggcgctcacgcttttgtttaccgatatagtatctcctcctcccctcactccatcaacccccacgcgacacaactttccggaagtaagcaaaatccgttatcaaggtgaaactccggggaccaggctccacagctgccataaactggatggcacgttagaagccggtgggtgtaggtgaggcacgctggcgcccgcgggcccttctccagccgctacccagtgggaatccgcggggctgaagccccgaaaccaggctgagcgtcccagagcgcaacctccctttcccccagcagcgccggcgccgcagaagccgcgtgtccccaggcgcactcccccaaggtgaacccccgccccccacggaggcggctgggtcgcgggtctgggcggggcgctccggacgccctcccgccgctgcgcacccctcccgcgagctgccagctccctcggcctctccacccaaaactggcccaaccgccaatcgtctgcctctcacctcctacagcaggtgacccatggccaatcgccaggggtctctttgccaggagccgccagggccagccaatcggggcgacccctccgccggggaggggacgggaaaggggtggggggtgaagggggtgaagggggtgtcccgggggacgggctgaacctcagtcaggaccgcctgcaccgcagtccggggatcgggtcgaggggagaagaaaaaggggtgctcgggagcagcccccggctacctcccctggaggcacagagggcgggggccttggcgaatggctttcttgctggccacttgcggagtgagtagaccccgagggtctgggagaggggccggcccctacccctgagtccccggggtcccggccgccaggccggagcgcgaatgtcgtgctcaccctgcctccttcccgccgccccctgggggtttggattcaggatttgttcctagtgtccaagattttgataagaaacttacagaagctgatgcttacctacaaatcttgattgaacaattaaagctttttgatgacaagcttcaaaactgcaaagaagatgaacagagaaagaaaattgaaactctcaaagagacaacaaatagcatggtagaatcaattaaacactgcattgtgttgctgcagattgccaaaagtactattaatcccgtagatgcaatatatcaacctagtcctttggaacctgtgatcagcacaatgccttcccagactgtgttacctccagaacctgttcagttgtgtaagtcagagcagcgtccatcttccctaccagttggacctgtgttggctaccttgggacatcatcagactcctacaccaaatagtacaggcagtggccattcaccaccgagtagcagtctcacttctccaagccacgtgaacttgtctccaaatacagtcccagagttctcttactccagcagtgaagatgaattttatgatgctgatgaattccatcaaagtggctcatccccaaagcgcttaatagattcttctggatctgcctcagtcctgacacacagcagctcgggaaatagtctaaaacgcccagataccacagaatcacttaattcttccttgtccaatggaacaagtgatgctgacctgtttgattcacatgatgacagagatgatgatgcggaggcagggtctgtggaggagcacaagagcgttatcatgcatctcttgtcgcaggttagacttggaatggatcttactaaggtagttcttccaacgtttattcttgaaagaagatctcttttagaaatgtatgcagacttttttgcacatccggacctgtttgtgagcattagtgaccagaaggatcccaaggatcgaatggttcaggttgtgaaatggtacctctcagcctttcatgcgggaaggaaaggatcagttgccaaaaagccatacaatcccattttgggcgagatttttcagtgtcattggacattaccaaatgatactgaagagaacacagaactagtttcagaaggaccagttccctgggtttccaaaaacagtgtaacatttgtggctgagcaggtttcccatcatccacccatttcagccttttatgctgagtgttttaacaagaagatacaattcaatgctcatatctggaccaaatcaaaattccttgggatgtcaattggggtgcacaacatagggcagggctgtgtctcatgtctagactatgatgaacattacattctcacattccccaatggctatggaaggtctatcctcacagtgccctgggtggaattaggaggagaatgcaatattaattgttccaaaacaggctatagtgcaaatatcatcttccacactaaacccttctatgggggcaagaagcacagaattactgccgagattttttctccaaatgacaagaagtctttttgctcaattgaaggggaatggaatggtgtgatgtatgcaaaatatgcaacaggggaaaatacagtctttgtagataccaagaagttgcctataatcaagaagaaagtgaggaagttggaagatcagaacgagtatgaatcccgcagcctttggaaggatgtcactttcaacttaaaaatcagagacattgatgcagcaactgaagcaaagcacaggcttgaagaaagacaaagagcagaagcccgagaaaggaaggagaaggaaattcagtgggagacaaggttatttcatgaagatggagaatgctgggtttatgatgaaccattactgaaacgtcttggtgctgccaagcattaggttggaagatgcaaagtttatacctgatgatcagggcagtaggcataattcagcaacaaacaatcttcctttgggagaaacctgttcattccaatcttctaattacagtggttcctatctcagggatactggactttctgacgcagatgaacaattaaggggaaaagcttcccttttccctctgtggcagttacgattttgacttcagtcctgagaaaaacttcaggttttgaaaatcagatgatgtcttctccttttccaaacaccacacgttgaaagcatttataaatccaagtctgaaactctgcgctctagtactgctgttaagatacacaacttgtttcttagttcatataatctcgggatacacacacacacacacatatatatacacacacatacgtatacacacacatacatatatataaatatacctgatgccagatttttttcataaatattctgcctactgtaaatatgggttcctctgagttgttttagaaaattagcgcaatgtattaaaatcaagtgttaggaaatttcatggtcttacctacaataacttttattttggaattgaactattattaaattgtatctaatcctggaaaaaaaacaaaaatgctagtaaaatgataatgtaccgaaattggagaaatattcaattgtaactcacttttaaaaataataaaaccttagggggggtcccggtacaaatttccccttatagagggcggttttaaatttaattggcggcttttaacaacgtt

SEQ ID NO: 735119 - DNA, 18459 bp, Homo sapiens
  misc_feature (18383)..(18383): n is a, c, g, or t
  misc_feature (18394)..(18394): n is a, c, g, or t
  misc_feature (18399)..(18399): n is a, c, g, or t
  misc_feature (18402)..(18402): n is a, c, g, or t
  misc_feature (18404)..(18404): n is a, c, g, or t
gtaagggtctttacatggtttccagatagttcattagttgttgctttctttttttgtctgttttctgttttttttttttaaataactgtggtatgatgtaataggaacttataatttctgagttgcttatttttcctttacagttatagtaaagttatactcatttattttctcctgctttctgcagagtaaaatactgatttttgtctagaaacaagacagtgcaagacaatgttgaaagtgaaattctatgttaaaatatgccagatttattttaagaatttaatatctgtagtcagttatcaatacaaccaaattacataattatgcatgataataggtaaatactgagaagttcacctcattttcttgttaaaggatttggctattaccgtatgtgtcagttagtactcttttgtatggtagtgaaagaaaactcaacccaaactgattcatgaagaagaaagtaaatctggttagatgtggtttgaattaggtaattcatgtcatgaggactcagatctcccatctctatttctacgttccacttttgcattggcttcattttcggttaggttctcccttggtggtggtaaggtggttgtagcaatgtcagcctcccatttttggaaccgagtccataggaggctattctttctagaccttaataggagtaacacaattattgctcatcaccctagctttggccatgtgtcaaatcctgaccagtcacaatttcacagtcatagattctaccctggagctgggatgttactggcctcactagaaacacattgctgatagggtagaaggtgtgttcatcctacccaacccgacccgcaccaaagtcagaatagggaaaaacagatgttgggtgacatgcaactaacgtctgccgtactacactgaagatatttttctatgtttattctccagtgaaagagcttatatttgtggtacataggggattttgttttaatttagaaaatttaattgtagaaaacatgttttataaccctttctctgtactttgttctatatcaggaattgacttgattagataaggtgacatagggtatcttaggccctacaagatagtaaaccccccatcacttgaaagtattcagtagaggcttaaaaaacattattaaaggatgtggttattaggggactttaagaaatgaatatgaaattgaagtaggaaatctttaagctactctgtgagttatgccttttaaaagcaatttgtaattcctgtagatttcttttaaatttaggcagtttcataaatgactatagcatcattttagcaaatttgtgatcctgtaagaggaggataagtgttttttgtttgtttgtttgttttttgtttttttgagacagagtctcactttgtaccccagaaagtaaatctagttagatgtggtttgtctcggctcactgcaacctccaccccgtgcgttctagcaattctcctgcctcagccaccacacctggcctaagaggggaggataagtgttttagtgatcatattagactgaatgtggcagatgagatttcccgcccccccattgttggttagactgacattcaacattcaacaagagccacctgcccttgtaggcatttctgccactatacccctacataaacctagagtgctattgcttacttgctttccttcaaatacattttttcatttgtggcctccacattcttgtgtgtgatgtcctttctctgtgaaatgtcttctaccctttttttcaaagcctagtttagaactgacctcttctatgaaccctctgccgactggcctttccttccccagtcccccaagttcaaaatgatctctttcctttgaatactatagtatttgcacaattcactatctccttatcatattcttcttgtttatttgttatcagctgatgttgacatcataagttcaggttcctaactagatccaatattggaatttttcagcttttgctaagaagagagcttgtatgtctttgggaataatgggcagaaaaagataactttgagaagtcttagacttctaatagctttgatatttaaaagtacatgtaatacaagaggtttttttcctacatttaatgcatggagaagataggacatttagaaatatggaattaatgttcatttgactggcaaaagattattttctcagatgtagtgaagtgtggtaaagaacttcactctagagccagaatgtctgtgtttgtatcccagagcccaccacttacatttaaccattaacattcaacttactgtctctgagtttcagtggcctcatctataaaatgaggataataagagtacctacttcatagagttgttttagtggttaaataaactaacgtaaacttgctagaacttgataaactaatattggatgagaactggttgaaataatgcctggctatagtaaaaacttggtaaatgttagttgccattacaatgcaactactgttcctaccattccctctgccagtgcctggtattcagtagcactcagtaaatgttagttaaatgaagaaataactgaaggaatgaatgaacaaatggttgatgtagagattgcttttccattgttgtttattgaatattttgagatgtataacatactgtctgttaggcactgtgggatgggcactcacggagctgtcttccaaaggggtataggagaggagacgcagtgatctcagcaacctacctttaaaacatatcctagtatctactgccatgttaggttctcttcttttgctttttttaaaaaaaaattctcacaaaactccccccacccacttcagtttatagatgaggaagctcctactacataatagtgcttcccagtctaattcttgacctcattgtatttatatgtcctttttttttttgacagagtctcactcattgcagtggcacaatcacagctcactgcaacctctgcctcccctgctcaagtgatcctcccacctcaacctcctgagtagctgggactacaggcatgcaccaccacgcctggctaatttttgtatttttttgtagagatgcggttttgccatgttggccaggctggtctcgaactcctgggctcaagccatctgcccactttggcctctgagagtgctgagattataggcatgagccaccattcccagccatgttttcctttttcattgaactttatctactttagccattaaactccactccattggtcttgtcattactaagagctgaaccacctgcaaaatattaagttaaaaagcgttttctttgacaacagttttcttttcttcatcttcctctatcactttacttctgaacttttattctctcattttgatctgacccctacttctctgtttttcctggccatttagtactttcttgttttgctcatcccatttcccagtggagaccttctggtctgctgctttatcactggttttgttagaagacatacaaatggcaaggaggtatatgaaaaggtgcctaacatcattgatcatcagagaaatgcagaccaaaactacaatgagatatcatttcaccccagttaaaatggctttttttttttttttccaaaagacaggcaataacaaagtactggtgaggatgtggagtaaagggaacccacatacactattagtaggaatgtaaattagtacagccactgtggagaacagtttgaaggttcctcaaaaaactaaaaatagagctaccatataatccagcaatcccactgctaggtatatatccaaaagaaaggcaatcaatatacggaagagatacctgcacacccaggtttattgcagcactattcacaatagccaagatttggaagcaacccaggtgtccaacagatgaatggataaagaaaacatggtatataaacacaatggaatactattcagctgtgaaaaagaatgaaatcctgtcatttgcaatcctgtcttgaatagaactggaggtcatgatgttaagtgaaataagacaggcacaaacttcacatgttctcacttatttgtgggagctaaaaattaaaacaatcgaactcatggagctagagaatagaattatggttaccagaggctggaagggtggttgggcgtataagtgtagggggagtggggatggttaatgggtacaaaaaaatgagaacgaataagatctacttgataacacaacagggtgactatagtcaacagtaattatacatttaaaaataactagaagagtataattagattgtaacacaaaagataaatgcttgaggtgatggatacctatttaccctgatgtgattattacttatttcatgcctatatcaaaatatttatactccaaaaatatatatacctactatgtacccacaaaaatttaaaaatttatatattgtttttgctatcacctttagaatttcttgtcattggatagttcgtctgtataccattctggtcttcattccccagggcccccgttgtctgatttttctgcttctagaactgttagaggtcacaaaagcaagatggttgtatctatcacaatttttgtctgactttaactgggtatctgttacgatttagtagtcatcttactgacttcttgttggtttccaattgaatcctcacagtagactgttttcattgtaatcagtatcgaattatagcctgttcccttcttcataaatgaaggctttcttcttcaacagttcttagtgacttcacctgtactttatttctctgctttgaatatttcgaagaaaacatattcttgctctttcccaaggttaacactacatacattaccttgaccacaggatgttttcttgcagattgtgacctaattccatcacccttcagcagcccccaccgttttcatggattcagctaaaccttctgtaagatgactctttttccccctaatctttatatctcttttgatatgtagctttagtctcactttttttccttttggattttgccagttagatgtctccctggaattccacttcagcatggctaagactaagcttgtcttctctttcctccccaaagcaaattgtaattaggatagactgaaggtgacagaagataactaagatcttcttcatcctttcggctcttatggaagctgaattccagtagtcattctaaatttgttgtatgtcagcttatggtatcttttcatgtctttacattcagccaaagaggaagttccttgaaggggagaccagagggcgtgctgtgcttcttaatcctctctttcttaaccagtaagaggcattcagtagatatctgatgatactgattaatagaggggaacttttcagattcttttttttttttaaccctagtaagctttagtacaaactaaatgctgagagattatcaagtaagggattgatcatcacaagaagactcaggatgttacatcctgtaggttttatagtttcctatattgtaaaaaatatgagttatagcagcttgtctggatgtcatacaggtataaaaatcagttttataaacttgagtaaattggggcccattttagaaaaaactcttgcaggctgtgaatgccaatatataagtaaagtattaagtataatgttatttaatgtgggcaaacataaagccaggtgtaaattttttaggtttaaaatcttatagaactatacatccaaaagaaaatttcaagttaaacataatacaaagcaatacaatctaaattaacattaatttaatgtgatgaatgatattgccttgctaaaagtgggtcactacttacaatgtgcaaatggtactcatcgttagggtatagattcttttaaactatgacatacgtacactaccatgtggaacgtgatgatgtgttctctgttctaactactgggaagacttccttggcatagcacatgccatggggtcagttggctttgacttcatatagatatgccatttacttggtcagtgtcacttctatgacaagtagtatgttgtgccagtttgattataagtacaaatatgggcaatgaagtaacttggttttaaggttgttactaagctgagtaacagtgtgtggctatacaaatttttataggctatcaggaatgaaaacacaggagattgttgtagattcaagtattttagattcaagtttgaagatgctcatgcagatgtttaactgagttgtatagacctttatgtttctttctttttctctttttttttttttgagacagagtcttgctctgtcacccaagctggagtgcaatggtgtgatctcggcttactgcaacctccgcctcccaggttcaagcaattctcctgcctcagcctcccaagtagctgggattacagatgtgcaccacgacgcccagctgattttttgtattttagtagaggcggggtctcaccatgttgtcaagatggtctcaatctcctgaccttgtgatccacccacctctgcctcccaaagtgctgtgattacaggcgtgagccaccgcgcctgactgacctttatgtttcttaactttatgctatacatcagttgatatttcaaaaatttaaatggtttctatgattattctttgggctaagaaattgggcattaattgtcctcatatgtatggtttttgtggctacttcatgtagattttatttttggtggttatcaaattggaatttttttttttttttttttttttgagacggagtctcattctgtttcccaggttggagtacagtggtgcaatctcagctcactgcagcctcgacctcccaggctcaagcagtcctctcacctcagccttctaagtagctgggactacaggcacgcaccaccacacctggctagttttttgtgtttttagtagagatggggttttaccctgttggccaggctggtcttgaactcctggcctcaagtgatccacctgcctcagcctcccaaagtgctgggattagaggcatgagccaccacacctggctgaaattggaatttcattggtactgcctgtaattttatgttaatttttttttttttttgtcgtcactagcttttatctaaagcccctagagagaaaggccatgataccttgtatacaaggttataagagtatacaagggaaagggagggctgaagggaacagggtgggctggtacaagcctcattagaaataccattgagtctgtgagtaaaacatcattatatgaaaaggagatgtggttttagggtggtccaattacttttgcaccagcctaataaaattacaagtcattatcaatagagacattgtaaaacctttttttttcccaaaagaagtatcaggtatgataattacatgtctgcccaactttcgttatagattaacataacttaattgtatttaaggtacaatttaggagagttgctgaaaaatgaatctttagtattgggatgccttgattctaccctcaatagctataatggattatgtgtctgagtagattaataaaaatcttttgagcatttttcttgaactacttcactgaagattagctttttgagcatccattttaatttctcagtatataaggatcggtttatcacaactgtattgttttccctggccttgttagattatattttcatatcatgtagaaaaataggtgtattcgttctcccttgaagtcctttgtctcccaaaggaaatggttgcaatacagatgtgtcacctcttccacaggtaaagtggaatggagaagtagccagttaaatagtgcatgctcaatttggaacatttagagcatacaggaaagttatttatttggtaaatattttttaagcatttactatgtttcatgcattgtactagttgtagaggatataattgaatacaactacatgtagcccttgactttatggaactagtctagtataaagatttaagattgcctggcatggtggctcacgccactaatcccagcactttgagaggccaaggcaggattgcttgaggccagaagtttaagagtagcttggtcaacataatgagactccatctctaaaataaatagatagatagatagatagatagatagatagatagatagatagaagtagttagacaacacaaagcagtttcactcatcttgtggcaaggagttatgtatttctaatcaaatttggcaactcaagcattttcaacaaaatctacatgttttttcagaataaagtgaccaacacagaatgttacctgtaaaaatcagagcaataattgctatctaaaataattttgaaaattaagtggtactgaaaggctcatatagcaaaaatatggcctcctgtcattgtactttcctacttcccagactcaccattttcaacattttttagtagtttattttgccattttatagcatagtacctgacattttatttattcaacagacatttcttaagtacctaatacatgccattccttgtttgaagggatgctaaggatacagtggtgaacaaggcgttgtggggttgtatagagggtattcattcctaaccttgaaccaaatatttctttctgttggataatgcattaaaaattgcaaacagtttacaaacttttggagcaatggtggccttgatcataaagtagggactgcttctaccgtatacatgcttggtggtgtatttgtgatatctggctaaagtttctacatggaaattgactgactttagttttgagacttctgggaaccagtcaggcaaaatagtgaaactgtgtatcctgtttccaagagttgtcttttaaggttatctgcttcattcatttggcctgacttgctaggcaaatgcctagggtaaatatgatttgattaactataacaacaacagcaacaacaacaactttattttttagagcagtttgaggttcacagcaaaattgagcagaatgtacagagattttccctatacccgcttcccctacgcatgtgcggcctcccctactatcaacatcccccaccagagtggtttgttacaattaatgaacctacattgacacatcattatcactcaaggtccgtagtttacattagagtccactcttggtgttgtgtatgggtttggtcgattttataatgacatttatccaccattatagtgtcatacatagtaattttgctaccctaaaaatccagtgtgctccacctgttcctccttccctcctccctcatccctggcaaccactgaactttttaacatctccatagttttgccttttccagaatgtcatatcattggaatcacacagtatgcagccttttcaaatgggcttctttccgttagtaataggcatttaagtttcatcctcatcttttcatggcttgatagctcatttctttccctccctcttttcttccctgtcttccttccttcctcttctttcctgtttcctctttcttcttccttttttaagagacaaggtgtctcactctgttgcccaggctggagtgcagtggcccaatcatagctcattgcagccttgaattcctgggctcaagtgatcctcctgcgttagcctcctgagtagctgggatcacaggctccagtcattttagtgctgaataatatttcattatctggatgtaccgcctattcattcacctactgaagaatatcttggttgcttctaagttttggcaattatgagtgaagttactataaacattgtatacaagttttatgtggatgtatgttgtcatctcccttgggcagataccaaggagtgccattgttggatcatatggtaaatatatctttagttttgtacagaattctaggttggtatttttttctctctcagtcctttattttatttggagacagtctcgctatgtcgcccaggctgccatacagtggtgccatctgggctcactgaaacctccacctcccaggttcaagcgattcttgtgccttggcctcccaagtagctgggattacaggagtgcgccaccacgcctgctaatttttgtatttttagtagagacagggttttgccatgttgcccaggctggtctcaaactcctgaccttaagtgattcacccacctcaatctcccaaaatcctgggattacaggcctgagctactgtgcctgatctctctcagtactttaaagaaatatttcattccacttttcttttttttcttctttttgagatggagtctcactctgtcgcctgggctggagtgcagtggcgcgatctcagctcactgccacctccgcctcctgggttcaagtgattctcctgcctcagcctcctgaatagctgagattacaggcgcccaccaccatgcccagctaattttttgcatttttagtagagacgggggttccaccatgttggccaggctggtctcgaactcctgacctcgtgattcgcacatctcggcctcccaaattgctgggattacaggtgtgagctaccacgcctggcccactcttcttgcttacatagtttctgaggagatgtcagatgtaatttttatttttgctcttctgtaggcaagttgagttttttccccctctagcttctctcaggatttttttctttatctttgattttcagtagtttgaaaattatatgcctagctgtcagggttttttgcttgtttgtttttgttttctcaggtgtgactccagaaaggttctaaagaggagctttacaatctcttctctggggtttatggagacttcctttacccttctgtgttagccccttaaagcactgcgtcaaccttaaaagggcacaggaaagggtgtctatgccatttttatgccatttatcctgcttggtgttttctgagctttcttcatctgcggtttaatgtctcacattaatttgtagaaattctctgtcattgtttcaaatttttcttcagttcttttctctgtttcttcttctggtgttcccattatgcttttgtggttgtcgtacagttattggatattttgttccaggcttttttttttccagtctttttttccttttgcttctcggttttgtaggtgtctgttgagatactctcaagtgcagatattctttcctcagctttgtctagtttactaataagcccattaaaggcagtcttcatttctgttacagtctttttgatcagtagcatttcttttttattctttcttaaaatttctgtctttctgcttacattgcccatctgttcttgcatggtttctactttgtccattagagttcttaggatatttatcataattatttcaaatttctggtgtaacaattccaacatccctgcaacatccaagtctagtttcgatgcttactgtgtctcttccagctgtgttttttcctatttaatatgtcttataattttttcttgatagccatacatgatgcattaggtaacagaaactgctgtgagtggacctttagtaatgtggtggtaaggtgtgcatggaggggaaacattttcagtctgttagtgaacttttgtcaacttcacatgtgcttctcaagtccatcctgtaagtgggagagtagggctagagaggactgaagttgggtatatattaaatactttctcctacaaagaagcctagaggggacgcattaggggattttttttcccccagtattcactgtgatgacccttattgagctcctggaggtaaaactcacaaaactgtggttctcccccctgcccatattactacatgtccctggagtttatatctttcagacttgtctgcactgagcttccaccaatttgtcaaatacagatcaggtttccctaccacccgtgcagttgaaaacccacatacaacttttgactcctccagagcttaactactcatagcctgctattgactggaagccttgccaataacataaacagttgattaatacatattttatatgttttctgtattatatattgtattcttacaataaagagaaaagaagatgttattaagaaaatcataaggaagataaaatatatttactgttcattaagtggttcccatgggtgctggttcccatggaggttgccccttgtgagtttttgctcagggaagttgtgattctctatatttgcctgttggtctcctaatttgggagtcatcagttttccctgtgacctcacttctcttacagagttaagaacagttgttggtttttcagtttgttcagtgttttacatgttgttagaacacagtggtacttctaagtttcttaacatgctagatcagaaacctgaagtctcacctaatttggctttttatattttttcttcttttttttcttccattgctaccaaagcatttttcatctgtgtctggggtgacattagagcagaatgtgatttctaggtaaacattattgggctccctagcagaaaaatttttgaaagtagtacatgaattctgtataattaaaattttcttttcatcttaataggtataggtaataggcacggcctattttttttttgctcaacagtctaaaatagtaatttaatcacctaatagccttagttatatagttgaaagaagagttggaaatctgattcatgggttggaaatcacctgtcacatatgagttttaggcactggtcactttattttgaaacagctttggggttttttcctttttcaactcataataggctttaacagcttttagttttgtttctgtttttttaacagcatgagttgccaaatttggttatagcttcttggtacaagatgggtaaatttgctttgtgttgtgtaattactttttattttaaatgctacctcttttatgaacactaactttacactaagattaggaaaatgagaattgcatgtctgcaacaaatagctatctgtagtattaaattgtgaaaatgtagactttggattggagctggcatctcttaatatgtaattgtaacatagagtaaataagtattttgtcccttgtagggtcaaacagtacagtgcatgggcagaattagagatgtaggcttttttttttttttttttttttactggcttagagaaccgtttgatcagctaatatggaattaagtccctagggctgcccaggcacaacattaactgctattaaaggaaaatttaaaagagtattagtgaaggttaaatactgaccatggacatctggcaaaattgatgttttttttcccctccaccattgtttatagtttattgttatttatcagagaattaatgtttattttcagaatctattaccataagaaatctgtttgaggacttcgtatgtgccaggaattctactaaataatgatataatgctgaacagaattagataggatcctcacttcgttaagcttacagtctagtggtatagatcaacattaatcaaagaataacacaaatagaaagcagagcagtggttcatgggattgactgtagagaagcatgagggaagttcccaggtgatggaaaatactttatttcttaatcgtggtggttacatgtgtgcatatgtttatgaaaatatattgtacatttaaagtggatacattttatcacatgtaaattatgactctataaagttaattaaaaagaataactcaggtaaggtggtgtgtgcgcctgtagtcccagctatttctgaggcaggaagatcacttgagcccaggagtttgagttcagcatgggcaacatgagacctgtgagactttgtctctaaaaaaatttaaataaataactaagataaatgtaaaattacagctgtagtaagttctacaaaggagagttacatgggctatgacgatgtaagatagcaagaactgacattggcagggaggaaatgatgatgagtagaagtaaataagtgaagtgtggggattgatgtcaaggggacagtataaaagaaataacagcatgcgccaaggccctaaaattggaaagtccttggcaaattaaaggagtttgaaaaaggccattgtgtgcaaagcagaaaataggtactacaaggtaaaagatggagctaagcggtaggtaaggctaaaccttgtcagccattgttaaatattgaattgtatcctaagcacaactcagtggaaagcagttaaagttctttaattgggggaggcaatgaaggggtaataaaattggttatagaaatactgctctggctctagtgttgagaatgaattggagtagccagagtagattcaagaagactttagtaagattattccaacaggccaggacctgttatagggtggtggcaatggagagagatggacagaatggagagtgtatttaggaggtaaaaatgacagaacttggtgatgcactgaatgtgaaatggggaaggtgtctaggaggactactaggtttatggtttgcgtattagggtggatgatagcagtttcatttactgagacagggagccctggcagagtacccagcttttagagtgggtagggggaaggggagagtgcatctggtgttgggcattttgaagtgatttacatacaacaaactgaaggtatctttaacactgagtccagcaggttagcatatttattcagcaagcattgcacctttttttgttgtttttggggtcttcaactcctggcctcgaatcctccctccttcccccgcctctcccagcctccgcctcccaaagtgctgggatttcaggagtgagccaccgcgcctggccagcatcgcgctgtttgtgcagtgtgccctgtgctaggtcttgcagtgggtaccagtagagacataaaagtacaaaagataattggacgtttagtagagtcctgaaagggggcgggataggaagatacctaaccataagaaaaaccagcaagagcggaaaaggagctagtcctccagatcaataagttaatcacttatgtttgtgattccctgcattttgggtgattctctgtcgaggtcctcttaagtccagacttttgatataatctgcagtttgcgccatttggattcctgaagcatctttacaagccacctacattccttatggagctgtggcacaacagcaagcccacgatgtctcaccggattaataaaaatataggcgctcacgcttttgtttaccgatatagtatctcctcctcccctcactccatcaacccccacgcgacacaactttccggaagtaagcaaaatccgttatcaaggtgaaactccggggaccaggctccacagctgccataaactggatggcacgttagaagccggtgggtgtaggtgaggcacgctggcgcccgcgggcccttctccagccgctacccagtgggaatccgcggggctgaagccccgaaaccaggctgagcgtcccagagcgcaacctccctttcccccagcagcgccggcgccgcagaagccgcgtgtccccaggcgcactcccccaaggtgaacccccgccccccacggaggcggctgggtcgcgggtctgggcggggcgctccggacgccctcccgccgctgcgcacccctcccgcgagctgccagctccctcggcctctccacccaaaactggcccaaccgccaatcgtctgcctctcacctcctacagcaggtgacccatggccaatcgccaggggtctctttgccaggagccgccagggccagccaatcggggcgacccctccgccggggaggggacgggaaaggggtggggggtgaagggggtgaagggggtgtcccgggggacgggctgaacctcagtcaggaccgcctgcaccgcagtccggggatcgggtcgaggggagaagaaaaaggggtgctcgggagcagcccccggctacctcccctggaggcacagagggcgggggccttggcgaatggctttcttgctggccacttgcggagtgagtagaccccgagggtctgggagaggggccggcccctacccctgagtccccggggtcccggccgccaggccggagcgcgaatgtcgtgctcaccctgcctccttcccgccgccccctgggggtttggattcaggatttgttcctagtgtccaagattttgataagaaacttacagaagctgatgcttacctacaaatcttgattgaacaattaaagctttttgatgacaagcttcaaaactgcaaagaagatgaacagagaaagaaaattgaaactctcaaagagacaacaaatagcatggtagaatcaattaaacactgcattgtgttgctgcagattgccaaaagtactattaatcccgtagatgcaatatatcaacctagtcctttggaacctgtgatcagcacaatgccttcccagactgtgttacctccagaacctgttcagttgtgtaagtcagagcagcgtccatcttccctaccagttggacctgtgttggctaccttgggacatcatcagactcctacaccaaatagtacaggcagtggccattcaccaccgagtagcagtctcacttctccaagccacgtgaacttgtctccaaatacagtcccagagttctcttactccagcagtgaagatgaattttatgatgctgatgaattccatcaaagtggctcatccccaaagcgcttaatagattcttctggatctgcctcagtcctgacacacagcagctcgggaaatagtctaaaacgcccagataccacagaatcacttaattcttccttgtccaatggaacaagtgatgctgacctgtttgattcacatgatgacagagatgatgatgcggaggcagggtctgtggaggagcacaagagcgttatcatgcatctcttgtcgcaggttagacttggaatggatcttactaaggtagttcttccaacgtttattcttgaaagaagatctcttttagaaatgtatgcagacttttttgcacatccggacctgtttgtgagcattagtgaccagaaggatcccaaggatcgaatggttcaggttgtgaaatggtacctctcagcctttcatgcgggaaggaaaggatcagttgccaaaaagccatacaatcccattttgggcgagatttttcagtgtcattggacattaccaaatgatactgaagagaacacagaactagtttcagaaggaccagttccctgggtttccaaaaacagtgtaacatttgtggctgagcaggtttcccatcatccacccatttcagccttttatgctgagtgttttaacaagaagatacaattcaatgctcatatctggaccaaatcaaaattccttgggatgtcaattggggtgcacaacatagggcagggctgtgtctcatgtctagactatgatgaacattacattctcacattccccaatggctatggaaggtctatcctcacagtgccctgggtggaattaggaggagaatgcaatattaattgttccaaaacaggctatagtgcaaatatcatcttccacactaaacccttctatgggggcaagaagcacagaattactgccgagattttttctccaaatgacaagaagtctttttgctcaattgaaggggaatggaatggtgtgatgtatgcaaaatatgcaacaggggaaaatacagtctttgtagataccaagaagttgcctataatcaagaagaaagtgaggaagttggaagatcagaacgagtatgaatcccgcagcctttggaaggatgtcactttcaacttaaaaatcagagacattgatgcagcaactgaagcaaagcacaggcttgaagaaagacaaagagcagaagcccgagaaaggaaggagaaggaaattcagtgggagacaaggttatttcatgaagatggagaatgctgggtttatgatgaaccattactgaaacgtcttggtgctgccaagcattaggttggaagatgcaaagtttatacctgatgatcagggcagtaggcataattcagcaacaaacaatcttcctttgggagaaacctgttcattccaatcttctaattacagtggttcctatctcagggatactggactttctgacgcagatgaacaattaaggggaaaagcttcccttttccctctgtggcagttacgattttgacttcagtcctgagaaaaacttcaggttttgaaaatcagatgatgtcttctccttttccaaacaccacacgttgaaagcatttataaatccaagtctgaaactctgcgctctagtactgctgttaagatacacaacttgtttcttagttcatataatctcgggatacacacacacacacacatatatatacacacacatacgtatacacacacatacatatatataaatatacctgatgccagatttttttcataaatattctgcctactgtaaatatggggnccccgggtggntaaanatngngccggtttaacccggggggaattcggggtaccacacaaaaccattgggaggcaca

SEQ ID NO: 735120 - DNA, 17278 bp, Homo sapiens
gtaagggtctttacatggtttccagatagttcattagttgttgctttctttttttgtctgttttctgttttttttttttaaataactgtggtatgatgtaataggaacttataatttctgagttgcttatttttcctttacagttatagtaaagttatactcatttattttctcctgctttctgcagagtaaaatactgatttttgtctagaaacaagacagtgcaagacaatgttgaaagtgaaattctatgttaaaatatgccagatttattttaagaatttaatatctgtagtcagttatcaatacaaccaaattacataattatgcatgataataggtaaatactgagaagttcacctcattttcttgttaaaggatttggctattaccgtatgtgtcagttagtactcttttgtatggtagtgaaagaaaactcaacccaaactgattcatgaagaagaaagtaaatctggttagatgtggtttgaattaggtaattcatgtcatgaggactcagatctcccatctctatttctacgttccacttttgcattggcttcattttcggttaggttctcccttggtggtggtaaggtggttgtagcaatgtcagcctcccatttttggaaccgagtccataggaggctattctttctagaccttaataggagtaacacaattattgctcatcaccctagctttggccatgtgtcaaatcctgaccagtcacaatttcacagtcatagattctaccctggagctgggatgttactggcctcactagaaacacattgctgatagggtagaaggtgtgttcatcctacccaacccgacccgcaccaaagtcagaatagggaaaaacagatgttgggtgacatgcaactaacgtctgccgtactacactgaagatatttttctatgtttattctccagtgaaagagcttatatttgtggtacataggggattttgttttaatttagaaaatttaattgtagaaaacatgttttataaccctttctctgtactttgttctatatcaggaattgacttgattagataaggtgacatagggtatcttaggccctacaagatagtaaaccccccatcacttgaaagtattcagtagaggcttaaaaaacattattaaaggatgtggttattaggggactttaagaaatgaatatgaaattgaagtaggaaatctttaagctactctgtgagttatgccttttaaaagcaatttgtaattcctgtagatttcttttaaatttaggcagtttcataaatgactatagcatcattttagcaaatttgtgatcctgtaagaggaggataagtgttttttgtttgtttgtttgttttttgtttttttgagacagagtctcactttgtaccccagaaagtaaatctagttagatgtggtttgtctcggctcactgcaacctccaccccgtgcgttctagcaattctcctgcctcagccaccacacctggcctaagaggggaggataagtgttttagtgatcatattagactgaatgtggcagatgagatttcccgcccccccattgttggttagactgacattcaacattcaacaagagccacctgcccttgtaggcatttctgccactatacccctacataaacctagagtgctattgcttacttgctttccttcaaatacattttttcatttgtggcctccacattcttgtgtgtgatgtcctttctctgtgaaatgtcttctaccctttttttcaaagcctagtttagaactgacctcttctatgaaccctctgccgactggcctttccttccccagtcccccaagttcaaaatgatctctttcctttgaatactatagtatttgcacaattcactatctccttatcatattcttcttgtttatttgttatcagctgatgttgacatcataagttcaggttcctaactagatccaatattggaatttttcagcttttgctaagaagagagcttgtatgtctttgggaataatgggcagaaaaagataactttgagaagtcttagacttctaatagctttgatatttaaaagtacatgtaatacaagaggtttttttcctacatttaatgcatggagaagataggacatttagaaatatggaattaatgttcatttgactggcaaaagattattttctcagatgtagtgaagtgtggtaaagaacttcactctagagccagaatgtctgtgtttgtatcccagagcccaccacttacatttaaccattaacattcaacttactgtctctgagtttcagtggcctcatctataaaatgaggataataagagtacctacttcatagagttgttttagtggttaaataaactaacgtaaacttgctagaacttgataaactaatattggatgagaactggttgaaataatgcctggctatagtaaaaacttggtaaatgttagttgccattacaatgcaactactgttcctaccattccctctgccagtgcctggtattcagtagcactcagtaaatgttagttaaatgaagaaataactgaaggaatgaatgaacaaatggttgatgtagagattgcttttccattgttgtttattgaatattttgagatgtataacatactgtctgttaggcactgtgggatgggcactcacggagctgtcttccaaaggggtataggagaggagacgcagtgatctcagcaacctacctttaaaacatatcctagtatctactgccatgttaggttctcttcttttgctttttttaaaaaaaaattctcacaaaactccccccacccacttcagtttatagatgaggaagctcctactacataatagtgcttcccagtctaattcttgacctcattgtatttatatgtcctttttttttttgacagagtctcactcattgcagtggcacaatcacagctcactgcaacctctgcctcccctgctcaagtgatcctcccacctcaacctcctgagtagctgggactacaggcatgcaccaccacgcctggctaatttttgtatttttttgtagagatgcggttttgccatgttggccaggctggtctcgaactcctgggctcaagccatctgcccactttggcctctgagagtgctgagattataggcatgagccaccattcccagccatgttttcctttttcattgaactttatctactttagccattaaactccactccattggtcttgtcattactaagagctgaaccacctgcaaaatattaagttaaaaagcgttttctttgacaacagttttcttttcttcatcttcctctatcactttacttctgaacttttattctctcattttgatctgacccctacttctctgtttttcctggccatttagtactttcttgttttgctcatcccatttcccagtggagaccttctggtctgctgctttatcactggttttgttagaagacatacaaatggcaaggaggtatatgaaaaggtgcctaacatcattgatcatcagagaaatgcagaccaaaactacaatgagatatcatttcaccccagttaaaatggctttttttttttttttccaaaagacaggcaataacaaagtactggtgaggatgtggagtaaagggaacccacatacactattagtaggaatgtaaattagtacagccactgtggagaacagtttgaaggttcctcaaaaaactaaaaatagagctaccatataatccagcaatcccactgctaggtatatatccaaaagaaaggcaatcaatatacggaagagatacctgcacacccaggtttattgcagcactattcacaatagccaagatttggaagcaacccaggtgtccaacagatgaatggataaagaaaacatggtatataaacacaatggaatactattcagctgtgaaaaagaatgaaatcctgtcatttgcaatcctgtcttgaatagaactggaggtcatgatgttaagtgaaataagacaggcacaaacttcacatgttctcacttatttgtgggagctaaaaattaaaacaatcgaactcatggagctagagaatagaattatggttaccagaggctggaagggtggttgggcgtataagtgtagggggagtggggatggttaatgggtacaaaaaaatgagaacgaataagatctacttgataacacaacagggtgactatagtcaacagtaattatacatttaaaaataactagaagagtataattagattgtaacacaaaagataaatgcttgaggtgatggatacctatttaccctgatgtgattattacttatttcatgcctatatcaaaatatttatactccaaaaatatatatacctactatgtacccacaaaaatttaaaaatttatatattgtttttgctatcacctttagaatttcttgtcattggatagttcgtctgtataccattctggtcttcattccccagggcccccgttgtctgatttttctgcttctagaactgttagaggtcacaaaagcaagatggttgtatctatcacaatttttgtctgactttaactgggtatctgttacgatttagtagtcatcttactgacttcttgttggtttccaattgaatcctcacagtagactgttttcattgtaatcagtatcgaattatagcctgttcccttcttcataaatgaaggctttcttcttcaacagttcttagtgacttcacctgtactttatttctctgctttgaatatttcgaagaaaacatattcttgctctttcccaaggttaacactacatacattaccttgaccacaggatgttttcttgcagattgtgacctaattccatcacccttcagcagcccccaccgttttcatggattcagctaaaccttctgtaagatgactctttttccccctaatctttatatctcttttgatatgtagctttagtctcactttttttccttttggattttgccagttagatgtctccctggaattccacttcagcatggctaagactaagcttgtcttctctttcctccccaaagcaaattgtaattaggatagactgaaggtgacagaagataactaagatcttcttcatcctttcggctcttatggaagctgaattccagtagtcattctaaatttgttgtatgtcagcttatggtatcttttcatgtctttacattcagccaaagaggaagttccttgaaggggagaccagagggcgtgctgtgcttcttaatcctctctttcttaaccagtaagaggcattcagtagatatctgatgatactgattaatagaggggaacttttcagattcttttttttttttaaccctagtaagctttagtacaaactaaatgctgagagattatcaagtaagggattgatcatcacaagaagactcaggatgttacatcctgtaggttttatagtttcctatattgtaaaaaatatgagttatagcagcttgtctggatgtcatacaggtataaaaatcagttttataaacttgagtaaattggggcccattttagaaaaaactcttgcaggctgtgaatgccaatatataagtaaagtattaagtataatgttatttaatgtgggcaaacataaagccaggtgtaaattttttaggtttaaaatcttatagaactatacatccaaaagaaaatttcaagttaaacataatacaaagcaatacaatctaaattaacattaatttaatgtgatgaatgatattgccttgctaaaagtgggtcactacttacaatgtgcaaatggtactcatcgttagggtatagattcttttaaactatgacatacgtacactaccatgtggaacgtgatgatgtgttctctgttctaactactgggaagacttccttggcatagcacatgccatggggtcagttggctttgacttcatatagatatgccatttacttggtcagtgtcacttctatgacaagtagtatgttgtgccagtttgattataagtacaaatatgggcaatgaagtaacttggttttaaggttgttactaagctgagtaacagtgtgtggctatacaaatttttataggctatcaggaatgaaaacacaggagattgttgtagattcaagtattttagattcaagtttgaagatgctcatgcagatgtttaactgagttgtatagacctttatgtttctttctttttctctttttttttttttgagacagagtcttgctctgtcacccaagctggagtgcaatggtgtgatctcggcttactgcaacctccgcctcccaggttcaagcaattctcctgcctcagcctcccaagtagctgggattacagatgtgcaccacgacgcccagctgattttttgtattttagtagaggcggggtctcaccatgttgtcaagatggtctcaatctcctgaccttgtgatccacccacctctgcctcccaaagtgctgtgattacaggcgtgagccaccgcgcctgactgacctttatgtttcttaactttatgctatacatcagttgatatttcaaaaatttaaatggtttctatgattattctttgggctaagaaattgggcattaattgtcctcatatgtatggtttttgtggctacttcatgtagattttatttttggtggttatcaaattggaatttttttttttttttttttttttgagacggagtctcattctgtttcccaggttggagtacagtggtgcaatctcagctcactgcagcctcgacctcccaggctcaagcagtcctctcacctcagccttctaagtagctgggactacaggcacgcaccaccacacctggctagttttttgtgtttttagtagagatggggttttaccctgttggccaggctggtcttgaactcctggcctcaagtgatccacctgcctcagcctcccaaagtgctgggattagaggcatgagccaccacacctggctgaaattggaatttcattggtactgcctgtaattttatgttaatttttttttttttttgtcgtcactagcttttatctaaagcccctagagagaaaggccatgataccttgtatacaaggttataagagtatacaagggaaagggagggctgaagggaacagggtgggctggtacaagcctcattagaaataccattgagtctgtgagtaaaacatcattatatgaaaaggagatgtggttttagggtggtccaattacttttgcaccagcctaataaaattacaagtcattatcaatagagacattgtaaaacctttttttttcccaaaagaagtatcaggtatgataattacatgtctgcccaactttcgttatagattaacataacttaattgtatttaaggtacaatttaggagagttgctgaaaaatgaatctttagtattgggatgccttgattctaccctcaatagctataatggattatgtgtctgagtagattaataaaaatcttttgagcatttttcttgaactacttcactgaagattagctttttgagcatccattttaatttctcagtatataaggatcggtttatcacaactgtattgttttccctggccttgttagattatattttcatatcatgtagaaaaataggtgtattcgttctcccttgaagtcctttgtctcccaaaggaaatggttgcaatacagatgtgtcacctcttccacaggtaaagtggaatggagaagtagccagttaaatagtgcatgctcaatttggaacatttagagcatacaggaaagttatttatttggtaaatattttttaagcatttactatgtttcatgcattgtactagttgtagaggatataattgaatacaactacatgtagcccttgactttatggaactagtctagtataaagatttaagattgcctggcatggtggctcacgccactaatcccagcactttgagaggccaaggcaggattgcttgaggccagaagtttaagagtagcttggtcaacataatgagactccatctctaaaataaatagatagatagatagatagatagatagatagatagatagatagaagtagttagacaacacaaagcagtttcactcatcttgtggcaaggagttatgtatttctaatcaaatttggcaactcaagcattttcaacaaaatctacatgttttttcagaataaagtgaccaacacagaatgttacctgtaaaaatcagagcaataattgctatctaaaataattttgaaaattaagtggtactgaaaggctcatatagcaaaaatatggcctcctgtcattgtactttcctacttcccagactcaccattttcaacattttttagtagtttattttgccattttatagcatagtacctgacattttatttattcaacagacatttcttaagtacctaatacatgccattccttgtttgaagggatgctaaggatacagtggtgaacaaggcgttgtggggttgtatagagggtattcattcctaaccttgaaccaaatatttctttctgttggataatgcattaaaaattgcaaacagtttacaaacttttggagcaatggtggccttgatcataaagtagggactgcttctaccgtatacatgcttggtggtgtatttgtgatatctggctaaagtttctacatggaaattgactgactttagttttgagacttctgggaaccagtcaggcaaaatagtgaaactgtgtatcctgtttccaagagttgtcttttaaggttatctgcttcattcatttggcctgacttgctaggcaaatgcctagggtaaatatgatttgattaactataacaacaacagcaacaacaacaactttattttttagagcagtttgaggttcacagcaaaattgagcagaatgtacagagattttccctatacccgcttcccctacgcatgtgcggcctcccctactatcaacatcccccaccagagtggtttgttacaattaatgaacctacattgacacatcattatcactcaaggtccgtagtttacattagagtccactcttggtgttgtgtatgggtttggtcgattttataatgacatttatccaccattatagtgtcatacatagtaattttgctaccctaaaaatccagtgtgctccacctgttcctccttccctcctccctcatccctggcaaccactgaactttttaacatctccatagttttgccttttccagaatgtcatatcattggaatcacacagtatgcagccttttcaaatgggcttctttccgttagtaataggcatttaagtttcatcctcatcttttcatggcttgatagctcatttctttccctccctcttttcttccctgtcttccttccttcctcttctttcctgtttcctctttcttcttccttttttaagagacaaggtgtctcactctgttgcccaggctggagtgcagtggcccaatcatagctcattgcagccttgaattcctgggctcaagtgatcctcctgcgttagcctcctgagtagctgggatcacaggctccagtcattttagtgctgaataatatttcattatctggatgtaccgcctattcattcacctactgaagaatatcttggttgcttctaagttttggcaattatgagtgaagttactataaacattgtatacaagttttatgtggatgtatgttgtcatctcccttgggcagataccaaggagtgccattgttggatcatatggtaaatatatctttagttttgtacagaattctaggttggtatttttttctctctcagtcctttattttatttggagacagtctcgctatgtcgcccaggctgccatacagtggtgccatctgggctcactgaaacctccacctcccaggttcaagcgattcttgtgccttggcctcccaagtagctgggattacaggagtgcgccaccacgcctgctaatttttgtatttttagtagagacagggttttgccatgttgcccaggctggtctcaaactcctgaccttaagtgattcacccacctcaatctcccaaaatcctgggattacaggcctgagctactgtgcctgatctctctcagtactttaaagaaatatttcattccacttttcttttttttcttctttttgagatggagtctcactctgtcgcctgggctggagtgcagtggcgcgatctcagctcactgccacctccgcctcctgggttcaagtgattctcctgcctcagcctcctgaatagctgagattacaggcgcccaccaccatgcccagctaattttttgcatttttagtagagacgggggttccaccatgttggccaggctggtctcgaactcctgacctcgtgattcgcacatctcggcctcccaaattgctgggattacaggtgtgagctaccacgcctggcccactcttcttgcttacatagtttctgaggagatgtcagatgtaatttttatttttgctcttctgtaggcaagttgagttttttccccctctagcttctctcaggatttttttctttatctttgattttcagtagtttgaaaattatatgcctagctgtcagggttttttgcttgtttgtttttgttttctcaggtgtgactccagaaaggttctaaagaggagctttacaatctcttctctggggtttatggagacttcctttacccttctgtgttagccccttaaagcactgcgtcaaccttaaaagggcacaggaaagggtgtctatgccatttttatgccatttatcctgcttggtgttttctgagctttcttcatctgcggtttaatgtctcacattaatttgtagaaattctctgtcattgtttcaaatttttcttcagttcttttctctgtttcttcttctggtgttcccattatgcttttgtggttgtcgtacagttattggatattttgttccaggcttttttttttccagtctttttttccttttgcttctcggttttgtaggtgtctgttgagatactctcaagtgcagatattctttcctcagctttgtctagtttactaataagcccattaaaggcagtcttcatttctgttacagtctttttgatcagtagcatttcttttttattctttcttaaaatttctgtctttctgcttacattgcccatctgttcttgcatggtttctactttgtccattagagttcttaggatatttatcataattatttcaaatttctggtgtaacaattccaacatccctgcaacatccaagtctagtttcgatgcttactgtgtctcttccagctgtgttttttcctatttaatatgtcttataattttttcttgatagccatacatgatgcattaggtaacagaaactgctgtgagtggacctttagtaatgtggtggtaaggtgtgcatggaggggaaacattttcagtctgttagtgaacttttgtcaacttcacatgtgcttctcaagtccatcctgtaagtgggagagtagggctagagaggactgaagttgggtatatattaaatactttctcctacaaagaagcctagaggggacgcattaggggattttttttcccccagtattcactgtgatgacccttattgagctcctggaggtaaaactcacaaaactgtggttctcccccctgcccatattactacatgtccctggagtttatatctttcagacttgtctgcactgagcttccaccaatttgtcaaatacagatcaggtttccctaccacccgtgcagttgaaaacccacatacaacttttgactcctccagagcttaactactcatagcctgctattgactggaagccttgccaataacataaacagttgattaatacatattttatatgttttctgtattatatattgtattcttacaataaagagaaaagaagatgttattaagaaaatcataaggaagataaaatatatttactgttcattaagtggttcccatgggtgctggttcccatggaggttgccccttgtgagtttttgctcagggaagttgtgattctctatatttgcctgttggtctcctaatttgggagtcatcagttttccctgtgacctcacttctcttacagagttaagaacagttgttggtttttcagtttgttcagtgttttacatgttgttagaacacagtggtacttctaagtttcttaacatgctagatcagaaacctgaagtctcacctaatttggctttttatattttttcttcttttttttcttccattgctaccaaagcatttttcatctgtgtctggggtgacattagagcagaatgtgatttctaggtaaacattattgggctccctagcagaaaaatttttgaaagtagtacatgaattctgtataattaaaattttcttttcatcttaataggtataggtaataggcacggcctattttttttttgctcaacagtctaaaatagtaatttaatcacctaatagccttagttatatagttgaaagaagagttggaaatctgattcatgggttggaaatcacctgtcacatatgagttttaggcactggtcactttattttgaaacagctttggggttttttcctttttcaactcataataggctttaacagcttttagttttgtttctgtttttttaacagcatgagttgccaaatttggttatagcttcttggtacaagatgggtaaatttgctttgtgttgtgtaattactttttattttaaatgctacctcttttatgaacactaactttacactaagattaggaaaatgagaattgcatgtctgcaacaaatagctatctgtagtattaaattgtgaaaatgtagactttggattggagctggcatctcttaatatgtaattgtaacatagagtaaataagtattttgtcccttgtagggtcaaacagtacagtgcatgggcagaattagagatgtaggcttttttttttttttttttttttactggcttagagaaccgtttgatcagctaatatggaattaagtccctagggctgcccaggcacaacattaactgctattaaaggaaaatttaaaagagtattagtgaaggttaaatactgaccatggacatctggcaaaattgatgttttttttcccctccaccattgtttatagtttattgttatttatcagagaattaatgtttattttcagaatctattaccataagaaatctgtttgaggacttcgtatgtgccaggaattctactaaataatgatataatgctgaacagaattagataggatcctcacttcgttaagcttacagtctagtggtatagatcaacattaatcaaagaataacacaaatagaaagcagagcagtggttcatgggattgactgtagagaagcatgagggaagttcccaggtgatggaaaatactttatttcttaatcgtggtggttacatgtgtgcatatgtttatgaaaatatattgtacatttaaagtggatacattttatcacatgtaaattatgactctataaagttaattaaaaagaataactcaggtaaggtggtgtgtgcgcctgtagtcccagctatttctgaggcaggaagatcacttgagcccaggagtttgagttcagcatgggcaacatgagacctgtgagactttgtctctaaaaaaatttaaataaataactaagataaatgtaaaattacagctgtagtaagttctacaaaggagagttacatgggctatgacgatgtaagatagcaagaactgacattggcagggaggaaatgatgatgagtagaagtaaataagtgaagtgtggggattgatgtcaaggggacagtataaaagaaataacagcatgcgccaaggccctaaaattggaaagtccttggcaaattaaaggagtttgaaaaaggccattgtgtgcaaagcagaaaataggtactacaaggtaaaagatggagctaagcggtaggtaaggctaaaccttgtcagccattgttaaatattgaattgtatcctaagcacaactcagtggaaagcagttaaagttctttaattgggggaggcaatgaaggggtaataaaattggttatagaaatactgctctggctctagtgttgagaatgaattggagtagccagagtagattcaagaagactttagtaagattattccaacaggccaggacctgttatagggtggtggcaatggagagagatggacagaatggagagtgtatttaggaggtaaaaatgacagaacttggtgatgcactgaatgtgaaatggggaaggtgtctaggaggactactaggtttatggtttgcgtattagggtggatgatagcagtttcatttactgagacagggagccctggcagagtacccagcttttagagtgggtagggggaaggggagagtgcatctggtgttgggcattttgaagtgatttacatacaacaaactgaaggtatctttaacactgagtccagcaggttagcatatttattcagcaagcattgcacctttttttgttgtttttggggtcttcaactcctggcctcgaatcctccctccttcccccgcctctcccagcctccgcctcccaaagtgctgggatttcaggagtgagccaccgcgcctggccagcatcgcgctgtttgtgcagtgtgccctgtgctaggtcttgcagtgggtaccagtagagacataaaagtacaaaagataattggacgtttagtagagtcctgaaagggggcgggataggaagatacctaaccataagaaaaaccagcaagagcggaaaaggagctagtcctccagatcaataagttaatcacttatgtttgtgattccctgcattttgggtgattctctgtcgaggtcctcttaagtccagacttttgatataatctgcagtttgcgccatttggattcctgaagcatctttacaagccacctacattccttatggagctgtggcacaacagcaagcccacgatgtctcaccggattaataaaaatataggcgctcacgcttttgtttaccgatatagtatctcctcctcccctcactccatcaacccccacgcgacacaactttccggaagtaagcaaaatccgttatcaaggtgaaactccggggaccaggctccacagctgccataaactggatggcacgttagaagccggtgggtgtaggtgaggcacgctggcgcccgcgggcccttctccagccgctacccagtgggaatccgcggggctgaagccccgaaaccaggctgagcgtcccagagcgcaacctccctttcccccagcagcgccggcgccgcagaagccgcgtgtccccaggcgcactcccccaaggtgaacccccgccccccacggaggcggctgggtcgcgggtctgggcggggcgctccggacgccctcccgccgctgcgcacccctcccgcgagctgccagctccctcggcctctccacccaaaactggcccaaccgccaatcgtctgcctctcacctcctacagcaggtgacccatggccaatcgccaggggtctctttgccaggagccgccagggccagccaatcggggcgacccctccgccggggaggggacgggaaaggggtggggggtgaagggggtgaagggggtgtcccgggggacgggctgaacctcagtcaggaccgcctgcaccgcagtccggggatcgggtcgaggggagaagaaaaaggggtgctcgggagcagcccccggctacctcccctggaggcacagagggcgggggccttggcgaatggctttcttgctggccacttgcggagtgagtagaccccgagggtctgggagaggggccggcccctacccctgagtccccggggtcccggccgccaggccggagcgcgaatgtcgtgctcaccctgcctccttcccgccgccccctgggggtttggattcaggatttgttcctagtgtccaagattttgataagaaacttacagaagctgatgcttacctacaaatcttgattgaacaattaaagctttttgatgacaagcttcaaaactgcaaagaagatgaacagagaaagaaaattgaaactctcaaagagacaacaaatagcatggtagaatcaattaaacactgcattgtgttgctgcagattgccaaaagtactattaatcccgtagatgcaatatatcaacctagtcctttggaacctgtgatcagcacaatgccttcccagactgtgttacctccagaacctgttcagttgtgtaagtcagagcagcgtccatcttccctaccagttggacctgtgttggctaccttgggacatcatcagactcctacaccaaatagtacaggcagtggccattcaccaccgagtagcagtctcacttctccaagccacgtgaacttgtctccaaatacagtcccagagttctcttactccagcagtgaagatgaattttatgatgctgatgaattccatcaaagtggctcatccccaaagcgcttaatagattcttctggatctgcctcagtcctgacacacagcagctcgggaaatagtctaaaacgcccagataccacagaatcacttaattcttccttgtccaatggaacaagtgatgctgacctgtttgattcacatgatgacagagatgatgatgcggaggcagggtctgtggaggagcacaagagcgttatcatgcatctcttgtcgcaggttagacttggaatggatcttactaaggtagttcttccaacgtttattcttgaaagaagatctcttttagaaatgtatgcagacttttttgcacatccggacctgtttgtgagcattagtgaccagaaggatcccaaggatcgaatggttcaggttgtgaaatggtacctctcagcctttcatgcgggaaggaaaggatcagttgccaaaaagccatacaatcccattttgggcgagatttttcagtgtcattggacattaccaaatgatactgaagagaacacagaactagtttcagaaggaccagttccctgggtttccaaaaacagtgtaacatttggtccagatatgagcattgaattgtatcttcttgttaaaacactcagcataaaaggctgaaatgggtggatgatgggaaacctgctcagccacaaatgttagtcgagc

SEQ ID NO: 735121 - DNA, 16814 bp, Homo sapiens
gtaagggtctttacatggtttccagatagttcattagttgttgctttctttttttgtctgttttctgttttttttttttaaataactgtggtatgatgtaataggaacttataatttctgagttgcttatttttcctttacagttatagtaaagttatactcatttattttctcctgctttctgcagagtaaaatactgatttttgtctagaaacaagacagtgcaagacaatgttgaaagtgaaattctatgttaaaatatgccagatttattttaagaatttaatatctgtagtcagttatcaatacaaccaaattacataattatgcatgataataggtaaatactgagaagttcacctcattttcttgttaaaggatttggctattaccgtatgtgtcagttagtactcttttgtatggtagtgaaagaaaactcaacccaaactgattcatgaagaagaaagtaaatctggttagatgtggtttgaattaggtaattcatgtcatgaggactcagatctcccatctctatttctacgttccacttttgcattggcttcattttcggttaggttctcccttggtggtggtaaggtggttgtagcaatgtcagcctcccatttttggaaccgagtccataggaggctattctttctagaccttaataggagtaacacaattattgctcatcaccctagctttggccatgtgtcaaatcctgaccagtcacaatttcacagtcatagattctaccctggagctgggatgttactggcctcactagaaacacattgctgatagggtagaaggtgtgttcatcctacccaacccgacccgcaccaaagtcagaatagggaaaaacagatgttgggtgacatgcaactaacgtctgccgtactacactgaagatatttttctatgtttattctccagtgaaagagcttatatttgtggtacataggggattttgttttaatttagaaaatttaattgtagaaaacatgttttataaccctttctctgtactttgttctatatcaggaattgacttgattagataaggtgacatagggtatcttaggccctacaagatagtaaaccccccatcacttgaaagtattcagtagaggcttaaaaaacattattaaaggatgtggttattaggggactttaagaaatgaatatgaaattgaagtaggaaatctttaagctactctgtgagttatgccttttaaaagcaatttgtaattcctgtagatttcttttaaatttaggcagtttcataaatgactatagcatcattttagcaaatttgtgatcctgtaagaggaggataagtgttttttgtttgtttgtttgttttttgtttttttgagacagagtctcactttgtaccccagaaagtaaatctagttagatgtggtttgtctcggctcactgcaacctccaccccgtgcgttctagcaattctcctgcctcagccaccacacctggcctaagaggggaggataagtgttttagtgatcatattagactgaatgtggcagatgagatttcccgcccccccattgttggttagactgacattcaacattcaacaagagccacctgcccttgtaggcatttctgccactatacccctacataaacctagagtgctattgcttacttgctttccttcaaatacattttttcatttgtggcctccacattcttgtgtgtgatgtcctttctctgtgaaatgtcttctaccctttttttcaaagcctagtttagaactgacctcttctatgaaccctctgccgactggcctttccttccccagtcccccaagttcaaaatgatctctttcctttgaatactatagtatttgcacaattcactatctccttatcatattcttcttgtttatttgttatcagctgatgttgacatcataagttcaggttcctaactagatccaatattggaatttttcagcttttgctaagaagagagcttgtatgtctttgggaataatgggcagaaaaagataactttgagaagtcttagacttctaatagctttgatatttaaaagtacatgtaatacaagaggtttttttcctacatttaatgcatggagaagataggacatttagaaatatggaattaatgttcatttgactggcaaaagattattttctcagatgtagtgaagtgtggtaaagaacttcactctagagccagaatgtctgtgtttgtatcccagagcccaccacttacatttaaccattaacattcaacttactgtctctgagtttcagtggcctcatctataaaatgaggataataagagtacctacttcatagagttgttttagtggttaaataaactaacgtaaacttgctagaacttgataaactaatattggatgagaactggttgaaataatgcctggctatagtaaaaacttggtaaatgttagttgccattacaatgcaactactgttcctaccattccctctgccagtgcctggtattcagtagcactcagtaaatgttagttaaatgaagaaataactgaaggaatgaatgaacaaatggttgatgtagagattgcttttccattgttgtttattgaatattttgagatgtataacatactgtctgttaggcactgtgggatgggcactcacggagctgtcttccaaaggggtataggagaggagacgcagtgatctcagcaacctacctttaaaacatatcctagtatctactgccatgttaggttctcttcttttgctttttttaaaaaaaaattctcacaaaactccccccacccacttcagtttatagatgaggaagctcctactacataatagtgcttcccagtctaattcttgacctcattgtatttatatgtcctttttttttttgacagagtctcactcattgcagtggcacaatcacagctcactgcaacctctgcctcccctgctcaagtgatcctcccacctcaacctcctgagtagctgggactacaggcatgcaccaccacgcctggctaatttttgtatttttttgtagagatgcggttttgccatgttggccaggctggtctcgaactcctgggctcaagccatctgcccactttggcctctgagagtgctgagattataggcatgagccaccattcccagccatgttttcctttttcattgaactttatctactttagccattaaactccactccattggtcttgtcattactaagagctgaaccacctgcaaaatattaagttaaaaagcgttttctttgacaacagttttcttttcttcatcttcctctatcactttacttctgaacttttattctctcattttgatctgacccctacttctctgtttttcctggccatttagtactttcttgttttgctcatcccatttcccagtggagaccttctggtctgctgctttatcactggttttgttagaagacatacaaatggcaaggaggtatatgaaaaggtgcctaacatcattgatcatcagagaaatgcagaccaaaactacaatgagatatcatttcaccccagttaaaatggctttttttttttttttccaaaagacaggcaataacaaagtactggtgaggatgtggagtaaagggaacccacatacactattagtaggaatgtaaattagtacagccactgtggagaacagtttgaaggttcctcaaaaaactaaaaatagagctaccatataatccagcaatcccactgctaggtatatatccaaaagaaaggcaatcaatatacggaagagatacctgcacacccaggtttattgcagcactattcacaatagccaagatttggaagcaacccaggtgtccaacagatgaatggataaagaaaacatggtatataaacacaatggaatactattcagctgtgaaaaagaatgaaatcctgtcatttgcaatcctgtcttgaatagaactggaggtcatgatgttaagtgaaataagacaggcacaaacttcacatgttctcacttatttgtgggagctaaaaattaaaacaatcgaactcatggagctagagaatagaattatggttaccagaggctggaagggtggttgggcgtataagtgtagggggagtggggatggttaatgggtacaaaaaaatgagaacgaataagatctacttgataacacaacagggtgactatagtcaacagtaattatacatttaaaaataactagaagagtataattagattgtaacacaaaagataaatgcttgaggtgatggatacctatttaccctgatgtgattattacttatttcatgcctatatcaaaatatttatactccaaaaatatatatacctactatgtacccacaaaaatttaaaaatttatatattgtttttgctatcacctttagaatttcttgtcattggatagttcgtctgtataccattctggtcttcattccccagggcccccgttgtctgatttttctgcttctagaactgttagaggtcacaaaagcaagatggttgtatctatcacaatttttgtctgactttaactgggtatctgttacgatttagtagtcatcttactgacttcttgttggtttccaattgaatcctcacagtagactgttttcattgtaatcagtatcgaattatagcctgttcccttcttcataaatgaaggctttcttcttcaacagttcttagtgacttcacctgtactttatttctctgctttgaatatttcgaagaaaacatattcttgctctttcccaaggttaacactacatacattaccttgaccacaggatgttttcttgcagattgtgacctaattccatcacccttcagcagcccccaccgttttcatggattcagctaaaccttctgtaagatgactctttttccccctaatctttatatctcttttgatatgtagctttagtctcactttttttccttttggattttgccagttagatgtctccctggaattccacttcagcatggctaagactaagcttgtcttctctttcctccccaaagcaaattgtaattaggatagactgaaggtgacagaagataactaagatcttcttcatcctttcggctcttatggaagctgaattccagtagtcattctaaatttgttgtatgtcagcttatggtatcttttcatgtctttacattcagccaaagaggaagttccttgaaggggagaccagagggcgtgctgtgcttcttaatcctctctttcttaaccagtaagaggcattcagtagatatctgatgatactgattaatagaggggaacttttcagattcttttttttttttaaccctagtaagctttagtacaaactaaatgctgagagattatcaagtaagggattgatcatcacaagaagactcaggatgttacatcctgtaggttttatagtttcctatattgtaaaaaatatgagttatagcagcttgtctggatgtcatacaggtataaaaatcagttttataaacttgagtaaattggggcccattttagaaaaaactcttgcaggctgtgaatgccaatatataagtaaagtattaagtataatgttatttaatgtgggcaaacataaagccaggtgtaaattttttaggtttaaaatcttatagaactatacatccaaaagaaaatttcaagttaaacataatacaaagcaatacaatctaaattaacattaatttaatgtgatgaatgatattgccttgctaaaagtgggtcactacttacaatgtgcaaatggtactcatcgttagggtatagattcttttaaactatgacatacgtacactaccatgtggaacgtgatgatgtgttctctgttctaactactgggaagacttccttggcatagcacatgccatggggtcagttggctttgacttcatatagatatgccatttacttggtcagtgtcacttctatgacaagtagtatgttgtgccagtttgattataagtacaaatatgggcaatgaagtaacttggttttaaggttgttactaagctgagtaacagtgtgtggctatacaaatttttataggctatcaggaatgaaaacacaggagattgttgtagattcaagtattttagattcaagtttgaagatgctcatgcagatgtttaactgagttgtatagacctttatgtttctttctttttctctttttttttttttgagacagagtcttgctctgtcacccaagctggagtgcaatggtgtgatctcggcttactgcaacctccgcctcccaggttcaagcaattctcctgcctcagcctcccaagtagctgggattacagatgtgcaccacgacgcccagctgattttttgtattttagtagaggcggggtctcaccatgttgtcaagatggtctcaatctcctgaccttgtgatccacccacctctgcctcccaaagtgctgtgattacaggcgtgagccaccgcgcctgactgacctttatgtttcttaactttatgctatacatcagttgatatttcaaaaatttaaatggtttctatgattattctttgggctaagaaattgggcattaattgtcctcatatgtatggtttttgtggctacttcatgtagattttatttttggtggttatcaaattggaatttttttttttttttttttttttgagacggagtctcattctgtttcccaggttggagtacagtggtgcaatctcagctcactgcagcctcgacctcccaggctcaagcagtcctctcacctcagccttctaagtagctgggactacaggcacgcaccaccacacctggctagttttttgtgtttttagtagagatggggttttaccctgttggccaggctggtcttgaactcctggcctcaagtgatccacctgcctcagcctcccaaagtgctgggattagaggcatgagccaccacacctggctgaaattggaatttcattggtactgcctgtaattttatgttaatttttttttttttttgtcgtcactagcttttatctaaagcccctagagagaaaggccatgataccttgtatacaaggttataagagtatacaagggaaagggagggctgaagggaacagggtgggctggtacaagcctcattagaaataccattgagtctgtgagtaaaacatcattatatgaaaaggagatgtggttttagggtggtccaattacttttgcaccagcctaataaaattacaagtcattatcaatagagacattgtaaaacctttttttttcccaaaagaagtatcaggtatgataattacatgtctgcccaactttcgttatagattaacataacttaattgtatttaaggtacaatttaggagagttgctgaaaaatgaatctttagtattgggatgccttgattctaccctcaatagctataatggattatgtgtctgagtagattaataaaaatcttttgagcatttttcttgaactacttcactgaagattagctttttgagcatccattttaatttctcagtatataaggatcggtttatcacaactgtattgttttccctggccttgttagattatattttcatatcatgtagaaaaataggtgtattcgttctcccttgaagtcctttgtctcccaaaggaaatggttgcaatacagatgtgtcacctcttccacaggtaaagtggaatggagaagtagccagttaaatagtgcatgctcaatttggaacatttagagcatacaggaaagttatttatttggtaaatattttttaagcatttactatgtttcatgcattgtactagttgtagaggatataattgaatacaactacatgtagcccttgactttatggaactagtctagtataaagatttaagattgcctggcatggtggctcacgccactaatcccagcactttgagaggccaaggcaggattgcttgaggccagaagtttaagagtagcttggtcaacataatgagactccatctctaaaataaatagatagatagatagatagatagatagatagatagatagatagaagtagttagacaacacaaagcagtttcactcatcttgtggcaaggagttatgtatttctaatcaaatttggcaactcaagcattttcaacaaaatctacatgttttttcagaataaagtgaccaacacagaatgttacctgtaaaaatcagagcaataattgctatctaaaataattttgaaaattaagtggtactgaaaggctcatatagcaaaaatatggcctcctgtcattgtactttcctacttcccagactcaccattttcaacattttttagtagtttattttgccattttatagcatagtacctgacattttatttattcaacagacatttcttaagtacctaatacatgccattccttgtttgaagggatgctaaggatacagtggtgaacaaggcgttgtggggttgtatagagggtattcattcctaaccttgaaccaaatatttctttctgttggataatgcattaaaaattgcaaacagtttacaaacttttggagcaatggtggccttgatcataaagtagggactgcttctaccgtatacatgcttggtggtgtatttgtgatatctggctaaagtttctacatggaaattgactgactttagttttgagacttctgggaaccagtcaggcaaaatagtgaaactgtgtatcctgtttccaagagttgtcttttaaggttatctgcttcattcatttggcctgacttgctaggcaaatgcctagggtaaatatgatttgattaactataacaacaacagcaacaacaacaactttattttttagagcagtttgaggttcacagcaaaattgagcagaatgtacagagattttccctatacccgcttcccctacgcatgtgcggcctcccctactatcaacatcccccaccagagtggtttgttacaattaatgaacctacattgacacatcattatcactcaaggtccgtagtttacattagagtccactcttggtgttgtgtatgggtttggtcgattttataatgacatttatccaccattatagtgtcatacatagtaattttgctaccctaaaaatccagtgtgctccacctgttcctccttccctcctccctcatccctggcaaccactgaactttttaacatctccatagttttgccttttccagaatgtcatatcattggaatcacacagtatgcagccttttcaaatgggcttctttccgttagtaataggcatttaagtttcatcctcatcttttcatggcttgatagctcatttctttccctccctcttttcttccctgtcttccttccttcctcttctttcctgtttcctctttcttcttccttttttaagagacaaggtgtctcactctgttgcccaggctggagtgcagtggcccaatcatagctcattgcagccttgaattcctgggctcaagtgatcctcctgcgttagcctcctgagtagctgggatcacaggctccagtcattttagtgctgaataatatttcattatctggatgtaccgcctattcattcacctactgaagaatatcttggttgcttctaagttttggcaattatgagtgaagttactataaacattgtatacaagttttatgtggatgtatgttgtcatctcccttgggcagataccaaggagtgccattgttggatcatatggtaaatatatctttagttttgtacagaattctaggttggtatttttttctctctcagtcctttattttatttggagacagtctcgctatgtcgcccaggctgccatacagtggtgccatctgggctcactgaaacctccacctcccaggttcaagcgattcttgtgccttggcctcccaagtagctgggattacaggagtgcgccaccacgcctgctaatttttgtatttttagtagagacagggttttgccatgttgcccaggctggtctcaaactcctgaccttaagtgattcacccacctcaatctcccaaaatcctgggattacaggcctgagctactgtgcctgatctctctcagtactttaaagaaatatttcattccacttttcttttttttcttctttttgagatggagtctcactctgtcgcctgggctggagtgcagtggcgcgatctcagctcactgccacctccgcctcctgggttcaagtgattctcctgcctcagcctcctgaatagctgagattacaggcgcccaccaccatgcccagctaattttttgcatttttagtagagacgggggttccaccatgttggccaggctggtctcgaactcctgacctcgtgattcgcacatctcggcctcccaaattgctgggattacaggtgtgagctaccacgcctggcccactcttcttgcttacatagtttctgaggagatgtcagatgtaatttttatttttgctcttctgtaggcaagttgagttttttccccctctagcttctctcaggatttttttctttatctttgattttcagtagtttgaaaattatatgcctagctgtcagggttttttgcttgtttgtttttgttttctcaggtgtgactccagaaaggttctaaagaggagctttacaatctcttctctggggtttatggagacttcctttacccttctgtgttagccccttaaagcactgcgtcaaccttaaaagggcacaggaaagggtgtctatgccatttttatgccatttatcctgcttggtgttttctgagctttcttcatctgcggtttaatgtctcacattaatttgtagaaattctctgtcattgtttcaaatttttcttcagttcttttctctgtttcttcttctggtgttcccattatgcttttgtggttgtcgtacagttattggatattttgttccaggcttttttttttccagtctttttttccttttgcttctcggttttgtaggtgtctgttgagatactctcaagtgcagatattctttcctcagctttgtctagtttactaataagcccattaaaggcagtcttcatttctgttacagtctttttgatcagtagcatttcttttttattctttcttaaaatttctgtctttctgcttacattgcccatctgttcttgcatggtttctactttgtccattagagttcttaggatatttatcataattatttcaaatttctggtgtaacaattccaacatccctgcaacatccaagtctagtttcgatgcttactgtgtctcttccagctgtgttttttcctatttaatatgtcttataattttttcttgatagccatacatgatgcattaggtaacagaaactgctgtgagtggacctttagtaatgtggtggtaaggtgtgcatggaggggaaacattttcagtctgttagtgaacttttgtcaacttcacatgtgcttctcaagtccatcctgtaagtgggagagtagggctagagaggactgaagttgggtatatattaaatactttctcctacaaagaagcctagaggggacgcattaggggattttttttcccccagtattcactgtgatgacccttattgagctcctggaggtaaaactcacaaaactgtggttctcccccctgcccatattactacatgtccctggagtttatatctttcagacttgtctgcactgagcttccaccaatttgtcaaatacagatcaggtttccctaccacccgtgcagttgaaaacccacatacaacttttgactcctccagagcttaactactcatagcctgctattgactggaagccttgccaataacataaacagttgattaatacatattttatatgttttctgtattatatattgtattcttacaataaagagaaaagaagatgttattaagaaaatcataaggaagataaaatatatttactgttcattaagtggttcccatgggtgctggttcccatggaggttgccccttgtgagtttttgctcagggaagttgtgattctctatatttgcctgttggtctcctaatttgggagtcatcagttttccctgtgacctcacttctcttacagagttaagaacagttgttggtttttcagtttgttcagtgttttacatgttgttagaacacagtggtacttctaagtttcttaacatgctagatcagaaacctgaagtctcacctaatttggctttttatattttttcttcttttttttcttccattgctaccaaagcatttttcatctgtgtctggggtgacattagagcagaatgtgatttctaggtaaacattattgggctccctagcagaaaaatttttgaaagtagtacatgaattctgtataattaaaattttcttttcatcttaataggtataggtaataggcacggcctattttttttttgctcaacagtctaaaatagtaatttaatcacctaatagccttagttatatagttgaaagaagagttggaaatctgattcatgggttggaaatcacctgtcacatatgagttttaggcactggtcactttattttgaaacagctttggggttttttcctttttcaactcataataggctttaacagcttttagttttgtttctgtttttttaacagcatgagttgccaaatttggttatagcttcttggtacaagatgggtaaatttgctttgtgttgtgtaattactttttattttaaatgctacctcttttatgaacactaactttacactaagattaggaaaatgagaattgcatgtctgcaacaaatagctatctgtagtattaaattgtgaaaatgtagactttggattggagctggcatctcttaatatgtaattgtaacatagagtaaataagtattttgtcccttgtagggtcaaacagtacagtgcatgggcagaattagagatgtaggcttttttttttttttttttttttactggcttagagaaccgtttgatcagctaatatggaattaagtccctagggctgcccaggcacaacattaactgctattaaaggaaaatttaaaagagtattagtgaaggttaaatactgaccatggacatctggcaaaattgatgttttttttcccctccaccattgtttatagtttattgttatttatcagagaattaatgtttattttcagaatctattaccataagaaatctgtttgaggacttcgtatgtgccaggaattctactaaataatgatataatgctgaacagaattagataggatcctcacttcgttaagcttacagtctagtggtatagatcaacattaatcaaagaataacacaaatagaaagcagagcagtggttcatgggattgactgtagagaagcatgagggaagttcccaggtgatggaaaatactttatttcttaatcgtggtggttacatgtgtgcatatgtttatgaaaatatattgtacatttaaagtggatacattttatcacatgtaaattatgactctataaagttaattaaaaagaataactcaggtaaggtggtgtgtgcgcctgtagtcccagctatttctgaggcaggaagatcacttgagcccaggagtttgagttcagcatgggcaacatgagacctgtgagactttgtctctaaaaaaatttaaataaataactaagataaatgtaaaattacagctgtagtaagttctacaaaggagagttacatgggctatgacgatgtaagatagcaagaactgacattggcagggaggaaatgatgatgagtagaagtaaataagtgaagtgtggggattgatgtcaaggggacagtataaaagaaataacagcatgcgccaaggccctaaaattggaaagtccttggcaaattaaaggagtttgaaaaaggccattgtgtgcaaagcagaaaataggtactacaaggtaaaagatggagctaagcggtaggtaaggctaaaccttgtcagccattgttaaatattgaattgtatcctaagcacaactcagtggaaagcagttaaagttctttaattgggggaggcaatgaaggggtaataaaattggttatagaaatactgctctggctctagtgttgagaatgaattggagtagccagagtagattcaagaagactttagtaagattattccaacaggccaggacctgttatagggtggtggcaatggagagagatggacagaatggagagtgtatttaggaggtaaaaatgacagaacttggtgatgcactgaatgtgaaatggggaaggtgtctaggaggactactaggtttatggtttgcgtattagggtggatgatagcagtttcatttactgagacagggagccctggcagagtacccagcttttagagtgggtagggggaaggggagagtgcatctggtgttgggcattttgaagtgatttacatacaacaaactgaaggtatctttaacactgagtccagcaggttagcatatttattcagcaagcattgcacctttttttgttgtttttggggtcttcaactcctggcctcgaatcctccctccttcccccgcctctcccagcctccgcctcccaaagtgctgggatttcaggagtgagccaccgcgcctggccagcatcgcgctgtttgtgcagtgtgccctgtgctaggtcttgcagtgggtaccagtagagacataaaagtacaaaagataattggacgtttagtagagtcctgaaagggggcgggataggaagatacctaaccataagaaaaaccagcaagagcggaaaaggagctagtcctccagatcaataagttaatcacttatgtttgtgattccctgcattttgggtgattctctgtcgaggtcctcttaagtccagacttttgatataatctgcagtttgcgccatttggattcctgaagcatctttacaagccacctacattccttatggagctgtggcacaacagcaagcccacgatgtctcaccggattaataaaaatataggcgctcacgcttttgtttaccgatatagtatctcctcctcccctcactccatcaacccccacgcgacacaactttccggaagtaagcaaaatccgttatcaaggtgaaactccggggaccaggctccacagctgccataaactggatggcacgttagaagccggtgggtgtaggtgaggcacgctggcgcccgcgggcccttctccagccgctacccagtgggaatccgcggggctgaagccccgaaaccaggctgagcgtcccagagcgcaacctccctttcccccagcagcgccggcgccgcagaagccgcgtgtccccaggcgcactcccccaaggtgaacccccgccccccacggaggcggctgggtcgcgggtctgggcggggcgctccggacgccctcccgccgctgcgcacccctcccgcgagctgccagctccctcggcctctccacccaaaactggcccaaccgccaatcgtctgcctctcacctcctacagcaggtgacccatggccaatcgccaggggtctctttgccaggagccgccagggccagccaatcggggcgacccctccgccggggaggggacgggaaaggggtggggggtgaagggggtgaagggggtgtcccgggggacgggctgaacctcagtcaggaccgcctgcaccgcagtccggggatcgggtcgaggggagaagaaaaaggggtgctcgggagcagcccccggctacctcccctggaggcacagagggcgggggccttggcgaatggctttcttgctggccacttgcggagtgagtagaccccgagggtctgggagaggggccggcccctacccctgagtccccggggtcccggccgccaggccggagcgcgaatgtcgtgctcaccctgcctccttcccgccgccccctgggggtttggattcaggatttgttcctagtgtccaagattttgataagaaacttacagaagctgatgcttacctacaaatcttgattgaacaattaaagctttttgatgacaagcttcaaaactgcaaagaagatgaacagagaaagaaaattgaaactctcaaagagacaacaaatagcatggtagaatcaattaaacactgcattgtgttgctgcagattgccaaaagtactattaatcccgtagatgcaatatatcaacctagtcctttggaacctgtgatcagcacaatgccttcccagactgtgttacctccagaacctgttcagttgtgtaagtcagagcagcgtccatcttccctaccagttggacctgtgttggctaccttgggacatcatcagactcctacaccaaatagtacaggcagtggccattcaccaccgagtagcagtctcacttctccaagccacgtgaacttgtctccaaatacagtcccagagttctcttactccagcagtgaagatgaattttatgatgctgatgaattccatcaaagtggctcatccccaaagcgcttaatagattcttctggatctgcctcagtcctgacacacagcagctcgggaaatagtctaaaacgcccagataccacagaatcacttaattcttccttgtccaatggaacaagtgatgctgacctgtttgattcacatgatgacagagatgatgatgcggaggcagggtctgcttcagtttcgtcgacgcggccgc

SEQ ID NO: 735122 - DNA, 18799 bp, Homo sapiens
gtaagggtctttacatggtttccagatagttcattagttgttgctttctttttttgtctgttttctgttttttttttttaaataactgtggtatgatgtaataggaacttataatttctgagttgcttatttttcctttacagttatagtaaagttatactcatttattttctcctgctttctgcagagtaaaatactgatttttgtctagaaacaagacagtgcaagacaatgttgaaagtgaaattctatgttaaaatatgccagatttattttaagaatttaatatctgtagtcagttatcaatacaaccaaattacataattatgcatgataataggtaaatactgagaagttcacctcattttcttgttaaaggatttggctattaccgtatgtgtcagttagtactcttttgtatggtagtgaaagaaaactcaacccaaactgattcatgaagaagaaagtaaatctggttagatgtggtttgaattaggtaattcatgtcatgaggactcagatctcccatctctatttctacgttccacttttgcattggcttcattttcggttaggttctcccttggtggtggtaaggtggttgtagcaatgtcagcctcccatttttggaaccgagtccataggaggctattctttctagaccttaataggagtaacacaattattgctcatcaccctagctttggccatgtgtcaaatcctgaccagtcacaatttcacagtcatagattctaccctggagctgggatgttactggcctcactagaaacacattgctgatagggtagaaggtgtgttcatcctacccaacccgacccgcaccaaagtcagaatagggaaaaacagatgttgggtgacatgcaactaacgtctgccgtactacactgaagatatttttctatgtttattctccagtgaaagagcttatatttgtggtacataggggattttgttttaatttagaaaatttaattgtagaaaacatgttttataaccctttctctgtactttgttctatatcaggaattgacttgattagataaggtgacatagggtatcttaggccctacaagatagtaaaccccccatcacttgaaagtattcagtagaggcttaaaaaacattattaaaggatgtggttattaggggactttaagaaatgaatatgaaattgaagtaggaaatctttaagctactctgtgagttatgccttttaaaagcaatttgtaattcctgtagatttcttttaaatttaggcagtttcataaatgactatagcatcattttagcaaatttgtgatcctgtaagaggaggataagtgttttttgtttgtttgtttgttttttgtttttttgagacagagtctcactttgtaccccagaaagtaaatctagttagatgtggtttgtctcggctcactgcaacctccaccccgtgcgttctagcaattctcctgcctcagccaccacacctggcctaagaggggaggataagtgttttagtgatcatattagactgaatgtggcagatgagatttcccgcccccccattgttggttagactgacattcaacattcaacaagagccacctgcccttgtaggcatttctgccactatacccctacataaacctagagtgctattgcttacttgctttccttcaaatacattttttcatttgtggcctccacattcttgtgtgtgatgtcctttctctgtgaaatgtcttctaccctttttttcaaagcctagtttagaactgacctcttctatgaaccctctgccgactggcctttccttccccagtcccccaagttcaaaatgatctctttcctttgaatactatagtatttgcacaattcactatctccttatcatattcttcttgtttatttgttatcagctgatgttgacatcataagttcaggttcctaactagatccaatattggaatttttcagcttttgctaagaagagagcttgtatgtctttgggaataatgggcagaaaaagataactttgagaagtcttagacttctaatagctttgatatttaaaagtacatgtaatacaagaggtttttttcctacatttaatgcatggagaagataggacatttagaaatatggaattaatgttcatttgactggcaaaagattattttctcagatgtagtgaagtgtggtaaagaacttcactctagagccagaatgtctgtgtttgtatcccagagcccaccacttacatttaaccattaacattcaacttactgtctctgagtttcagtggcctcatctataaaatgaggataataagagtacctacttcatagagttgttttagtggttaaataaactaacgtaaacttgctagaacttgataaactaatattggatgagaactggttgaaataatgcctggctatagtaaaaacttggtaaatgttagttgccattacaatgcaactactgttcctaccattccctctgccagtgcctggtattcagtagcactcagtaaatgttagttaaatgaagaaataactgaaggaatgaatgaacaaatggttgatgtagagattgcttttccattgttgtttattgaatattttgagatgtataacatactgtctgttaggcactgtgggatgggcactcacggagctgtcttccaaaggggtataggagaggagacgcagtgatctcagcaacctacctttaaaacatatcctagtatctactgccatgttaggttctcttcttttgctttttttaaaaaaaaattctcacaaaactccccccacccacttcagtttatagatgaggaagctcctactacataatagtgcttcccagtctaattcttgacctcattgtatttatatgtcctttttttttttgacagagtctcactcattgcagtggcacaatcacagctcactgcaacctctgcctcccctgctcaagtgatcctcccacctcaacctcctgagtagctgggactacaggcatgcaccaccacgcctggctaatttttgtatttttttgtagagatgcggttttgccatgttggccaggctggtctcgaactcctgggctcaagccatctgcccactttggcctctgagagtgctgagattataggcatgagccaccattcccagccatgttttcctttttcattgaactttatctactttagccattaaactccactccattggtcttgtcattactaagagctgaaccacctgcaaaatattaagttaaaaagcgttttctttgacaacagttttcttttcttcatcttcctctatcactttacttctgaacttttattctctcattttgatctgacccctacttctctgtttttcctggccatttagtactttcttgttttgctcatcccatttcccagtggagaccttctggtctgctgctttatcactggttttgttagaagacatacaaatggcaaggaggtatatgaaaaggtgcctaacatcattgatcatcagagaaatgcagaccaaaactacaatgagatatcatttcaccccagttaaaatggctttttttttttttttccaaaagacaggcaataacaaagtactggtgaggatgtggagtaaagggaacccacatacactattagtaggaatgtaaattagtacagccactgtggagaacagtttgaaggttcctcaaaaaactaaaaatagagctaccatataatccagcaatcccactgctaggtatatatccaaaagaaaggcaatcaatatacggaagagatacctgcacacccaggtttattgcagcactattcacaatagccaagatttggaagcaacccaggtgtccaacagatgaatggataaagaaaacatggtatataaacacaatggaatactattcagctgtgaaaaagaatgaaatcctgtcatttgcaatcctgtcttgaatagaactggaggtcatgatgttaagtgaaataagacaggcacaaacttcacatgttctcacttatttgtgggagctaaaaattaaaacaatcgaactcatggagctagagaatagaattatggttaccagaggctggaagggtggttgggcgtataagtgtagggggagtggggatggttaatgggtacaaaaaaatgagaacgaataagatctacttgataacacaacagggtgactatagtcaacagtaattatacatttaaaaataactagaagagtataattagattgtaacacaaaagataaatgcttgaggtgatggatacctatttaccctgatgtgattattacttatttcatgcctatatcaaaatatttatactccaaaaatatatatacctactatgtacccacaaaaatttaaaaatttatatattgtttttgctatcacctttagaatttcttgtcattggatagttcgtctgtataccattctggtcttcattccccagggcccccgttgtctgatttttctgcttctagaactgttagaggtcacaaaagcaagatggttgtatctatcacaatttttgtctgactttaactgggtatctgttacgatttagtagtcatcttactgacttcttgttggtttccaattgaatcctcacagtagactgttttcattgtaatcagtatcgaattatagcctgttcccttcttcataaatgaaggctttcttcttcaacagttcttagtgacttcacctgtactttatttctctgctttgaatatttcgaagaaaacatattcttgctctttcccaaggttaacactacatacattaccttgaccacaggatgttttcttgcagattgtgacctaattccatcacccttcagcagcccccaccgttttcatggattcagctaaaccttctgtaagatgactctttttccccctaatctttatatctcttttgatatgtagctttagtctcactttttttccttttggattttgccagttagatgtctccctggaattccacttcagcatggctaagactaagcttgtcttctctttcctccccaaagcaaattgtaattaggatagactgaaggtgacagaagataactaagatcttcttcatcctttcggctcttatggaagctgaattccagtagtcattctaaatttgttgtatgtcagcttatggtatcttttcatgtctttacattcagccaaagaggaagttccttgaaggggagaccagagggcgtgctgtgcttcttaatcctctctttcttaaccagtaagaggcattcagtagatatctgatgatactgattaatagaggggaacttttcagattcttttttttttttaaccctagtaagctttagtacaaactaaatgctgagagattatcaagtaagggattgatcatcacaagaagactcaggatgttacatcctgtaggttttatagtttcctatattgtaaaaaatatgagttatagcagcttgtctggatgtcatacaggtataaaaatcagttttataaacttgagtaaattggggcccattttagaaaaaactcttgcaggctgtgaatgccaatatataagtaaagtattaagtataatgttatttaatgtgggcaaacataaagccaggtgtaaattttttaggtttaaaatcttatagaactatacatccaaaagaaaatttcaagttaaacataatacaaagcaatacaatctaaattaacattaatttaatgtgatgaatgatattgccttgctaaaagtgggtcactacttacaatgtgcaaatggtactcatcgttagggtatagattcttttaaactatgacatacgtacactaccatgtggaacgtgatgatgtgttctctgttctaactactgggaagacttccttggcatagcacatgccatggggtcagttggctttgacttcatatagatatgccatttacttggtcagtgtcacttctatgacaagtagtatgttgtgccagtttgattataagtacaaatatgggcaatgaagtaacttggttttaaggttgttactaagctgagtaacagtgtgtggctatacaaatttttataggctatcaggaatgaaaacacaggagattgttgtagattcaagtattttagattcaagtttgaagatgctcatgcagatgtttaactgagttgtatagacctttatgtttctttctttttctctttttttttttttgagacagagtcttgctctgtcacccaagctggagtgcaatggtgtgatctcggcttactgcaacctccgcctcccaggttcaagcaattctcctgcctcagcctcccaagtagctgggattacagatgtgcaccacgacgcccagctgattttttgtattttagtagaggcggggtctcaccatgttgtcaagatggtctcaatctcctgaccttgtgatccacccacctctgcctcccaaagtgctgtgattacaggcgtgagccaccgcgcctgactgacctttatgtttcttaactttatgctatacatcagttgatatttcaaaaatttaaatggtttctatgattattctttgggctaagaaattgggcattaattgtcctcatatgtatggtttttgtggctacttcatgtagattttatttttggtggttatcaaattggaatttttttttttttttttttttttgagacggagtctcattctgtttcccaggttggagtacagtggtgcaatctcagctcactgcagcctcgacctcccaggctcaagcagtcctctcacctcagccttctaagtagctgggactacaggcacgcaccaccacacctggctagttttttgtgtttttagtagagatggggttttaccctgttggccaggctggtcttgaactcctggcctcaagtgatccacctgcctcagcctcccaaagtgctgggattagaggcatgagccaccacacctggctgaaattggaatttcattggtactgcctgtaattttatgttaatttttttttttttttgtcgtcactagcttttatctaaagcccctagagagaaaggccatgataccttgtatacaaggttataagagtatacaagggaaagggagggctgaagggaacagggtgggctggtacaagcctcattagaaataccattgagtctgtgagtaaaacatcattatatgaaaaggagatgtggttttagggtggtccaattacttttgcaccagcctaataaaattacaagtcattatcaatagagacattgtaaaacctttttttttcccaaaagaagtatcaggtatgataattacatgtctgcccaactttcgttatagattaacataacttaattgtatttaaggtacaatttaggagagttgctgaaaaatgaatctttagtattgggatgccttgattctaccctcaatagctataatggattatgtgtctgagtagattaataaaaatcttttgagcatttttcttgaactacttcactgaagattagctttttgagcatccattttaatttctcagtatataaggatcggtttatcacaactgtattgttttccctggccttgttagattatattttcatatcatgtagaaaaataggtgtattcgttctcccttgaagtcctttgtctcccaaaggaaatggttgcaatacagatgtgtcacctcttccacaggtaaagtggaatggagaagtagccagttaaatagtgcatgctcaatttggaacatttagagcatacaggaaagttatttatttggtaaatattttttaagcatttactatgtttcatgcattgtactagttgtagaggatataattgaatacaactacatgtagcccttgactttatggaactagtctagtataaagatttaagattgcctggcatggtggctcacgccactaatcccagcactttgagaggccaaggcaggattgcttgaggccagaagtttaagagtagcttggtcaacataatgagactccatctctaaaataaatagatagatagatagatagatagatagatagatagatagatagaagtagttagacaacacaaagcagtttcactcatcttgtggcaaggagttatgtatttctaatcaaatttggcaactcaagcattttcaacaaaatctacatgttttttcagaataaagtgaccaacacagaatgttacctgtaaaaatcagagcaataattgctatctaaaataattttgaaaattaagtggtactgaaaggctcatatagcaaaaatatggcctcctgtcattgtactttcctacttcccagactcaccattttcaacattttttagtagtttattttgccattttatagcatagtacctgacattttatttattcaacagacatttcttaagtacctaatacatgccattccttgtttgaagggatgctaaggatacagtggtgaacaaggcgttgtggggttgtatagagggtattcattcctaaccttgaaccaaatatttctttctgttggataatgcattaaaaattgcaaacagtttacaaacttttggagcaatggtggccttgatcataaagtagggactgcttctaccgtatacatgcttggtggtgtatttgtgatatctggctaaagtttctacatggaaattgactgactttagttttgagacttctgggaaccagtcaggcaaaatagtgaaactgtgtatcctgtttccaagagttgtcttttaaggttatctgcttcattcatttggcctgacttgctaggcaaatgcctagggtaaatatgatttgattaactataacaacaacagcaacaacaacaactttattttttagagcagtttgaggttcacagcaaaattgagcagaatgtacagagattttccctatacccgcttcccctacgcatgtgcggcctcccctactatcaacatcccccaccagagtggtttgttacaattaatgaacctacattgacacatcattatcactcaaggtccgtagtttacattagagtccactcttggtgttgtgtatgggtttggtcgattttataatgacatttatccaccattatagtgtcatacatagtaattttgctaccctaaaaatccagtgtgctccacctgttcctccttccctcctccctcatccctggcaaccactgaactttttaacatctccatagttttgccttttccagaatgtcatatcattggaatcacacagtatgcagccttttcaaatgggcttctttccgttagtaataggcatttaagtttcatcctcatcttttcatggcttgatagctcatttctttccctccctcttttcttccctgtcttccttccttcctcttctttcctgtttcctctttcttcttccttttttaagagacaaggtgtctcactctgttgcccaggctggagtgcagtggcccaatcatagctcattgcagccttgaattcctgggctcaagtgatcctcctgcgttagcctcctgagtagctgggatcacaggctccagtcattttagtgctgaataatatttcattatctggatgtaccgcctattcattcacctactgaagaatatcttggttgcttctaagttttggcaattatgagtgaagttactataaacattgtatacaagttttatgtggatgtatgttgtcatctcccttgggcagataccaaggagtgccattgttggatcatatggtaaatatatctttagttttgtacagaattctaggttggtatttttttctctctcagtcctttattttatttggagacagtctcgctatgtcgcccaggctgccatacagtggtgccatctgggctcactgaaacctccacctcccaggttcaagcgattcttgtgccttggcctcccaagtagctgggattacaggagtgcgccaccacgcctgctaatttttgtatttttagtagagacagggttttgccatgttgcccaggctggtctcaaactcctgaccttaagtgattcacccacctcaatctcccaaaatcctgggattacaggcctgagctactgtgcctgatctctctcagtactttaaagaaatatttcattccacttttcttttttttcttctttttgagatggagtctcactctgtcgcctgggctggagtgcagtggcgcgatctcagctcactgccacctccgcctcctgggttcaagtgattctcctgcctcagcctcctgaatagctgagattacaggcgcccaccaccatgcccagctaattttttgcatttttagtagagacgggggttccaccatgttggccaggctggtctcgaactcctgacctcgtgattcgcacatctcggcctcccaaattgctgggattacaggtgtgagctaccacgcctggcccactcttcttgcttacatagtttctgaggagatgtcagatgtaatttttatttttgctcttctgtaggcaagttgagttttttccccctctagcttctctcaggatttttttctttatctttgattttcagtagtttgaaaattatatgcctagctgtcagggttttttgcttgtttgtttttgttttctcaggtgtgactccagaaaggttctaaagaggagctttacaatctcttctctggggtttatggagacttcctttacccttctgtgttagccccttaaagcactgcgtcaaccttaaaagggcacaggaaagggtgtctatgccatttttatgccatttatcctgcttggtgttttctgagctttcttcatctgcggtttaatgtctcacattaatttgtagaaattctctgtcattgtttcaaatttttcttcagttcttttctctgtttcttcttctggtgttcccattatgcttttgtggttgtcgtacagttattggatattttgttccaggcttttttttttccagtctttttttccttttgcttctcggttttgtaggtgtctgttgagatactctcaagtgcagatattctttcctcagctttgtctagtttactaataagcccattaaaggcagtcttcatttctgttacagtctttttgatcagtagcatttcttttttattctttcttaaaatttctgtctttctgcttacattgcccatctgttcttgcatggtttctactttgtccattagagttcttaggatatttatcataattatttcaaatttctggtgtaacaattccaacatccctgcaacatccaagtctagtttcgatgcttactgtgtctcttccagctgtgttttttcctatttaatatgtcttataattttttcttgatagccatacatgatgcattaggtaacagaaactgctgtgagtggacctttagtaatgtggtggtaaggtgtgcatggaggggaaacattttcagtctgttagtgaacttttgtcaacttcacatgtgcttctcaagtccatcctgtaagtgggagagtagggctagagaggactgaagttgggtatatattaaatactttctcctacaaagaagcctagaggggacgcattaggggattttttttcccccagtattcactgtgatgacccttattgagctcctggaggtaaaactcacaaaactgtggttctcccccctgcccatattactacatgtccctggagtttatatctttcagacttgtctgcactgagcttccaccaatttgtcaaatacagatcaggtttccctaccacccgtgcagttgaaaacccacatacaacttttgactcctccagagcttaactactcatagcctgctattgactggaagccttgccaataacataaacagttgattaatacatattttatatgttttctgtattatatattgtattcttacaataaagagaaaagaagatgttattaagaaaatcataaggaagataaaatatatttactgttcattaagtggttcccatgggtgctggttcccatggaggttgccccttgtgagtttttgctcagggaagttgtgattctctatatttgcctgttggtctcctaatttgggagtcatcagttttccctgtgacctcacttctcttacagagttaagaacagttgttggtttttcagtttgttcagtgttttacatgttgttagaacacagtggtacttctaagtttcttaacatgctagatcagaaacctgaagtctcacctaatttggctttttatattttttcttcttttttttcttccattgctaccaaagcatttttcatctgtgtctggggtgacattagagcagaatgtgatttctaggtaaacattattgggctccctagcagaaaaatttttgaaagtagtacatgaattctgtataattaaaattttcttttcatcttaataggtataggtaataggcacggcctattttttttttgctcaacagtctaaaatagtaatttaatcacctaatagccttagttatatagttgaaagaagagttggaaatctgattcatgggttggaaatcacctgtcacatatgagttttaggcactggtcactttattttgaaacagctttggggttttttcctttttcaactcataataggctttaacagcttttagttttgtttctgtttttttaacagcatgagttgccaaatttggttatagcttcttggtacaagatgggtaaatttgctttgtgttgtgtaattactttttattttaaatgctacctcttttatgaacactaactttacactaagattaggaaaatgagaattgcatgtctgcaacaaatagctatctgtagtattaaattgtgaaaatgtagactttggattggagctggcatctcttaatatgtaattgtaacatagagtaaataagtattttgtcccttgtagggtcaaacagtacagtgcatgggcagaattagagatgtaggcttttttttttttttttttttttactggcttagagaaccgtttgatcagctaatatggaattaagtccctagggctgcccaggcacaacattaactgctattaaaggaaaatttaaaagagtattagtgaaggttaaatactgaccatggacatctggcaaaattgatgttttttttcccctccaccattgtttatagtttattgttatttatcagagaattaatgtttattttcagaatctattaccataagaaatctgtttgaggacttcgtatgtgccaggaattctactaaataatgatataatgctgaacagaattagataggatcctcacttcgttaagcttacagtctagtggtatagatcaacattaatcaaagaataacacaaatagaaagcagagcagtggttcatgggattgactgtagagaagcatgagggaagttcccaggtgatggaaaatactttatttcttaatcgtggtggttacatgtgtgcatatgtttatgaaaatatattgtacatttaaagtggatacattttatcacatgtaaattatgactctataaagttaattaaaaagaataactcaggtaaggtggtgtgtgcgcctgtagtcccagctatttctgaggcaggaagatcacttgagcccaggagtttgagttcagcatgggcaacatgagacctgtgagactttgtctctaaaaaaatttaaataaataactaagataaatgtaaaattacagctgtagtaagttctacaaaggagagttacatgggctatgacgatgtaagatagcaagaactgacattggcagggaggaaatgatgatgagtagaagtaaataagtgaagtgtggggattgatgtcaaggggacagtataaaagaaataacagcatgcgccaaggccctaaaattggaaagtccttggcaaattaaaggagtttgaaaaaggccattgtgtgcaaagcagaaaataggtactacaaggtaaaagatggagctaagcggtaggtaaggctaaaccttgtcagccattgttaaatattgaattgtatcctaagcacaactcagtggaaagcagttaaagttctttaattgggggaggcaatgaaggggtaataaaattggttatagaaatactgctctggctctagtgttgagaatgaattggagtagccagagtagattcaagaagactttagtaagattattccaacaggccaggacctgttatagggtggtggcaatggagagagatggacagaatggagagtgtatttaggaggtaaaaatgacagaacttggtgatgcactgaatgtgaaatggggaaggtgtctaggaggactactaggtttatggtttgcgtattagggtggatgatagcagtttcatttactgagacagggagccctggcagagtacccagcttttagagtgggtagggggaaggggagagtgcatctggtgttgggcattttgaagtgatttacatacaacaaactgaaggtatctttaacactgagtccagcaggttagcatatttattcagcaagcattgcacctttttttgttgtttttggggtcttcaactcctggcctcgaatcctccctccttcccccgcctctcccagcctccgcctcccaaagtgctgggatttcaggagtgagccaccgcgcctggccagcatcgcgctgtttgtgcagtgtgccctgtgctaggtcttgcagtgggtaccagtagagacataaaagtacaaaagataattggacgtttagtagagtcctgaaagggggcgggataggaagatacctaaccataagaaaaaccagcaagagcggaaaaggagctagtcctccagatcaataagttaatcacttatgtttgtgattccctgcattttgggtgattctctgtcgaggtcctcttaagtccagacttttgatataatctgcagtttgcgccatttggattcctgaagcatctttacaagccacctacattccttatggagctgtggcacaacagcaagcccacgatgtctcaccggattaataaaaatataggcgctcacgcttttgtttaccgatatagtatctcctcctcccctcactccatcaacccccacgcgacacaactttccggaagtaagcaaaatccgttatcaaggtgaaactccggggaccaggctccacagctgccataaactggatggcacgttagaagccggtgggtgtaggtgaggcacgctggcgcccgcgggcccttctccagccgctacccagtgggaatccgcggggctgaagccccgaaaccaggctgagcgtcccagagcgcaacctccctttcccccagcagcgccggcgccgcagaagccgcgtgtccccaggcgcactcccccaaggtgaacccccgccccccacggaggcggctgggtcgcgggtctgggcggggcgctccggacgccctcccgccgctgcgcacccctcccgcgagctgccagctccctcggcctctccacccaaaactggcccaaccgccaatcgtctgcctctcacctcctacagcaggtgacccatggccaatcgccaggggtctctttgccaggagccgccagggccagccaatcggggcgacccctccgccggggaggggacgggaaaggggtggggggtgaagggggtgaagggggtgtcccgggggacgggctgaacctcagtcaggaccgcctgcaccgcagtccggggatcgggtcgaggggagaagaaaaaggggtgctcgggagcagcccccggctacctcccctggaggcacagagggcgggggccttggcgaatggctttcttgctggccacttgcggagtgagtagaccccgagggtctgggagaggggccggcccctacccctgagtccccggggtcccggccgccaggccggagcgcgaatgtcgtgctcaccctgcctccttcccgccgccccctgggctttttgatgacaagcttcaaaactgcaaagaagatgaacagagaaagaaaattgaaactctcaaagagacaacaaatagcatggtagaatcaattaaacactgcattgtgttgctgcagattgccaaagaccagagtaatgcggagaagcacgcagatggaatgataagtactattaatcccgtagatgcaatatatcaacctagtcctttggaacctgtgatcagcacaatgccttcccagactgtgttacctccagaacctgttcagttgtgtaagtcagagcagcgtccatcttccctaccagttggacctgtgttggctaccttgggacatcatcagactcctacaccaaatagtacaggcagtggccattcaccaccgagtagcagtctcacttctccaagccacgtgaacttgtctccaaatacagtcccagagttctcttactccagcagtgaagatgaattttatgatgctgatgaattccatcaaagtggctcatccccaaagcgcttaatagattcttctggatctgcctcagtcctgacacacagcagctcgggaaatagtctaaaacgcccagataccacagaatcacttaattcttccttgtccaatggaacaagtgatgctgacctgtttgattcacatgatgacagagatgatgatgcggaggcagggtctgtggaggagcacaagagcgttatcatgcatctcttgtcgcaggttagacttggaatggatcttactaaggtagttcttccaacgtttattcttgaaagaagatctcttttagaaatgtatgcagacttttttgcacatccggacctgtttgtgagcattagtgaccagaaggatcccaaggatcgaatggttcaggttgtgaaatggtacctctcagcctttcatgcgggaaggaaaggatcagttgccaaaaagccatacaatcccattttgggcgagatttttcagtgtcattggacattaccaaatgatactgaagagaacacagaactagtttcagaaggaccagttccctgggtttccaaaaacagtgtaacatttgtggctgagcaggtttcccatcatccacccatttcagccttttatgctgagtgttttaacaagaagatacaattcaatgctcatatctggaccaaatcaaaattccttgggatgtcaattggggtgcacaacatagggcagggctgtgtctcatgtctagactatgatgaacattacattctcacattccccaatggctatggaaggcaagtgtgtccatttcctctgatcagcagtagactctgctgttccttgagacatgccccttccccctcttcctcttaactgtcaaccttacctaaaaacttttgattttgcaggtctatcctcacagtgccctgggtggaattaggaggagaatgcaatattaattgttccaaaacaggctatagtgcaaatatcatcttccacactaaacccttctatgggggcaagaagcacagaattactgccgagattttgtaggtattttttctgccttagagctcttatgcttttctgaaataactgccttttgtcttgaactacagcttctggattaggagtgtgaaagaatggttctgtctttgtaagcgtgtttcacattttatgtgtcatgtcttttgctgaagtcccatatcagaagaagacctaaaacatatattcagagcagtcagaggtcattgataggtttccttcctaaaaacctgacttgcaatgttgaactaaaagaggccttcctaggttgcctagctaaaccagattatggatccctaatttattcttgccagattgaatgatgagctggtccttacagcagactttgtgacccctgcagcactgcctcctggtcctcacagctatccctttttctgtgcctttgctggggaaaaacagtaaccatcacattttgcacgcatctggcttgcttccacttgacactcttgggtcacgtgcagatgactgtgccagtcagtggaaagtctatagtgatggcaccatgactctctctgcctctggaacccttaactgggggggaaggggacagtgggaaagaaagtttcaggcgttgatagcagctctcctccctctgccctggtcatgtctcccttttctggcctctttcaatcctgtttatgccttgcccttcctaaccaggcctttgctgtgttgcttatcttctcacattccatagttgtgtgtccaagtagaggtctgttacggcttttgcagaatggatccttgctcagggaaagtattcacaccatctggcacagaggtccctttcaacctgaggatgaaagcctgcattatattcttaagcaaagccttccctgacccccagtgcccatgtaagctcaccacagcacttaccacctagaatttcaatggtggttacgtctctctccactacgctgtgaacagcttgaggatagggaatttgccaactctgttatggtccttgcacccagaataggacgttcttgcccaaacccaccattcttgggatctcaagttcataagcgtcctgttgaaggccctcattcttatagttagccctggggagtccagttctgttaagatgctttcatcaaaaacttcacagttgctcttctgtgctctactctgtagttgggccacactgagcagattctttggtagaattttcaacttgagactaacacaagtatttccttttctgttcag

SEQ ID NO: 735123 - DNA, 19195 bp, Homo sapiens
gtaagggtctttacatggtttccagatagttcattagttgttgctttctttttttgtctgttttctgttttttttttttaaataactgtggtatgatgtaataggaacttataatttctgagttgcttatttttcctttacagttatagtaaagttatactcatttattttctcctgctttctgcagagtaaaatactgatttttgtctagaaacaagacagtgcaagacaatgttgaaagtgaaattctatgttaaaatatgccagatttattttaagaatttaatatctgtagtcagttatcaatacaaccaaattacataattatgcatgataataggtaaatactgagaagttcacctcattttcttgttaaaggatttggctattaccgtatgtgtcagttagtactcttttgtatggtagtgaaagaaaactcaacccaaactgattcatgaagaagaaagtaaatctggttagatgtggtttgaattaggtaattcatgtcatgaggactcagatctcccatctctatttctacgttccacttttgcattggcttcattttcggttaggttctcccttggtggtggtaaggtggttgtagcaatgtcagcctcccatttttggaaccgagtccataggaggctattctttctagaccttaataggagtaacacaattattgctcatcaccctagctttggccatgtgtcaaatcctgaccagtcacaatttcacagtcatagattctaccctggagctgggatgttactggcctcactagaaacacattgctgatagggtagaaggtgtgttcatcctacccaacccgacccgcaccaaagtcagaatagggaaaaacagatgttgggtgacatgcaactaacgtctgccgtactacactgaagatatttttctatgtttattctccagtgaaagagcttatatttgtggtacataggggattttgttttaatttagaaaatttaattgtagaaaacatgttttataaccctttctctgtactttgttctatatcaggaattgacttgattagataaggtgacatagggtatcttaggccctacaagatagtaaaccccccatcacttgaaagtattcagtagaggcttaaaaaacattattaaaggatgtggttattaggggactttaagaaatgaatatgaaattgaagtaggaaatctttaagctactctgtgagttatgccttttaaaagcaatttgtaattcctgtagatttcttttaaatttaggcagtttcataaatgactatagcatcattttagcaaatttgtgatcctgtaagaggaggataagtgttttttgtttgtttgtttgttttttgtttttttgagacagagtctcactttgtaccccagaaagtaaatctagttagatgtggtttgtctcggctcactgcaacctccaccccgtgcgttctagcaattctcctgcctcagccaccacacctggcctaagaggggaggataagtgttttagtgatcatattagactgaatgtggcagatgagatttcccgcccccccattgttggttagactgacattcaacattcaacaagagccacctgcccttgtaggcatttctgccactatacccctacataaacctagagtgctattgcttacttgctttccttcaaatacattttttcatttgtggcctccacattcttgtgtgtgatgtcctttctctgtgaaatgtcttctaccctttttttcaaagcctagtttagaactgacctcttctatgaaccctctgccgactggcctttccttccccagtcccccaagttcaaaatgatctctttcctttgaatactatagtatttgcacaattcactatctccttatcatattcttcttgtttatttgttatcagctgatgttgacatcataagttcaggttcctaactagatccaatattggaatttttcagcttttgctaagaagagagcttgtatgtctttgggaataatgggcagaaaaagataactttgagaagtcttagacttctaatagctttgatatttaaaagtacatgtaatacaagaggtttttttcctacatttaatgcatggagaagataggacatttagaaatatggaattaatgttcatttgactggcaaaagattattttctcagatgtagtgaagtgtggtaaagaacttcactctagagccagaatgtctgtgtttgtatcccagagcccaccacttacatttaaccattaacattcaacttactgtctctgagtttcagtggcctcatctataaaatgaggataataagagtacctacttcatagagttgttttagtggttaaataaactaacgtaaacttgctagaacttgataaactaatattggatgagaactggttgaaataatgcctggctatagtaaaaacttggtaaatgttagttgccattacaatgcaactactgttcctaccattccctctgccagtgcctggtattcagtagcactcagtaaatgttagttaaatgaagaaataactgaaggaatgaatgaacaaatggttgatgtagagattgcttttccattgttgtttattgaatattttgagatgtataacatactgtctgttaggcactgtgggatgggcactcacggagctgtcttccaaaggggtataggagaggagacgcagtgatctcagcaacctacctttaaaacatatcctagtatctactgccatgttaggttctcttcttttgctttttttaaaaaaaaattctcacaaaactccccccacccacttcagtttatagatgaggaagctcctactacataatagtgcttcccagtctaattcttgacctcattgtatttatatgtcctttttttttttgacagagtctcactcattgcagtggcacaatcacagctcactgcaacctctgcctcccctgctcaagtgatcctcccacctcaacctcctgagtagctgggactacaggcatgcaccaccacgcctggctaatttttgtatttttttgtagagatgcggttttgccatgttggccaggctggtctcgaactcctgggctcaagccatctgcccactttggcctctgagagtgctgagattataggcatgagccaccattcccagccatgttttcctttttcattgaactttatctactttagccattaaactccactccattggtcttgtcattactaagagctgaaccacctgcaaaatattaagttaaaaagcgttttctttgacaacagttttcttttcttcatcttcctctatcactttacttctgaacttttattctctcattttgatctgacccctacttctctgtttttcctggccatttagtactttcttgttttgctcatcccatttcccagtggagaccttctggtctgctgctttatcactggttttgttagaagacatacaaatggcaaggaggtatatgaaaaggtgcctaacatcattgatcatcagagaaatgcagaccaaaactacaatgagatatcatttcaccccagttaaaatggctttttttttttttttccaaaagacaggcaataacaaagtactggtgaggatgtggagtaaagggaacccacatacactattagtaggaatgtaaattagtacagccactgtggagaacagtttgaaggttcctcaaaaaactaaaaatagagctaccatataatccagcaatcccactgctaggtatatatccaaaagaaaggcaatcaatatacggaagagatacctgcacacccaggtttattgcagcactattcacaatagccaagatttggaagcaacccaggtgtccaacagatgaatggataaagaaaacatggtatataaacacaatggaatactattcagctgtgaaaaagaatgaaatcctgtcatttgcaatcctgtcttgaatagaactggaggtcatgatgttaagtgaaataagacaggcacaaacttcacatgttctcacttatttgtgggagctaaaaattaaaacaatcgaactcatggagctagagaatagaattatggttaccagaggctggaagggtggttgggcgtataagtgtagggggagtggggatggttaatgggtacaaaaaaatgagaacgaataagatctacttgataacacaacagggtgactatagtcaacagtaattatacatttaaaaataactagaagagtataattagattgtaacacaaaagataaatgcttgaggtgatggatacctatttaccctgatgtgattattacttatttcatgcctatatcaaaatatttatactccaaaaatatatatacctactatgtacccacaaaaatttaaaaatttatatattgtttttgctatcacctttagaatttcttgtcattggatagttcgtctgtataccattctggtcttcattccccagggcccccgttgtctgatttttctgcttctagaactgttagaggtcacaaaagcaagatggttgtatctatcacaatttttgtctgactttaactgggtatctgttacgatttagtagtcatcttactgacttcttgttggtttccaattgaatcctcacagtagactgttttcattgtaatcagtatcgaattatagcctgttcccttcttcataaatgaaggctttcttcttcaacagttcttagtgacttcacctgtactttatttctctgctttgaatatttcgaagaaaacatattcttgctctttcccaaggttaacactacatacattaccttgaccacaggatgttttcttgcagattgtgacctaattccatcacccttcagcagcccccaccgttttcatggattcagctaaaccttctgtaagatgactctttttccccctaatctttatatctcttttgatatgtagctttagtctcactttttttccttttggattttgccagttagatgtctccctggaattccacttcagcatggctaagactaagcttgtcttctctttcctccccaaagcaaattgtaattaggatagactgaaggtgacagaagataactaagatcttcttcatcctttcggctcttatggaagctgaattccagtagtcattctaaatttgttgtatgtcagcttatggtatcttttcatgtctttacattcagccaaagaggaagttccttgaaggggagaccagagggcgtgctgtgcttcttaatcctctctttcttaaccagtaagaggcattcagtagatatctgatgatactgattaatagaggggaacttttcagattcttttttttttttaaccctagtaagctttagtacaaactaaatgctgagagattatcaagtaagggattgatcatcacaagaagactcaggatgttacatcctgtaggttttatagtttcctatattgtaaaaaatatgagttatagcagcttgtctggatgtcatacaggtataaaaatcagttttataaacttgagtaaattggggcccattttagaaaaaactcttgcaggctgtgaatgccaatatataagtaaagtattaagtataatgttatttaatgtgggcaaacataaagccaggtgtaaattttttaggtttaaaatcttatagaactatacatccaaaagaaaatttcaagttaaacataatacaaagcaatacaatctaaattaacattaatttaatgtgatgaatgatattgccttgctaaaagtgggtcactacttacaatgtgcaaatggtactcatcgttagggtatagattcttttaaactatgacatacgtacactaccatgtggaacgtgatgatgtgttctctgttctaactactgggaagacttccttggcatagcacatgccatggggtcagttggctttgacttcatatagatatgccatttacttggtcagtgtcacttctatgacaagtagtatgttgtgccagtttgattataagtacaaatatgggcaatgaagtaacttggttttaaggttgttactaagctgagtaacagtgtgtggctatacaaatttttataggctatcaggaatgaaaacacaggagattgttgtagattcaagtattttagattcaagtttgaagatgctcatgcagatgtttaactgagttgtatagacctttatgtttctttctttttctctttttttttttttgagacagagtcttgctctgtcacccaagctggagtgcaatggtgtgatctcggcttactgcaacctccgcctcccaggttcaagcaattctcctgcctcagcctcccaagtagctgggattacagatgtgcaccacgacgcccagctgattttttgtattttagtagaggcggggtctcaccatgttgtcaagatggtctcaatctcctgaccttgtgatccacccacctctgcctcccaaagtgctgtgattacaggcgtgagccaccgcgcctgactgacctttatgtttcttaactttatgctatacatcagttgatatttcaaaaatttaaatggtttctatgattattctttgggctaagaaattgggcattaattgtcctcatatgtatggtttttgtggctacttcatgtagattttatttttggtggttatcaaattggaatttttttttttttttttttttttgagacggagtctcattctgtttcccaggttggagtacagtggtgcaatctcagctcactgcagcctcgacctcccaggctcaagcagtcctctcacctcagccttctaagtagctgggactacaggcacgcaccaccacacctggctagttttttgtgtttttagtagagatggggttttaccctgttggccaggctggtcttgaactcctggcctcaagtgatccacctgcctcagcctcccaaagtgctgggattagaggcatgagccaccacacctggctgaaattggaatttcattggtactgcctgtaattttatgttaatttttttttttttttgtcgtcactagcttttatctaaagcccctagagagaaaggccatgataccttgtatacaaggttataagagtatacaagggaaagggagggctgaagggaacagggtgggctggtacaagcctcattagaaataccattgagtctgtgagtaaaacatcattatatgaaaaggagatgtggttttagggtggtccaattacttttgcaccagcctaataaaattacaagtcattatcaatagagacattgtaaaacctttttttttcccaaaagaagtatcaggtatgataattacatgtctgcccaactttcgttatagattaacataacttaattgtatttaaggtacaatttaggagagttgctgaaaaatgaatctttagtattgggatgccttgattctaccctcaatagctataatggattatgtgtctgagtagattaataaaaatcttttgagcatttttcttgaactacttcactgaagattagctttttgagcatccattttaatttctcagtatataaggatcggtttatcacaactgtattgttttccctggccttgttagattatattttcatatcatgtagaaaaataggtgtattcgttctcccttgaagtcctttgtctcccaaaggaaatggttgcaatacagatgtgtcacctcttccacaggtaaagtggaatggagaagtagccagttaaatagtgcatgctcaatttggaacatttagagcatacaggaaagttatttatttggtaaatattttttaagcatttactatgtttcatgcattgtactagttgtagaggatataattgaatacaactacatgtagcccttgactttatggaactagtctagtataaagatttaagattgcctggcatggtggctcacgccactaatcccagcactttgagaggccaaggcaggattgcttgaggccagaagtttaagagtagcttggtcaacataatgagactccatctctaaaataaatagatagatagatagatagatagatagatagatagatagatagaagtagttagacaacacaaagcagtttcactcatcttgtggcaaggagttatgtatttctaatcaaatttggcaactcaagcattttcaacaaaatctacatgttttttcagaataaagtgaccaacacagaatgttacctgtaaaaatcagagcaataattgctatctaaaataattttgaaaattaagtggtactgaaaggctcatatagcaaaaatatggcctcctgtcattgtactttcctacttcccagactcaccattttcaacattttttagtagtttattttgccattttatagcatagtacctgacattttatttattcaacagacatttcttaagtacctaatacatgccattccttgtttgaagggatgctaaggatacagtggtgaacaaggcgttgtggggttgtatagagggtattcattcctaaccttgaaccaaatatttctttctgttggataatgcattaaaaattgcaaacagtttacaaacttttggagcaatggtggccttgatcataaagtagggactgcttctaccgtatacatgcttggtggtgtatttgtgatatctggctaaagtttctacatggaaattgactgactttagttttgagacttctgggaaccagtcaggcaaaatagtgaaactgtgtatcctgtttccaagagttgtcttttaaggttatctgcttcattcatttggcctgacttgctaggcaaatgcctagggtaaatatgatttgattaactataacaacaacagcaacaacaacaactttattttttagagcagtttgaggttcacagcaaaattgagcagaatgtacagagattttccctatacccgcttcccctacgcatgtgcggcctcccctactatcaacatcccccaccagagtggtttgttacaattaatgaacctacattgacacatcattatcactcaaggtccgtagtttacattagagtccactcttggtgttgtgtatgggtttggtcgattttataatgacatttatccaccattatagtgtcatacatagtaattttgctaccctaaaaatccagtgtgctccacctgttcctccttccctcctccctcatccctggcaaccactgaactttttaacatctccatagttttgccttttccagaatgtcatatcattggaatcacacagtatgcagccttttcaaatgggcttctttccgttagtaataggcatttaagtttcatcctcatcttttcatggcttgatagctcatttctttccctccctcttttcttccctgtcttccttccttcctcttctttcctgtttcctctttcttcttccttttttaagagacaaggtgtctcactctgttgcccaggctggagtgcagtggcccaatcatagctcattgcagccttgaattcctgggctcaagtgatcctcctgcgttagcctcctgagtagctgggatcacaggctccagtcattttagtgctgaataatatttcattatctggatgtaccgcctattcattcacctactgaagaatatcttggttgcttctaagttttggcaattatgagtgaagttactataaacattgtatacaagttttatgtggatgtatgttgtcatctcccttgggcagataccaaggagtgccattgttggatcatatggtaaatatatctttagttttgtacagaattctaggttggtatttttttctctctcagtcctttattttatttggagacagtctcgctatgtcgcccaggctgccatacagtggtgccatctgggctcactgaaacctccacctcccaggttcaagcgattcttgtgccttggcctcccaagtagctgggattacaggagtgcgccaccacgcctgctaatttttgtatttttagtagagacagggttttgccatgttgcccaggctggtctcaaactcctgaccttaagtgattcacccacctcaatctcccaaaatcctgggattacaggcctgagctactgtgcctgatctctctcagtactttaaagaaatatttcattccacttttcttttttttcttctttttgagatggagtctcactctgtcgcctgggctggagtgcagtggcgcgatctcagctcactgccacctccgcctcctgggttcaagtgattctcctgcctcagcctcctgaatagctgagattacaggcgcccaccaccatgcccagctaattttttgcatttttagtagagacgggggttccaccatgttggccaggctggtctcgaactcctgacctcgtgattcgcacatctcggcctcccaaattgctgggattacaggtgtgagctaccacgcctggcccactcttcttgcttacatagtttctgaggagatgtcagatgtaatttttatttttgctcttctgtaggcaagttgagttttttccccctctagcttctctcaggatttttttctttatctttgattttcagtagtttgaaaattatatgcctagctgtcagggttttttgcttgtttgtttttgttttctcaggtgtgactccagaaaggttctaaagaggagctttacaatctcttctctggggtttatggagacttcctttacccttctgtgttagccccttaaagcactgcgtcaaccttaaaagggcacaggaaagggtgtctatgccatttttatgccatttatcctgcttggtgttttctgagctttcttcatctgcggtttaatgtctcacattaatttgtagaaattctctgtcattgtttcaaatttttcttcagttcttttctctgtttcttcttctggtgttcccattatgcttttgtggttgtcgtacagttattggatattttgttccaggcttttttttttccagtctttttttccttttgcttctcggttttgtaggtgtctgttgagatactctcaagtgcagatattctttcctcagctttgtctagtttactaataagcccattaaaggcagtcttcatttctgttacagtctttttgatcagtagcatttcttttttattctttcttaaaatttctgtctttctgcttacattgcccatctgttcttgcatggtttctactttgtccattagagttcttaggatatttatcataattatttcaaatttctggtgtaacaattccaacatccctgcaacatccaagtctagtttcgatgcttactgtgtctcttccagctgtgttttttcctatttaatatgtcttataattttttcttgatagccatacatgatgcattaggtaacagaaactgctgtgagtggacctttagtaatgtggtggtaaggtgtgcatggaggggaaacattttcagtctgttagtgaacttttgtcaacttcacatgtgcttctcaagtccatcctgtaagtgggagagtagggctagagaggactgaagttgggtatatattaaatactttctcctacaaagaagcctagaggggacgcattaggggattttttttcccccagtattcactgtgatgacccttattgagctcctggaggtaaaactcacaaaactgtggttctcccccctgcccatattactacatgtccctggagtttatatctttcagacttgtctgcactgagcttccaccaatttgtcaaatacagatcaggtttccctaccacccgtgcagttgaaaacccacatacaacttttgactcctccagagcttaactactcatagcctgctattgactggaagccttgccaataacataaacagttgattaatacatattttatatgttttctgtattatatattgtattcttacaataaagagaaaagaagatgttattaagaaaatcataaggaagataaaatatatttactgttcattaagtggttcccatgggtgctggttcccatggaggttgccccttgtgagtttttgctcagggaagttgtgattctctatatttgcctgttggtctcctaatttgggagtcatcagttttccctgtgacctcacttctcttacagagttaagaacagttgttggtttttcagtttgttcagtgttttacatgttgttagaacacagtggtacttctaagtttcttaacatgctagatcagaaacctgaagtctcacctaatttggctttttatattttttcttcttttttttcttccattgctaccaaagcatttttcatctgtgtctggggtgacattagagcagaatgtgatttctaggtaaacattattgggctccctagcagaaaaatttttgaaagtagtacatgaattctgtataattaaaattttcttttcatcttaataggtataggtaataggcacggcctattttttttttgctcaacagtctaaaatagtaatttaatcacctaatagccttagttatatagttgaaagaagagttggaaatctgattcatgggttggaaatcacctgtcacatatgagttttaggcactggtcactttattttgaaacagctttggggttttttcctttttcaactcataataggctttaacagcttttagttttgtttctgtttttttaacagcatgagttgccaaatttggttatagcttcttggtacaagatgggtaaatttgctttgtgttgtgtaattactttttattttaaatgctacctcttttatgaacactaactttacactaagattaggaaaatgagaattgcatgtctgcaacaaatagctatctgtagtattaaattgtgaaaatgtagactttggattggagctggcatctcttaatatgtaattgtaacatagagtaaataagtattttgtcccttgtagggtcaaacagtacagtgcatgggcagaattagagatgtaggcttttttttttttttttttttttactggcttagagaaccgtttgatcagctaatatggaattaagtccctagggctgcccaggcacaacattaactgctattaaaggaaaatttaaaagagtattagtgaaggttaaatactgaccatggacatctggcaaaattgatgttttttttcccctccaccattgtttatagtttattgttatttatcagagaattaatgtttattttcagaatctattaccataagaaatctgtttgaggacttcgtatgtgccaggaattctactaaataatgatataatgctgaacagaattagataggatcctcacttcgttaagcttacagtctagtggtatagatcaacattaatcaaagaataacacaaatagaaagcagagcagtggttcatgggattgactgtagagaagcatgagggaagttcccaggtgatggaaaatactttatttcttaatcgtggtggttacatgtgtgcatatgtttatgaaaatatattgtacatttaaagtggatacattttatcacatgtaaattatgactctataaagttaattaaaaagaataactcaggtaaggtggtgtgtgcgcctgtagtcccagctatttctgaggcaggaagatcacttgagcccaggagtttgagttcagcatgggcaacatgagacctgtgagactttgtctctaaaaaaatttaaataaataactaagataaatgtaaaattacagctgtagtaagttctacaaaggagagttacatgggctatgacgatgtaagatagcaagaactgacattggcagggaggaaatgatgatgagtagaagtaaataagtgaagtgtggggattgatgtcaaggggacagtataaaagaaataacagcatgcgccaaggccctaaaattggaaagtccttggcaaattaaaggagtttgaaaaaggccattgtgtgcaaagcagaaaataggtactacaaggtaaaagatggagctaagcggtaggtaaggctaaaccttgtcagccattgttaaatattgaattgtatcctaagcacaactcagtggaaagcagttaaagttctttaattgggggaggcaatgaaggggtaataaaattggttatagaaatactgctctggctctagtgttgagaatgaattggagtagccagagtagattcaagaagactttagtaagattattccaacaggccaggacctgttatagggtggtggcaatggagagagatggacagaatggagagtgtatttaggaggtaaaaatgacagaacttggtgatgcactgaatgtgaaatggggaaggtgtctaggaggactactaggtttatggtttgcgtattagggtggatgatagcagtttcatttactgagacagggagccctggcagagtacccagcttttagagtgggtagggggaaggggagagtgcatctggtgttgggcattttgaagtgatttacatacaacaaactgaaggtatctttaacactgagtccagcaggttagcatatttattcagcaagcattgcacctttttttgttgtttttggggtcttcaactcctggcctcgaatcctccctccttcccccgcctctcccagcctccgcctcccaaagtgctgggatttcaggagtgagccaccgcgcctggccagcatcgcgctgtttgtgcagtgtgccctgtgctaggtcttgcagtgggtaccagtagagacataaaagtacaaaagataattggacgtttagtagagtcctgaaagggggcgggataggaagatacctaaccataagaaaaaccagcaagagcggaaaaggagctagtcctccagatcaataagttaatcacttatgtttgtgattccctgcattttgggtgattctctgtcgaggtcctcttaagtccagacttttgatataatctgcagtttgcgccatttggattcctgaagcatctttacaagccacctacattccttatggagctgtggcacaacagcaagcccacgatgtctcaccggattaataaaaatataggcgctcacgcttttgtttaccgatatagtatctcctcctcccctcactccatcaacccccacgcgacacaactttccggaagtaagcaaaatccgttatcaaggtgaaactccggggaccaggctccacagctgccataaactggatggcacgttagaagccggtgggtgtaggtgaggcacgctggcgcccgcgggcccttctccagccgctacccagtgggaatccgcggggctgaagccccgaaaccaggctgagcgtcccagagcgcaacctccctttcccccagcagcgccggcgccgcagaagccgcgtgtccccaggcgcactcccccaaggtgaacccccgccccccacggaggcggctgggtcgcgggtctgggcggggcgctccggacgccctcccgccgctgcgcacccctcccgcgagctgccagctccctcggcctctccacccaaaactggcccaaccgccaatcgtctgcctctcacctcctacagcaggtgacccatggccaatcgccaggggtctctttgccaggagccgccagggccagccaatcggggcgacccctccgccggggaggggacgggaaaggggtggggggtgaagggggtgaagggggtgtcccgggggacgggctgaacctcagtcaggaccgcctgcaccgcagtccggggatcgggtcgaggggagaagaaaaaggggtgctcgggagcagcccccggctacctcccctggaggcacagagggcgggggccttggcgaatggctttcttgctggccacttgcggagtgagtagaccccgagggtctgggagaggggccggcccctacccctgagtccccggggtcccggccgccaggccggagcgcgaatgtcgtgctcaccctgcctccttcccgccgccccctgggctttttgatgacaagcttcaaaactgcaaagaagatgaacagagaaagaaaattgaaactctcaaagagacaacaaatagcatggtagaatcaattaaacactgcattgtgttgctgcagattgccaaagaccagagtaatgcggagaagcacgcagatggaatgataagtactattaatcccgtagatgcaatatatcaacctagtcctttggaacctgtgatcagcacaatgccttcccagactgtgttacctccagaacctgttcagttgtgtaagtcagagcagcgtccatcttccctaccagttggacctgtgttggctaccttgggacatcatcagactcctacaccaaatagtacaggcagtggccattcaccaccgagtagcagtctcacttctccaagccacgtgaacttgtctccaaatacagtcccagagttctcttactccagcagtgaagatgaattttatgatgctgatgaattccatcaaagtggctcatccccaaagcgcttaatagattcttctggatctgcctcagtcctgacacacagcagctcgggaaatagtctaaaacgcccagataccacagaatcacttaattcttccttgtccaatggaacaagtgatgctgacctgtttgattcacatgatgacagagatgatgatgcggaggcagggtctgtggaggagcacaagagcgttatcatgcatctcttgtcgcaggttagacttggaatggatcttactaaggtagttcttccaacgtttattcttgaaagaagatctcttttagaaatgtatgcagacttttttgcacatccggacctgtttgtgagcattagtgaccagaaggatcccaaggatcgaatggttcaggttgtgaaatggtacctctcagcctttcatgcgggaaggaaaggatcagttgccaaaaagccatacaatcccattttgggcgagatttttcagtgtcattggacattaccaaatgatactgaagagaacacagaactagtttcagaaggaccagttccctgggtttccaaaaacagtgtaacatttgtggctgagcaggtttcccatcatccacccatttcagccttttatgctgagtgttttaacaagaagatacaattcaatgctcatatctggaccaaatcaaaattccttgggatgtcaattggggtgcacaacatagggcagggctgtgtctcatgtctagactatgatgaacattacattctcacattccccaatggctatggaaggcaagtgtgtccatttcctctgatcagcagtagactctgctgttccttgagacatgccccttccccctcttcctcttaactgtcaaccttacctaaaaacttttgattttgcaggtctatcctcacagtgccctgggtggaattaggaggagaatgcaatattaattgttccaaaacaggctatagtgcaaatatcatcttccacactaaacccttctatgggggcaagaagcacagaattactgccgagattttttctccaaatgacaagaagtctttttgctcaattgaaggggaatggaatggtgtgatgtatgcaaaatatgcaacaggggaaaatacagtctttgtagataccaagaagttgcctataatcaagaagaaagtgaggaagttggaagatcagaacgagtatgaatcccgcagcctttggaaggatgtcactttcaacttaaaaatcagagacattgatgcagcaactgaagcaaagcacaggcttgaagaaagacaaagagcagaagcccgagaaaggaaggagaaggaaattcagtgggagacaaggttatttcatgaagatggagaatgctgggtttatgatgaaccattactgaaacgtcttggtgctgccaagcattaggttggaagatgcaaagtttatacctgatgatcagggcagtaggcataattcagcaacaaacaatcttcctttgggagaaacctgttcattccaatcttctaattacagtggttcctatctcagggatactggactttctgacgcagatgaacaattaaggggaaaagcttcccttttccctctgtggcagttacgattttgacttcagtcctgagaaaaacttcaggttttgaaaatcagatgatgtcttctccttttccaaacaccacacgttgaaagcatttataaatccaagtctgaaactctgcgctctagtactgctgttaagatacacaacttgtttcttagttcatataatctcgggatacacacacacacacacatatatatacacacacatacgtatacacacacatacatatatataaatatacctgatgccagatttttttcataaatattctgcctactgtaaatatgggttcctctgagttgttttagaaaattagcgcaatgtattaaaatcaagtgttaggaaatttcatggtcttacctacaataacttttattttggaattgaactattattaaattgtatctaatcctggattacagtttaattaattattcttagtgcttaaggcttcataaagtaatttttccaacctttttttaaaaagagcatcttttattatcttttatggttaaacttggaagccaattatttggcaaccttgaatacaagagctagcttttcaaagaaagacacttgaaataatggaggatccattcttttcctctgtcagattgtatgttctgtctttagcccctgccaggcaattccccagaatcttcacttaactcatattgcacatgtagggctgcctaccaacattttatccaaaaatgttttattgccttagagggtttgggaagagtgtgtatttatagatccccaccccacagtgaacaaaaatagatagatagatagaataaaatgaatgccacagcagcagatggctcattctgaagggaaatacagaactatatctatctatctatctatcatcttttttatttaaaaatacattaaaaaaacaggtattagtacctagcatttagttagttattcaatatactggttacgtaaggcctttcaagaagtagattctcagtctgagaggacacaggccagggcttctcaaagtgctgctgcaggctttctggtctcgcttggcc

SEQ ID NO: 735124 - DNA, 19237 bp, Homo sapiens
  misc_feature (19237)..(19237): n is a, c, g, or t
gtaagggtctttacatggtttccagatagttcattagttgttgctttctttttttgtctgttttctgttttttttttttaaataactgtggtatgatgtaataggaacttataatttctgagttgcttatttttcctttacagttatagtaaagttatactcatttattttctcctgctttctgcagagtaaaatactgatttttgtctagaaacaagacagtgcaagacaatgttgaaagtgaaattctatgttaaaatatgccagatttattttaagaatttaatatctgtagtcagttatcaatacaaccaaattacataattatgcatgataataggtaaatactgagaagttcacctcattttcttgttaaaggatttggctattaccgtatgtgtcagttagtactcttttgtatggtagtgaaagaaaactcaacccaaactgattcatgaagaagaaagtaaatctggttagatgtggtttgaattaggtaattcatgtcatgaggactcagatctcccatctctatttctacgttccacttttgcattggcttcattttcggttaggttctcccttggtggtggtaaggtggttgtagcaatgtcagcctcccatttttggaaccgagtccataggaggctattctttctagaccttaataggagtaacacaattattgctcatcaccctagctttggccatgtgtcaaatcctgaccagtcacaatttcacagtcatagattctaccctggagctgggatgttactggcctcactagaaacacattgctgatagggtagaaggtgtgttcatcctacccaacccgacccgcaccaaagtcagaatagggaaaaacagatgttgggtgacatgcaactaacgtctgccgtactacactgaagatatttttctatgtttattctccagtgaaagagcttatatttgtggtacataggggattttgttttaatttagaaaatttaattgtagaaaacatgttttataaccctttctctgtactttgttctatatcaggaattgacttgattagataaggtgacatagggtatcttaggccctacaagatagtaaaccccccatcacttgaaagtattcagtagaggcttaaaaaacattattaaaggatgtggttattaggggactttaagaaatgaatatgaaattgaagtaggaaatctttaagctactctgtgagttatgccttttaaaagcaatttgtaattcctgtagatttcttttaaatttaggcagtttcataaatgactatagcatcattttagcaaatttgtgatcctgtaagaggaggataagtgttttttgtttgtttgtttgttttttgtttttttgagacagagtctcactttgtaccccagaaagtaaatctagttagatgtggtttgtctcggctcactgcaacctccaccccgtgcgttctagcaattctcctgcctcagccaccacacctggcctaagaggggaggataagtgttttagtgatcatattagactgaatgtggcagatgagatttcccgcccccccattgttggttagactgacattcaacattcaacaagagccacctgcccttgtaggcatttctgccactatacccctacataaacctagagtgctattgcttacttgctttccttcaaatacattttttcatttgtggcctccacattcttgtgtgtgatgtcctttctctgtgaaatgtcttctaccctttttttcaaagcctagtttagaactgacctcttctatgaaccctctgccgactggcctttccttccccagtcccccaagttcaaaatgatctctttcctttgaatactatagtatttgcacaattcactatctccttatcatattcttcttgtttatttgttatcagctgatgttgacatcataagttcaggttcctaactagatccaatattggaatttttcagcttttgctaagaagagagcttgtatgtctttgggaataatgggcagaaaaagataactttgagaagtcttagacttctaatagctttgatatttaaaagtacatgtaatacaagaggtttttttcctacatttaatgcatggagaagataggacatttagaaatatggaattaatgttcatttgactggcaaaagattattttctcagatgtagtgaagtgtggtaaagaacttcactctagagccagaatgtctgtgtttgtatcccagagcccaccacttacatttaaccattaacattcaacttactgtctctgagtttcagtggcctcatctataaaatgaggataataagagtacctacttcatagagttgttttagtggttaaataaactaacgtaaacttgctagaacttgataaactaatattggatgagaactggttgaaataatgcctggctatagtaaaaacttggtaaatgttagttgccattacaatgcaactactgttcctaccattccctctgccagtgcctggtattcagtagcactcagtaaatgttagttaaatgaagaaataactgaaggaatgaatgaacaaatggttgatgtagagattgcttttccattgttgtttattgaatattttgagatgtataacatactgtctgttaggcactgtgggatgggcactcacggagctgtcttccaaaggggtataggagaggagacgcagtgatctcagcaacctacctttaaaacatatcctagtatctactgccatgttaggttctcttcttttgctttttttaaaaaaaaattctcacaaaactccccccacccacttcagtttatagatgaggaagctcctactacataatagtgcttcccagtctaattcttgacctcattgtatttatatgtcctttttttttttgacagagtctcactcattgcagtggcacaatcacagctcactgcaacctctgcctcccctgctcaagtgatcctcccacctcaacctcctgagtagctgggactacaggcatgcaccaccacgcctggctaatttttgtatttttttgtagagatgcggttttgccatgttggccaggctggtctcgaactcctgggctcaagccatctgcccactttggcctctgagagtgctgagattataggcatgagccaccattcccagccatgttttcctttttcattgaactttatctactttagccattaaactccactccattggtcttgtcattactaagagctgaaccacctgcaaaatattaagttaaaaagcgttttctttgacaacagttttcttttcttcatcttcctctatcactttacttctgaacttttattctctcattttgatctgacccctacttctctgtttttcctggccatttagtactttcttgttttgctcatcccatttcccagtggagaccttctggtctgctgctttatcactggttttgttagaagacatacaaatggcaaggaggtatatgaaaaggtgcctaacatcattgatcatcagagaaatgcagaccaaaactacaatgagatatcatttcaccccagttaaaatggctttttttttttttttccaaaagacaggcaataacaaagtactggtgaggatgtggagtaaagggaacccacatacactattagtaggaatgtaaattagtacagccactgtggagaacagtttgaaggttcctcaaaaaactaaaaatagagctaccatataatccagcaatcccactgctaggtatatatccaaaagaaaggcaatcaatatacggaagagatacctgcacacccaggtttattgcagcactattcacaatagccaagatttggaagcaacccaggtgtccaacagatgaatggataaagaaaacatggtatataaacacaatggaatactattcagctgtgaaaaagaatgaaatcctgtcatttgcaatcctgtcttgaatagaactggaggtcatgatgttaagtgaaataagacaggcacaaacttcacatgttctcacttatttgtgggagctaaaaattaaaacaatcgaactcatggagctagagaatagaattatggttaccagaggctggaagggtggttgggcgtataagtgtagggggagtggggatggttaatgggtacaaaaaaatgagaacgaataagatctacttgataacacaacagggtgactatagtcaacagtaattatacatttaaaaataactagaagagtataattagattgtaacacaaaagataaatgcttgaggtgatggatacctatttaccctgatgtgattattacttatttcatgcctatatcaaaatatttatactccaaaaatatatatacctactatgtacccacaaaaatttaaaaatttatatattgtttttgctatcacctttagaatttcttgtcattggatagttcgtctgtataccattctggtcttcattccccagggcccccgttgtctgatttttctgcttctagaactgttagaggtcacaaaagcaagatggttgtatctatcacaatttttgtctgactttaactgggtatctgttacgatttagtagtcatcttactgacttcttgttggtttccaattgaatcctcacagtagactgttttcattgtaatcagtatcgaattatagcctgttcccttcttcataaatgaaggctttcttcttcaacagttcttagtgacttcacctgtactttatttctctgctttgaatatttcgaagaaaacatattcttgctctttcccaaggttaacactacatacattaccttgaccacaggatgttttcttgcagattgtgacctaattccatcacccttcagcagcccccaccgttttcatggattcagctaaaccttctgtaagatgactctttttccccctaatctttatatctcttttgatatgtagctttagtctcactttttttccttttggattttgccagttagatgtctccctggaattccacttcagcatggctaagactaagcttgtcttctctttcctccccaaagcaaattgtaattaggatagactgaaggtgacagaagataactaagatcttcttcatcctttcggctcttatggaagctgaattccagtagtcattctaaatttgttgtatgtcagcttatggtatcttttcatgtctttacattcagccaaagaggaagttccttgaaggggagaccagagggcgtgctgtgcttcttaatcctctctttcttaaccagtaagaggcattcagtagatatctgatgatactgattaatagaggggaacttttcagattcttttttttttttaaccctagtaagctttagtacaaactaaatgctgagagattatcaagtaagggattgatcatcacaagaagactcaggatgttacatcctgtaggttttatagtttcctatattgtaaaaaatatgagttatagcagcttgtctggatgtcatacaggtataaaaatcagttttataaacttgagtaaattggggcccattttagaaaaaactcttgcaggctgtgaatgccaatatataagtaaagtattaagtataatgttatttaatgtgggcaaacataaagccaggtgtaaattttttaggtttaaaatcttatagaactatacatccaaaagaaaatttcaagttaaacataatacaaagcaatacaatctaaattaacattaatttaatgtgatgaatgatattgccttgctaaaagtgggtcactacttacaatgtgcaaatggtactcatcgttagggtatagattcttttaaactatgacatacgtacactaccatgtggaacgtgatgatgtgttctctgttctaactactgggaagacttccttggcatagcacatgccatggggtcagttggctttgacttcatatagatatgccatttacttggtcagtgtcacttctatgacaagtagtatgttgtgccagtttgattataagtacaaatatgggcaatgaagtaacttggttttaaggttgttactaagctgagtaacagtgtgtggctatacaaatttttataggctatcaggaatgaaaacacaggagattgttgtagattcaagtattttagattcaagtttgaagatgctcatgcagatgtttaactgagttgtatagacctttatgtttctttctttttctctttttttttttttgagacagagtcttgctctgtcacccaagctggagtgcaatggtgtgatctcggcttactgcaacctccgcctcccaggttcaagcaattctcctgcctcagcctcccaagtagctgggattacagatgtgcaccacgacgcccagctgattttttgtattttagtagaggcggggtctcaccatgttgtcaagatggtctcaatctcctgaccttgtgatccacccacctctgcctcccaaagtgctgtgattacaggcgtgagccaccgcgcctgactgacctttatgtttcttaactttatgctatacatcagttgatatttcaaaaatttaaatggtttctatgattattctttgggctaagaaattgggcattaattgtcctcatatgtatggtttttgtggctacttcatgtagattttatttttggtggttatcaaattggaatttttttttttttttttttttttgagacggagtctcattctgtttcccaggttggagtacagtggtgcaatctcagctcactgcagcctcgacctcccaggctcaagcagtcctctcacctcagccttctaagtagctgggactacaggcacgcaccaccacacctggctagttttttgtgtttttagtagagatggggttttaccctgttggccaggctggtcttgaactcctggcctcaagtgatccacctgcctcagcctcccaaagtgctgggattagaggcatgagccaccacacctggctgaaattggaatttcattggtactgcctgtaattttatgttaatttttttttttttttgtcgtcactagcttttatctaaagcccctagagagaaaggccatgataccttgtatacaaggttataagagtatacaagggaaagggagggctgaagggaacagggtgggctggtacaagcctcattagaaataccattgagtctgtgagtaaaacatcattatatgaaaaggagatgtggttttagggtggtccaattacttttgcaccagcctaataaaattacaagtcattatcaatagagacattgtaaaacctttttttttcccaaaagaagtatcaggtatgataattacatgtctgcccaactttcgttatagattaacataacttaattgtatttaaggtacaatttaggagagttgctgaaaaatgaatctttagtattgggatgccttgattctaccctcaatagctataatggattatgtgtctgagtagattaataaaaatcttttgagcatttttcttgaactacttcactgaagattagctttttgagcatccattttaatttctcagtatataaggatcggtttatcacaactgtattgttttccctggccttgttagattatattttcatatcatgtagaaaaataggtgtattcgttctcccttgaagtcctttgtctcccaaaggaaatggttgcaatacagatgtgtcacctcttccacaggtaaagtggaatggagaagtagccagttaaatagtgcatgctcaatttggaacatttagagcatacaggaaagttatttatttggtaaatattttttaagcatttactatgtttcatgcattgtactagttgtagaggatataattgaatacaactacatgtagcccttgactttatggaactagtctagtataaagatttaagattgcctggcatggtggctcacgccactaatcccagcactttgagaggccaaggcaggattgcttgaggccagaagtttaagagtagcttggtcaacataatgagactccatctctaaaataaatagatagatagatagatagatagatagatagatagatagatagaagtagttagacaacacaaagcagtttcactcatcttgtggcaaggagttatgtatttctaatcaaatttggcaactcaagcattttcaacaaaatctacatgttttttcagaataaagtgaccaacacagaatgttacctgtaaaaatcagagcaataattgctatctaaaataattttgaaaattaagtggtactgaaaggctcatatagcaaaaatatggcctcctgtcattgtactttcctacttcccagactcaccattttcaacattttttagtagtttattttgccattttatagcatagtacctgacattttatttattcaacagacatttcttaagtacctaatacatgccattccttgtttgaagggatgctaaggatacagtggtgaacaaggcgttgtggggttgtatagagggtattcattcctaaccttgaaccaaatatttctttctgttggataatgcattaaaaattgcaaacagtttacaaacttttggagcaatggtggccttgatcataaagtagggactgcttctaccgtatacatgcttggtggtgtatttgtgatatctggctaaagtttctacatggaaattgactgactttagttttgagacttctgggaaccagtcaggcaaaatagtgaaactgtgtatcctgtttccaagagttgtcttttaaggttatctgcttcattcatttggcctgacttgctaggcaaatgcctagggtaaatatgatttgattaactataacaacaacagcaacaacaacaactttattttttagagcagtttgaggttcacagcaaaattgagcagaatgtacagagattttccctatacccgcttcccctacgcatgtgcggcctcccctactatcaacatcccccaccagagtggtttgttacaattaatgaacctacattgacacatcattatcactcaaggtccgtagtttacattagagtccactcttggtgttgtgtatgggtttggtcgattttataatgacatttatccaccattatagtgtcatacatagtaattttgctaccctaaaaatccagtgtgctccacctgttcctccttccctcctccctcatccctggcaaccactgaactttttaacatctccatagttttgccttttccagaatgtcatatcattggaatcacacagtatgcagccttttcaaatgggcttctttccgttagtaataggcatttaagtttcatcctcatcttttcatggcttgatagctcatttctttccctccctcttttcttccctgtcttccttccttcctcttctttcctgtttcctctttcttcttccttttttaagagacaaggtgtctcactctgttgcccaggctggagtgcagtggcccaatcatagctcattgcagccttgaattcctgggctcaagtgatcctcctgcgttagcctcctgagtagctgggatcacaggctccagtcattttagtgctgaataatatttcattatctggatgtaccgcctattcattcacctactgaagaatatcttggttgcttctaagttttggcaattatgagtgaagttactataaacattgtatacaagttttatgtggatgtatgttgtcatctcccttgggcagataccaaggagtgccattgttggatcatatggtaaatatatctttagttttgtacagaattctaggttggtatttttttctctctcagtcctttattttatttggagacagtctcgctatgtcgcccaggctgccatacagtggtgccatctgggctcactgaaacctccacctcccaggttcaagcgattcttgtgccttggcctcccaagtagctgggattacaggagtgcgccaccacgcctgctaatttttgtatttttagtagagacagggttttgccatgttgcccaggctggtctcaaactcctgaccttaagtgattcacccacctcaatctcccaaaatcctgggattacaggcctgagctactgtgcctgatctctctcagtactttaaagaaatatttcattccacttttcttttttttcttctttttgagatggagtctcactctgtcgcctgggctggagtgcagtggcgcgatctcagctcactgccacctccgcctcctgggttcaagtgattctcctgcctcagcctcctgaatagctgagattacaggcgcccaccaccatgcccagctaattttttgcatttttagtagagacgggggttccaccatgttggccaggctggtctcgaactcctgacctcgtgattcgcacatctcggcctcccaaattgctgggattacaggtgtgagctaccacgcctggcccactcttcttgcttacatagtttctgaggagatgtcagatgtaatttttatttttgctcttctgtaggcaagttgagttttttccccctctagcttctctcaggatttttttctttatctttgattttcagtagtttgaaaattatatgcctagctgtcagggttttttgcttgtttgtttttgttttctcaggtgtgactccagaaaggttctaaagaggagctttacaatctcttctctggggtttatggagacttcctttacccttctgtgttagccccttaaagcactgcgtcaaccttaaaagggcacaggaaagggtgtctatgccatttttatgccatttatcctgcttggtgttttctgagctttcttcatctgcggtttaatgtctcacattaatttgtagaaattctctgtcattgtttcaaatttttcttcagttcttttctctgtttcttcttctggtgttcccattatgcttttgtggttgtcgtacagttattggatattttgttccaggcttttttttttccagtctttttttccttttgcttctcggttttgtaggtgtctgttgagatactctcaagtgcagatattctttcctcagctttgtctagtttactaataagcccattaaaggcagtcttcatttctgttacagtctttttgatcagtagcatttcttttttattctttcttaaaatttctgtctttctgcttacattgcccatctgttcttgcatggtttctactttgtccattagagttcttaggatatttatcataattatttcaaatttctggtgtaacaattccaacatccctgcaacatccaagtctagtttcgatgcttactgtgtctcttccagctgtgttttttcctatttaatatgtcttataattttttcttgatagccatacatgatgcattaggtaacagaaactgctgtgagtggacctttagtaatgtggtggtaaggtgtgcatggaggggaaacattttcagtctgttagtgaacttttgtcaacttcacatgtgcttctcaagtccatcctgtaagtgggagagtagggctagagaggactgaagttgggtatatattaaatactttctcctacaaagaagcctagaggggacgcattaggggattttttttcccccagtattcactgtgatgacccttattgagctcctggaggtaaaactcacaaaactgtggttctcccccctgcccatattactacatgtccctggagtttatatctttcagacttgtctgcactgagcttccaccaatttgtcaaatacagatcaggtttccctaccacccgtgcagttgaaaacccacatacaacttttgactcctccagagcttaactactcatagcctgctattgactggaagccttgccaataacataaacagttgattaatacatattttatatgttttctgtattatatattgtattcttacaataaagagaaaagaagatgttattaagaaaatcataaggaagataaaatatatttactgttcattaagtggttcccatgggtgctggttcccatggaggttgccccttgtgagtttttgctcagggaagttgtgattctctatatttgcctgttggtctcctaatttgggagtcatcagttttccctgtgacctcacttctcttacagagttaagaacagttgttggtttttcagtttgttcagtgttttacatgttgttagaacacagtggtacttctaagtttcttaacatgctagatcagaaacctgaagtctcacctaatttggctttttatattttttcttcttttttttcttccattgctaccaaagcatttttcatctgtgtctggggtgacattagagcagaatgtgatttctaggtaaacattattgggctccctagcagaaaaatttttgaaagtagtacatgaattctgtataattaaaattttcttttcatcttaataggtataggtaataggcacggcctattttttttttgctcaacagtctaaaatagtaatttaatcacctaatagccttagttatatagttgaaagaagagttggaaatctgattcatgggttggaaatcacctgtcacatatgagttttaggcactggtcactttattttgaaacagctttggggttttttcctttttcaactcataataggctttaacagcttttagttttgtttctgtttttttaacagcatgagttgccaaatttggttatagcttcttggtacaagatgggtaaatttgctttgtgttgtgtaattactttttattttaaatgctacctcttttatgaacactaactttacactaagattaggaaaatgagaattgcatgtctgcaacaaatagctatctgtagtattaaattgtgaaaatgtagactttggattggagctggcatctcttaatatgtaattgtaacatagagtaaataagtattttgtcccttgtagggtcaaacagtacagtgcatgggcagaattagagatgtaggcttttttttttttttttttttttactggcttagagaaccgtttgatcagctaatatggaattaagtccctagggctgcccaggcacaacattaactgctattaaaggaaaatttaaaagagtattagtgaaggttaaatactgaccatggacatctggcaaaattgatgttttttttcccctccaccattgtttatagtttattgttatttatcagagaattaatgtttattttcagaatctattaccataagaaatctgtttgaggacttcgtatgtgccaggaattctactaaataatgatataatgctgaacagaattagataggatcctcacttcgttaagcttacagtctagtggtatagatcaacattaatcaaagaataacacaaatagaaagcagagcagtggttcatgggattgactgtagagaagcatgagggaagttcccaggtgatggaaaatactttatttcttaatcgtggtggttacatgtgtgcatatgtttatgaaaatatattgtacatttaaagtggatacattttatcacatgtaaattatgactctataaagttaattaaaaagaataactcaggtaaggtggtgtgtgcgcctgtagtcccagctatttctgaggcaggaagatcacttgagcccaggagtttgagttcagcatgggcaacatgagacctgtgagactttgtctctaaaaaaatttaaataaataactaagataaatgtaaaattacagctgtagtaagttctacaaaggagagttacatgggctatgacgatgtaagatagcaagaactgacattggcagggaggaaatgatgatgagtagaagtaaataagtgaagtgtggggattgatgtcaaggggacagtataaaagaaataacagcatgcgccaaggccctaaaattggaaagtccttggcaaattaaaggagtttgaaaaaggccattgtgtgcaaagcagaaaataggtactacaaggtaaaagatggagctaagcggtaggtaaggctaaaccttgtcagccattgttaaatattgaattgtatcctaagcacaactcagtggaaagcagttaaagttctttaattgggggaggcaatgaaggggtaataaaattggttatagaaatactgctctggctctagtgttgagaatgaattggagtagccagagtagattcaagaagactttagtaagattattccaacaggccaggacctgttatagggtggtggcaatggagagagatggacagaatggagagtgtatttaggaggtaaaaatgacagaacttggtgatgcactgaatgtgaaatggggaaggtgtctaggaggactactaggtttatggtttgcgtattagggtggatgatagcagtttcatttactgagacagggagccctggcagagtacccagcttttagagtgggtagggggaaggggagagtgcatctggtgttgggcattttgaagtgatttacatacaacaaactgaaggtatctttaacactgagtccagcaggttagcatatttattcagcaagcattgcacctttttttgttgtttttggggtcttcaactcctggcctcgaatcctccctccttcccccgcctctcccagcctccgcctcccaaagtgctgggatttcaggagtgagccaccgcgcctggccagcatcgcgctgtttgtgcagtgtgccctgtgctaggtcttgcagtgggtaccagtagagacataaaagtacaaaagataattggacgtttagtagagtcctgaaagggggcgggataggaagatacctaaccataagaaaaaccagcaagagcggaaaaggagctagtcctccagatcaataagttaatcacttatgtttgtgattccctgcattttgggtgattctctgtcgaggtcctcttaagtccagacttttgatataatctgcagtttgcgccatttggattcctgaagcatctttacaagccacctacattccttatggagctgtggcacaacagcaagcccacgatgtctcaccggattaataaaaatataggcgctcacgcttttgtttaccgatatagtatctcctcctcccctcactccatcaacccccacgcgacacaactttccggaagtaagcaaaatccgttatcaaggtgaaactccggggaccaggctccacagctgccataaactggatggcacgttagaagccggtgggtgtaggtgaggcacgctggcgcccgcgggcccttctccagccgctacccagtgggaatccgcggggctgaagccccgaaaccaggctgagcgtcccagagcgcaacctccctttcccccagcagcgccggcgccgcagaagccgcgtgtccccaggcgcactcccccaaggtgaacccccgccccccacggaggcggctgggtcgcgggtctgggcggggcgctccggacgccctcccgccgctgcgcacccctcccgcgagctgccagctccctcggcctctccacccaaaactggcccaaccgccaatcgtctgcctctcacctcctacagcaggtgacccatggccaatcgccaggggtctctttgccaggagccgccagggccagccaatcggggcgacccctccgccggggaggggacgggaaaggggtggggggtgaagggggtgaagggggtgtcccgggggacgggctgaacctcagtcaggaccgcctgcaccgcagtccggggatcgggtcgaggggagaagaaaaaggggtgctcgggagcagcccccggctacctcccctggaggcacagagggcgggggccttggcgaatggctttcttgctggccacttgcggagtgagtagaccccgagggtctgggagaggggccggcccctacccctgagtccccggggtcccggccgccaggccggagcgcgaatgtcgtgctcaccctgcctccttcccgccgccccctgggctttttgatgacaagcttcaaaactgcaaagaagatgaacagagaaagaaaattgaaactctcaaagagacaacaaatagcatggtagaatcaattaaacactgcattgtgttgctgcagattgccaaagaccagagtaatgcggagaagcacgcagatggaatgataagtactattaatcccgtagatgcaatatatcaacctagtcctttggaacctgtgatcagcacaatgccttcccagactgtgttacctccagaacctgttcagttgtgtaagtcagagcagcgtccatcttccctaccagttggacctgtgttggctaccttgggacatcatcagactcctacaccaaatagtacaggcagtggccattcaccaccgagtagcagtctcacttctccaagccacgtgaacttgtctccaaatacagtcccagagttctcttactccagcagtgaagatgaattttatgatgctgatgaattccatcaaagtggctcatccccaaagcgcttaatagattcttctggatctgcctcagtcctgacacacagcagctcgggaaatagtctaaaacgcccagataccacagaatcacttaattcttccttgtccaatggaacaagtgatgctgacctgtttgattcacatgatgacagagatgatgatgcggaggcagggtctgtggaggagcacaagagcgttatcatgcatctcttgtcgcaggttagacttggaatggatcttactaaggtagttcttccaacgtttattcttgaaagaagatctcttttagaaatgtatgcagacttttttgcacatccggacctgtttgtgagcattagtgaccagaaggatcccaaggatcgaatggttcaggttgtgaaatggtacctctcagcctttcatgcgggaaggaaaggatcagttgccaaaaagccatacaatcccattttgggcgagatttttcagtgtcattggacattaccaaatgatactgaagagaacacagaactagtttcagaaggaccagttccctgggtttccaaaaacagtgtaacatttgtggctgagcaggtttcccatcatccacccatttcagccttttatgctgagtgttttaacaagaagatacaattcaatgctcatatctggaccaaatcaaaattccttgggatgtcaattggggtgcacaacatagggcagggctgtgtctcatgtctagactatgatgaacattacattctcacattccccaatggctatggaaggcaagtgtgtccatttcctctgatcagcagtagactctgctgttccttgagacatgccccttccccctcttcctcttaactgtcaaccttacctaaaaacttttgattttgcaggtctatcctcacagtgccctgggtggaattaggaggagaatgcaatattaattgttccaaaacaggctatagtgcaaatatcatcttccacactaaacccttctatgggggcaagaagcacagaattactgccgagattttttctccaaatgacaagaagtctttttgctcaattgaaggggaatggaatggtgtgatgtatgcaaaatatgcaacaggggaaaatacagtctttgtagataccaagaagttgcctataatcaagaagaaagtgaggaagttggaagatcagaacgagtatgaatcccgcagcctttggaaggatgtcactttcaacttaaaaatcagagacattgatgcagcaactgaagcaaagcacaggcttgaagaaagacaaagagcagaagcccgagaaaggaaggagaaggaaattcagtgggagacaaggttatttcatgaagatggagaatgctgggtttatgatgaaccattactgaaacgtcttggtgctgccaagcattaggttggaagatgcaaagtttatacctgatgatcagggcagtaggcataattcagcaacaaacaatcttcctttgggagaaacctgttcattccaatcttctaattacagtggttcctatctcagggatactggactttctgacgcagatgaacaattaaggggaaaagcttcccttttccctctgtggcagttacgattttgacttcagtcctgagaaaaacttcaggttttgaaaatcagatgatgtcttctccttttccaaacaccacacgttgaaagcatttataaatccaagtctgaaactctgcgctctagtactgctgttaagatacacaacttgtttcttagttcatataatctcgggatacacacacacacacacatatatatacacacacatacgtatacacacacatacatatatataaatatacctgatgccagatttttttcataaatattctgcctactgtaaatatgggttcctctgagttgttttagaaaattagcgcaatgtattaaaatcaagtgttaggaaatttcatggtcttacctacaataacttttattttggaattgaactattattaaattgtatctaatcctggaaaaaaaaaaaaaaaaaaaaaaaaaaaaaaaacaaaaaaaagaacaaaataaaaaaaaagaaaacaacaaaaaaaaaaacaacaaaaaacaaaagagagggaggaggcgcaacaagcacaacgaagcactaccccgggagggggcacgccgcacacagaacgccggagcggcacgcccggaccccactatctagaaacgacaaagcgtgtgcccacacaaaacaaaagtaaaaagagcgcagacttatcaatcagacacacgccaagcgacgagacgcggccgcagatcctcaacaaacacagcacactgaatagcaaggtggagagaaacacaacctggtggctgacgcagcgacacacatcctgcgaaggaaaagacgagacactcacactaccatgggagagtggaggagcaaaacaacacacaggcgagaagaacaacaaaaacccagccacaccagcaaacataaacacgccaccatgacaacggcgacaacacaacaacgaccacgtctcaagcccgagtcactaactgagcacagacaacaccgcacacacaactacaatcagccgcggaacaaaggacaactaactacgaacgacaaccgactgatcagagcagagacaaacactcaactccaaccgagggagcgatcaaagaacaaataaggan

SEQ ID NO: 735125 - DNA, 18726 bp, Homo sapiens
gtaagggtctttacatggtttccagatagttcattagttgttgctttctttttttgtctgttttctgttttttttttttaaataactgtggtatgatgtaataggaacttataatttctgagttgcttatttttcctttacagttatagtaaagttatactcatttattttctcctgctttctgcagagtaaaatactgatttttgtctagaaacaagacagtgcaagacaatgttgaaagtgaaattctatgttaaaatatgccagatttattttaagaatttaatatctgtagtcagttatcaatacaaccaaattacataattatgcatgataataggtaaatactgagaagttcacctcattttcttgttaaaggatttggctattaccgtatgtgtcagttagtactcttttgtatggtagtgaaagaaaactcaacccaaactgattcatgaagaagaaagtaaatctggttagatgtggtttgaattaggtaattcatgtcatgaggactcagatctcccatctctatttctacgttccacttttgcattggcttcattttcggttaggttctcccttggtggtggtaaggtggttgtagcaatgtcagcctcccatttttggaaccgagtccataggaggctattctttctagaccttaataggagtaacacaattattgctcatcaccctagctttggccatgtgtcaaatcctgaccagtcacaatttcacagtcatagattctaccctggagctgggatgttactggcctcactagaaacacattgctgatagggtagaaggtgtgttcatcctacccaacccgacccgcaccaaagtcagaatagggaaaaacagatgttgggtgacatgcaactaacgtctgccgtactacactgaagatatttttctatgtttattctccagtgaaagagcttatatttgtggtacataggggattttgttttaatttagaaaatttaattgtagaaaacatgttttataaccctttctctgtactttgttctatatcaggaattgacttgattagataaggtgacatagggtatcttaggccctacaagatagtaaaccccccatcacttgaaagtattcagtagaggcttaaaaaacattattaaaggatgtggttattaggggactttaagaaatgaatatgaaattgaagtaggaaatctttaagctactctgtgagttatgccttttaaaagcaatttgtaattcctgtagatttcttttaaatttaggcagtttcataaatgactatagcatcattttagcaaatttgtgatcctgtaagaggaggataagtgttttttgtttgtttgtttgttttttgtttttttgagacagagtctcactttgtaccccagaaagtaaatctagttagatgtggtttgtctcggctcactgcaacctccaccccgtgcgttctagcaattctcctgcctcagccaccacacctggcctaagaggggaggataagtgttttagtgatcatattagactgaatgtggcagatgagatttcccgcccccccattgttggttagactgacattcaacattcaacaagagccacctgcccttgtaggcatttctgccactatacccctacataaacctagagtgctattgcttacttgctttccttcaaatacattttttcatttgtggcctccacattcttgtgtgtgatgtcctttctctgtgaaatgtcttctaccctttttttcaaagcctagtttagaactgacctcttctatgaaccctctgccgactggcctttccttccccagtcccccaagttcaaaatgatctctttcctttgaatactatagtatttgcacaattcactatctccttatcatattcttcttgtttatttgttatcagctgatgttgacatcataagttcaggttcctaactagatccaatattggaatttttcagcttttgctaagaagagagcttgtatgtctttgggaataatgggcagaaaaagataactttgagaagtcttagacttctaatagctttgatatttaaaagtacatgtaatacaagaggtttttttcctacatttaatgcatggagaagataggacatttagaaatatggaattaatgttcatttgactggcaaaagattattttctcagatgtagtgaagtgtggtaaagaacttcactctagagccagaatgtctgtgtttgtatcccagagcccaccacttacatttaaccattaacattcaacttactgtctctgagtttcagtggcctcatctataaaatgaggataataagagtacctacttcatagagttgttttagtggttaaataaactaacgtaaacttgctagaacttgataaactaatattggatgagaactggttgaaataatgcctggctatagtaaaaacttggtaaatgttagttgccattacaatgcaactactgttcctaccattccctctgccagtgcctggtattcagtagcactcagtaaatgttagttaaatgaagaaataactgaaggaatgaatgaacaaatggttgatgtagagattgcttttccattgttgtttattgaatattttgagatgtataacatactgtctgttaggcactgtgggatgggcactcacggagctgtcttccaaaggggtataggagaggagacgcagtgatctcagcaacctacctttaaaacatatcctagtatctactgccatgttaggttctcttcttttgctttttttaaaaaaaaattctcacaaaactccccccacccacttcagtttatagatgaggaagctcctactacataatagtgcttcccagtctaattcttgacctcattgtatttatatgtcctttttttttttgacagagtctcactcattgcagtggcacaatcacagctcactgcaacctctgcctcccctgctcaagtgatcctcccacctcaacctcctgagtagctgggactacaggcatgcaccaccacgcctggctaatttttgtatttttttgtagagatgcggttttgccatgttggccaggctggtctcgaactcctgggctcaagccatctgcccactttggcctctgagagtgctgagattataggcatgagccaccattcccagccatgttttcctttttcattgaactttatctactttagccattaaactccactccattggtcttgtcattactaagagctgaaccacctgcaaaatattaagttaaaaagcgttttctttgacaacagttttcttttcttcatcttcctctatcactttacttctgaacttttattctctcattttgatctgacccctacttctctgtttttcctggccatttagtactttcttgttttgctcatcccatttcccagtggagaccttctggtctgctgctttatcactggttttgttagaagacatacaaatggcaaggaggtatatgaaaaggtgcctaacatcattgatcatcagagaaatgcagaccaaaactacaatgagatatcatttcaccccagttaaaatggctttttttttttttttccaaaagacaggcaataacaaagtactggtgaggatgtggagtaaagggaacccacatacactattagtaggaatgtaaattagtacagccactgtggagaacagtttgaaggttcctcaaaaaactaaaaatagagctaccatataatccagcaatcccactgctaggtatatatccaaaagaaaggcaatcaatatacggaagagatacctgcacacccaggtttattgcagcactattcacaatagccaagatttggaagcaacccaggtgtccaacagatgaatggataaagaaaacatggtatataaacacaatggaatactattcagctgtgaaaaagaatgaaatcctgtcatttgcaatcctgtcttgaatagaactggaggtcatgatgttaagtgaaataagacaggcacaaacttcacatgttctcacttatttgtgggagctaaaaattaaaacaatcgaactcatggagctagagaatagaattatggttaccagaggctggaagggtggttgggcgtataagtgtagggggagtggggatggttaatgggtacaaaaaaatgagaacgaataagatctacttgataacacaacagggtgactatagtcaacagtaattatacatttaaaaataactagaagagtataattagattgtaacacaaaagataaatgcttgaggtgatggatacctatttaccctgatgtgattattacttatttcatgcctatatcaaaatatttatactccaaaaatatatatacctactatgtacccacaaaaatttaaaaatttatatattgtttttgctatcacctttagaatttcttgtcattggatagttcgtctgtataccattctggtcttcattccccagggcccccgttgtctgatttttctgcttctagaactgttagaggtcacaaaagcaagatggttgtatctatcacaatttttgtctgactttaactgggtatctgttacgatttagtagtcatcttactgacttcttgttggtttccaattgaatcctcacagtagactgttttcattgtaatcagtatcgaattatagcctgttcccttcttcataaatgaaggctttcttcttcaacagttcttagtgacttcacctgtactttatttctctgctttgaatatttcgaagaaaacatattcttgctctttcccaaggttaacactacatacattaccttgaccacaggatgttttcttgcagattgtgacctaattccatcacccttcagcagcccccaccgttttcatggattcagctaaaccttctgtaagatgactctttttccccctaatctttatatctcttttgatatgtagctttagtctcactttttttccttttggattttgccagttagatgtctccctggaattccacttcagcatggctaagactaagcttgtcttctctttcctccccaaagcaaattgtaattaggatagactgaaggtgacagaagataactaagatcttcttcatcctttcggctcttatggaagctgaattccagtagtcattctaaatttgttgtatgtcagcttatggtatcttttcatgtctttacattcagccaaagaggaagttccttgaaggggagaccagagggcgtgctgtgcttcttaatcctctctttcttaaccagtaagaggcattcagtagatatctgatgatactgattaatagaggggaacttttcagattcttttttttttttaaccctagtaagctttagtacaaactaaatgctgagagattatcaagtaagggattgatcatcacaagaagactcaggatgttacatcctgtaggttttatagtttcctatattgtaaaaaatatgagttatagcagcttgtctggatgtcatacaggtataaaaatcagttttataaacttgagtaaattggggcccattttagaaaaaactcttgcaggctgtgaatgccaatatataagtaaagtattaagtataatgttatttaatgtgggcaaacataaagccaggtgtaaattttttaggtttaaaatcttatagaactatacatccaaaagaaaatttcaagttaaacataatacaaagcaatacaatctaaattaacattaatttaatgtgatgaatgatattgccttgctaaaagtgggtcactacttacaatgtgcaaatggtactcatcgttagggtatagattcttttaaactatgacatacgtacactaccatgtggaacgtgatgatgtgttctctgttctaactactgggaagacttccttggcatagcacatgccatggggtcagttggctttgacttcatatagatatgccatttacttggtcagtgtcacttctatgacaagtagtatgttgtgccagtttgattataagtacaaatatgggcaatgaagtaacttggttttaaggttgttactaagctgagtaacagtgtgtggctatacaaatttttataggctatcaggaatgaaaacacaggagattgttgtagattcaagtattttagattcaagtttgaagatgctcatgcagatgtttaactgagttgtatagacctttatgtttctttctttttctctttttttttttttgagacagagtcttgctctgtcacccaagctggagtgcaatggtgtgatctcggcttactgcaacctccgcctcccaggttcaagcaattctcctgcctcagcctcccaagtagctgggattacagatgtgcaccacgacgcccagctgattttttgtattttagtagaggcggggtctcaccatgttgtcaagatggtctcaatctcctgaccttgtgatccacccacctctgcctcccaaagtgctgtgattacaggcgtgagccaccgcgcctgactgacctttatgtttcttaactttatgctatacatcagttgatatttcaaaaatttaaatggtttctatgattattctttgggctaagaaattgggcattaattgtcctcatatgtatggtttttgtggctacttcatgtagattttatttttggtggttatcaaattggaatttttttttttttttttttttttgagacggagtctcattctgtttcccaggttggagtacagtggtgcaatctcagctcactgcagcctcgacctcccaggctcaagcagtcctctcacctcagccttctaagtagctgggactacaggcacgcaccaccacacctggctagttttttgtgtttttagtagagatggggttttaccctgttggccaggctggtcttgaactcctggcctcaagtgatccacctgcctcagcctcccaaagtgctgggattagaggcatgagccaccacacctggctgaaattggaatttcattggtactgcctgtaattttatgttaatttttttttttttttgtcgtcactagcttttatctaaagcccctagagagaaaggccatgataccttgtatacaaggttataagagtatacaagggaaagggagggctgaagggaacagggtgggctggtacaagcctcattagaaataccattgagtctgtgagtaaaacatcattatatgaaaaggagatgtggttttagggtggtccaattacttttgcaccagcctaataaaattacaagtcattatcaatagagacattgtaaaacctttttttttcccaaaagaagtatcaggtatgataattacatgtctgcccaactttcgttatagattaacataacttaattgtatttaaggtacaatttaggagagttgctgaaaaatgaatctttagtattgggatgccttgattctaccctcaatagctataatggattatgtgtctgagtagattaataaaaatcttttgagcatttttcttgaactacttcactgaagattagctttttgagcatccattttaatttctcagtatataaggatcggtttatcacaactgtattgttttccctggccttgttagattatattttcatatcatgtagaaaaataggtgtattcgttctcccttgaagtcctttgtctcccaaaggaaatggttgcaatacagatgtgtcacctcttccacaggtaaagtggaatggagaagtagccagttaaatagtgcatgctcaatttggaacatttagagcatacaggaaagttatttatttggtaaatattttttaagcatttactatgtttcatgcattgtactagttgtagaggatataattgaatacaactacatgtagcccttgactttatggaactagtctagtataaagatttaagattgcctggcatggtggctcacgccactaatcccagcactttgagaggccaaggcaggattgcttgaggccagaagtttaagagtagcttggtcaacataatgagactccatctctaaaataaatagatagatagatagatagatagatagatagatagatagatagaagtagttagacaacacaaagcagtttcactcatcttgtggcaaggagttatgtatttctaatcaaatttggcaactcaagcattttcaacaaaatctacatgttttttcagaataaagtgaccaacacagaatgttacctgtaaaaatcagagcaataattgctatctaaaataattttgaaaattaagtggtactgaaaggctcatatagcaaaaatatggcctcctgtcattgtactttcctacttcccagactcaccattttcaacattttttagtagtttattttgccattttatagcatagtacctgacattttatttattcaacagacatttcttaagtacctaatacatgccattccttgtttgaagggatgctaaggatacagtggtgaacaaggcgttgtggggttgtatagagggtattcattcctaaccttgaaccaaatatttctttctgttggataatgcattaaaaattgcaaacagtttacaaacttttggagcaatggtggccttgatcataaagtagggactgcttctaccgtatacatgcttggtggtgtatttgtgatatctggctaaagtttctacatggaaattgactgactttagttttgagacttctgggaaccagtcaggcaaaatagtgaaactgtgtatcctgtttccaagagttgtcttttaaggttatctgcttcattcatttggcctgacttgctaggcaaatgcctagggtaaatatgatttgattaactataacaacaacagcaacaacaacaactttattttttagagcagtttgaggttcacagcaaaattgagcagaatgtacagagattttccctatacccgcttcccctacgcatgtgcggcctcccctactatcaacatcccccaccagagtggtttgttacaattaatgaacctacattgacacatcattatcactcaaggtccgtagtttacattagagtccactcttggtgttgtgtatgggtttggtcgattttataatgacatttatccaccattatagtgtcatacatagtaattttgctaccctaaaaatccagtgtgctccacctgttcctccttccctcctccctcatccctggcaaccactgaactttttaacatctccatagttttgccttttccagaatgtcatatcattggaatcacacagtatgcagccttttcaaatgggcttctttccgttagtaataggcatttaagtttcatcctcatcttttcatggcttgatagctcatttctttccctccctcttttcttccctgtcttccttccttcctcttctttcctgtttcctctttcttcttccttttttaagagacaaggtgtctcactctgttgcccaggctggagtgcagtggcccaatcatagctcattgcagccttgaattcctgggctcaagtgatcctcctgcgttagcctcctgagtagctgggatcacaggctccagtcattttagtgctgaataatatttcattatctggatgtaccgcctattcattcacctactgaagaatatcttggttgcttctaagttttggcaattatgagtgaagttactataaacattgtatacaagttttatgtggatgtatgttgtcatctcccttgggcagataccaaggagtgccattgttggatcatatggtaaatatatctttagttttgtacagaattctaggttggtatttttttctctctcagtcctttattttatttggagacagtctcgctatgtcgcccaggctgccatacagtggtgccatctgggctcactgaaacctccacctcccaggttcaagcgattcttgtgccttggcctcccaagtagctgggattacaggagtgcgccaccacgcctgctaatttttgtatttttagtagagacagggttttgccatgttgcccaggctggtctcaaactcctgaccttaagtgattcacccacctcaatctcccaaaatcctgggattacaggcctgagctactgtgcctgatctctctcagtactttaaagaaatatttcattccacttttcttttttttcttctttttgagatggagtctcactctgtcgcctgggctggagtgcagtggcgcgatctcagctcactgccacctccgcctcctgggttcaagtgattctcctgcctcagcctcctgaatagctgagattacaggcgcccaccaccatgcccagctaattttttgcatttttagtagagacgggggttccaccatgttggccaggctggtctcgaactcctgacctcgtgattcgcacatctcggcctcccaaattgctgggattacaggtgtgagctaccacgcctggcccactcttcttgcttacatagtttctgaggagatgtcagatgtaatttttatttttgctcttctgtaggcaagttgagttttttccccctctagcttctctcaggatttttttctttatctttgattttcagtagtttgaaaattatatgcctagctgtcagggttttttgcttgtttgtttttgttttctcaggtgtgactccagaaaggttctaaagaggagctttacaatctcttctctggggtttatggagacttcctttacccttctgtgttagccccttaaagcactgcgtcaaccttaaaagggcacaggaaagggtgtctatgccatttttatgccatttatcctgcttggtgttttctgagctttcttcatctgcggtttaatgtctcacattaatttgtagaaattctctgtcattgtttcaaatttttcttcagttcttttctctgtttcttcttctggtgttcccattatgcttttgtggttgtcgtacagttattggatattttgttccaggcttttttttttccagtctttttttccttttgcttctcggttttgtaggtgtctgttgagatactctcaagtgcagatattctttcctcagctttgtctagtttactaataagcccattaaaggcagtcttcatttctgttacagtctttttgatcagtagcatttcttttttattctttcttaaaatttctgtctttctgcttacattgcccatctgttcttgcatggtttctactttgtccattagagttcttaggatatttatcataattatttcaaatttctggtgtaacaattccaacatccctgcaacatccaagtctagtttcgatgcttactgtgtctcttccagctgtgttttttcctatttaatatgtcttataattttttcttgatagccatacatgatgcattaggtaacagaaactgctgtgagtggacctttagtaatgtggtggtaaggtgtgcatggaggggaaacattttcagtctgttagtgaacttttgtcaacttcacatgtgcttctcaagtccatcctgtaagtgggagagtagggctagagaggactgaagttgggtatatattaaatactttctcctacaaagaagcctagaggggacgcattaggggattttttttcccccagtattcactgtgatgacccttattgagctcctggaggtaaaactcacaaaactgtggttctcccccctgcccatattactacatgtccctggagtttatatctttcagacttgtctgcactgagcttccaccaatttgtcaaatacagatcaggtttccctaccacccgtgcagttgaaaacccacatacaacttttgactcctccagagcttaactactcatagcctgctattgactggaagccttgccaataacataaacagttgattaatacatattttatatgttttctgtattatatattgtattcttacaataaagagaaaagaagatgttattaagaaaatcataaggaagataaaatatatttactgttcattaagtggttcccatgggtgctggttcccatggaggttgccccttgtgagtttttgctcagggaagttgtgattctctatatttgcctgttggtctcctaatttgggagtcatcagttttccctgtgacctcacttctcttacagagttaagaacagttgttggtttttcagtttgttcagtgttttacatgttgttagaacacagtggtacttctaagtttcttaacatgctagatcagaaacctgaagtctcacctaatttggctttttatattttttcttcttttttttcttccattgctaccaaagcatttttcatctgtgtctggggtgacattagagcagaatgtgatttctaggtaaacattattgggctccctagcagaaaaatttttgaaagtagtacatgaattctgtataattaaaattttcttttcatcttaataggtataggtaataggcacggcctattttttttttgctcaacagtctaaaatagtaatttaatcacctaatagccttagttatatagttgaaagaagagttggaaatctgattcatgggttggaaatcacctgtcacatatgagttttaggcactggtcactttattttgaaacagctttggggttttttcctttttcaactcataataggctttaacagcttttagttttgtttctgtttttttaacagcatgagttgccaaatttggttatagcttcttggtacaagatgggtaaatttgctttgtgttgtgtaattactttttattttaaatgctacctcttttatgaacactaactttacactaagattaggaaaatgagaattgcatgtctgcaacaaatagctatctgtagtattaaattgtgaaaatgtagactttggattggagctggcatctcttaatatgtaattgtaacatagagtaaataagtattttgtcccttgtagggtcaaacagtacagtgcatgggcagaattagagatgtaggcttttttttttttttttttttttactggcttagagaaccgtttgatcagctaatatggaattaagtccctagggctgcccaggcacaacattaactgctattaaaggaaaatttaaaagagtattagtgaaggttaaatactgaccatggacatctggcaaaattgatgttttttttcccctccaccattgtttatagtttattgttatttatcagagaattaatgtttattttcagaatctattaccataagaaatctgtttgaggacttcgtatgtgccaggaattctactaaataatgatataatgctgaacagaattagataggatcctcacttcgttaagcttacagtctagtggtatagatcaacattaatcaaagaataacacaaatagaaagcagagcagtggttcatgggattgactgtagagaagcatgagggaagttcccaggtgatggaaaatactttatttcttaatcgtggtggttacatgtgtgcatatgtttatgaaaatatattgtacatttaaagtggatacattttatcacatgtaaattatgactctataaagttaattaaaaagaataactcaggtaaggtggtgtgtgcgcctgtagtcccagctatttctgaggcaggaagatcacttgagcccaggagtttgagttcagcatgggcaacatgagacctgtgagactttgtctctaaaaaaatttaaataaataactaagataaatgtaaaattacagctgtagtaagttctacaaaggagagttacatgggctatgacgatgtaagatagcaagaactgacattggcagggaggaaatgatgatgagtagaagtaaataagtgaagtgtggggattgatgtcaaggggacagtataaaagaaataacagcatgcgccaaggccctaaaattggaaagtccttggcaaattaaaggagtttgaaaaaggccattgtgtgcaaagcagaaaataggtactacaaggtaaaagatggagctaagcggtaggtaaggctaaaccttgtcagccattgttaaatattgaattgtatcctaagcacaactcagtggaaagcagttaaagttctttaattgggggaggcaatgaaggggtaataaaattggttatagaaatactgctctggctctagtgttgagaatgaattggagtagccagagtagattcaagaagactttagtaagattattccaacaggccaggacctgttatagggtggtggcaatggagagagatggacagaatggagagtgtatttaggaggtaaaaatgacagaacttggtgatgcactgaatgtgaaatggggaaggtgtctaggaggactactaggtttatggtttgcgtattagggtggatgatagcagtttcatttactgagacagggagccctggcagagtacccagcttttagagtgggtagggggaaggggagagtgcatctggtgttgggcattttgaagtgatttacatacaacaaactgaaggtatctttaacactgagtccagcaggttagcatatttattcagcaagcattgcacctttttttgttgtttttggggtcttcaactcctggcctcgaatcctccctccttcccccgcctctcccagcctccgcctcccaaagtgctgggatttcaggagtgagccaccgcgcctggccagcatcgcgctgtttgtgcagtgtgccctgtgctaggtcttgcagtgggtaccagtagagacataaaagtacaaaagataattggacgtttagtagagtcctgaaagggggcgggataggaagatacctaaccataagaaaaaccagcaagagcggaaaaggagctagtcctccagatcaataagttaatcacttatgtttgtgattccctgcattttgggtgattctctgtcgaggtcctcttaagtccagacttttgatataatctgcagtttgcgccatttggattcctgaagcatctttacaagccacctacattccttatggagctgtggcacaacagcaagcccacgatgtctcaccggattaataaaaatataggcgctcacgcttttgtttaccgatatagtatctcctcctcccctcactccatcaacccccacgcgacacaactttccggaagtaagcaaaatccgttatcaaggtgaaactccggggaccaggctccacagctgccataaactggatggcacgttagaagccggtgggtgtaggtgaggcacgctggcgcccgcgggcccttctccagccgctacccagtgggaatccgcggggctgaagccccgaaaccaggctgagcgtcccagagcgcaacctccctttcccccagcagcgccggcgccgcagaagccgcgtgtccccaggcgcactcccccaaggtgaacccccgccccccacggaggcggctgggtcgcgggtctgggcggggcgctccggacgccctcccgccgctgcgcacccctcccgcgagctgccagctccctcggcctctccacccaaaactggcccaaccgccaatcgtctgcctctcacctcctacagcaggtgacccatggccaatcgccaggggtctctttgccaggagccgccagggccagccaatcggggcgacccctccgccggggaggggacgggaaaggggtggggggtgaagggggtgaagggggtgtcccgggggacgggctgaacctcagtcaggaccgcctgcaccgcagtccggggatcgggtcgaggggagaagaaaaaggggtgctcgggagcagcccccggctacctcccctggaggcacagagggcgggggccttggcgaatggctttcttgctggccacttgcggagtgagtagaccccgagggtctgggagaggggccggcccctacccctgagtccccggggtcccggccgccaggccggagcgcgaatgtcgtgctcaccctgcctccttcccgccgccccctgggctttttgatgacaagcttcaaaactgcaaagaagatgaacagagaaagaaaattgaaactctcaaagagacaacaaatagcatggtagaatcaattaaacactgcattgtgttgctgcagattgccaaagaccagagtaatgcggagaagcacgcagatggaatgataagtactattaatcccgtagatgcaatatatcaacctagtcctttggaacctgtgatcagcacaatgccttcccagactgtgttacctccagaacctgttcagttgtgtaagtcagagcagcgtccatcttccctaccagttggacctgtgttggctaccttgggacatcatcagactcctacaccaaatagtacaggcagtggccattcaccaccgagtagcagtctcacttctccaagccacgtgaacttgtctccaaatacagtcccagagttctcttactccagcagtgaagatgaattttatgatgctgatgaattccatcaaagtggctcatccccaaagcgcttaatagattcttctggatctgcctcagtcctgacacacagcagctcgggaaatagtctaaaacgcccagataccacagaatcacttaattcttccttgtccaatggaacaagtgatgctgacctgtttgattcacatgatgacagagatgatgatgcggaggcagggtctgtggaggagcacaagagcgttatcatgcatctcttgtcgcaggttagacttggaatggatcttactaaggtagttcttccaacgtttattcttgaaagaagatctcttttagaaatgtatgcagacttttttgcacatccggacctgtttgtgagcattagtgaccagaaggatcccaaggatcgaatggttcaggttgtgaaatggtacctctcagcctttcatgcgggaaggaaaggatcagttgccaaaaagccatacaatcccattttgggcgagatttttcagtgtcattggacattaccaaatgatactgaagagaacacagaactagtttcagaaggaccagttccctgggtttccaaaaacagtgtaacatttgtggctgagcaggtttcccatcatccacccatttcagccttttatgctgagtgttttaacaagaagatacaattcaatgctcatatctggaccaaatcaaaattccttgggatgtcaattggggtgcacaacatagggcagggctgtgtctcatgtctagactatgatgaacattacattctcacattccccaatggctatggaaggcaagtgtgtccatttcctctgatcagcagtagactctgctgttccttgagacatgccccttccccctcttcctcttaactgtcaaccttacctaaaaacttttgattttgcaggtctatcctcacagtgccctgggtggaattaggaggagaatgcaatattaattgttccaaaacaggctatagtgcaaatatcatcttccacactaaacccttctatgggggcaagaagcacagaattactgccgagattttttctccaaatgacaagaagtctttttgctcaattgaaggggaatggaatggtgtgatgtatgcaaaatatgcaacaggggaaaatacagtctttgtagataccaagaagttgcctataatcaagaagaaagtgaggaagttggaagatcagaacgagtatgaatcccgcagcctttggaaggatgtcactttcaacttaaaaatcagagacattgatgcagcaactgaagcaaagcacaggcttgaagaaagacaaagagcagaagcccgagaaaggaaggagaaggaaattcagtgggagacaaggttatttcatgaagatggagaatgctgggtttatgatgaaccattactgaaacgtcttggtgctgccaagcattaggttggaagatgcaaagtttatacctgatgatcagggcagtaggcataattcagcaacaaacaatcttcctttgggagaaacctgttcattccaatcttctaattacagtggttcctatctcagggatactggactttctgacgcagatgaacaattaaggggaaaagcttcccttttccctctgtggcagttacgattttgacttcagtcctgagaaaaacttcaggttttgaaaatcagatgatgtcttctccttttccaaacaccacacgttgaaagcatttataaatccaagtctgaaactctgcgctctagtactgctgttaagatacacaacttgtttcttagttcatataatctcgggatacacacacacacacacatatatatacacacacatacgtatacacacacatacatatatataaatatacctgatgccagatttttttcataaatattctgcctactgtaaatatgggttcctctgagttgttttagaaaattagcgcaatgtattaaaatcaagtgttaggaaatttcatggtcttacctacaataacttttattttggaattgaactattattaaattgtatctaatcctggaaaaaaaacaaaaatgctagtaaaatgataatgtaccgaaattggagaaatattcaattgtaactcacttttaaaaataataaaaccttagggggggtcccggtacaaatttccccttatagagggcggttttaaatttaattggcggcttttaacaacgtt

SEQ ID NO: 735126 - DNA, 18516 bp, Homo sapiens
  misc_feature (18440)..(18440): n is a, c, g, or t
  misc_feature (18451)..(18451): n is a, c, g, or t
  misc_feature (18456)..(18456): n is a, c, g, or t
  misc_feature (18459)..(18459): n is a, c, g, or t
  misc_feature (18461)..(18461): n is a, c, g, or t
gtaagggtctttacatggtttccagatagttcattagttgttgctttctttttttgtctgttttctgttttttttttttaaataactgtggtatgatgtaataggaacttataatttctgagttgcttatttttcctttacagttatagtaaagttatactcatttattttctcctgctttctgcagagtaaaatactgatttttgtctagaaacaagacagtgcaagacaatgttgaaagtgaaattctatgttaaaatatgccagatttattttaagaatttaatatctgtagtcagttatcaatacaaccaaattacataattatgcatgataataggtaaatactgagaagttcacctcattttcttgttaaaggatttggctattaccgtatgtgtcagttagtactcttttgtatggtagtgaaagaaaactcaacccaaactgattcatgaagaagaaagtaaatctggttagatgtggtttgaattaggtaattcatgtcatgaggactcagatctcccatctctatttctacgttccacttttgcattggcttcattttcggttaggttctcccttggtggtggtaaggtggttgtagcaatgtcagcctcccatttttggaaccgagtccataggaggctattctttctagaccttaataggagtaacacaattattgctcatcaccctagctttggccatgtgtcaaatcctgaccagtcacaatttcacagtcatagattctaccctggagctgggatgttactggcctcactagaaacacattgctgatagggtagaaggtgtgttcatcctacccaacccgacccgcaccaaagtcagaatagggaaaaacagatgttgggtgacatgcaactaacgtctgccgtactacactgaagatatttttctatgtttattctccagtgaaagagcttatatttgtggtacataggggattttgttttaatttagaaaatttaattgtagaaaacatgttttataaccctttctctgtactttgttctatatcaggaattgacttgattagataaggtgacatagggtatcttaggccctacaagatagtaaaccccccatcacttgaaagtattcagtagaggcttaaaaaacattattaaaggatgtggttattaggggactttaagaaatgaatatgaaattgaagtaggaaatctttaagctactctgtgagttatgccttttaaaagcaatttgtaattcctgtagatttcttttaaatttaggcagtttcataaatgactatagcatcattttagcaaatttgtgatcctgtaagaggaggataagtgttttttgtttgtttgtttgttttttgtttttttgagacagagtctcactttgtaccccagaaagtaaatctagttagatgtggtttgtctcggctcactgcaacctccaccccgtgcgttctagcaattctcctgcctcagccaccacacctggcctaagaggggaggataagtgttttagtgatcatattagactgaatgtggcagatgagatttcccgcccccccattgttggttagactgacattcaacattcaacaagagccacctgcccttgtaggcatttctgccactatacccctacataaacctagagtgctattgcttacttgctttccttcaaatacattttttcatttgtggcctccacattcttgtgtgtgatgtcctttctctgtgaaatgtcttctaccctttttttcaaagcctagtttagaactgacctcttctatgaaccctctgccgactggcctttccttccccagtcccccaagttcaaaatgatctctttcctttgaatactatagtatttgcacaattcactatctccttatcatattcttcttgtttatttgttatcagctgatgttgacatcataagttcaggttcctaactagatccaatattggaatttttcagcttttgctaagaagagagcttgtatgtctttgggaataatgggcagaaaaagataactttgagaagtcttagacttctaatagctttgatatttaaaagtacatgtaatacaagaggtttttttcctacatttaatgcatggagaagataggacatttagaaatatggaattaatgttcatttgactggcaaaagattattttctcagatgtagtgaagtgtggtaaagaacttcactctagagccagaatgtctgtgtttgtatcccagagcccaccacttacatttaaccattaacattcaacttactgtctctgagtttcagtggcctcatctataaaatgaggataataagagtacctacttcatagagttgttttagtggttaaataaactaacgtaaacttgctagaacttgataaactaatattggatgagaactggttgaaataatgcctggctatagtaaaaacttggtaaatgttagttgccattacaatgcaactactgttcctaccattccctctgccagtgcctggtattcagtagcactcagtaaatgttagttaaatgaagaaataactgaaggaatgaatgaacaaatggttgatgtagagattgcttttccattgttgtttattgaatattttgagatgtataacatactgtctgttaggcactgtgggatgggcactcacggagctgtcttccaaaggggtataggagaggagacgcagtgatctcagcaacctacctttaaaacatatcctagtatctactgccatgttaggttctcttcttttgctttttttaaaaaaaaattctcacaaaactccccccacccacttcagtttatagatgaggaagctcctactacataatagtgcttcccagtctaattcttgacctcattgtatttatatgtcctttttttttttgacagagtctcactcattgcagtggcacaatcacagctcactgcaacctctgcctcccctgctcaagtgatcctcccacctcaacctcctgagtagctgggactacaggcatgcaccaccacgcctggctaatttttgtatttttttgtagagatgcggttttgccatgttggccaggctggtctcgaactcctgggctcaagccatctgcccactttggcctctgagagtgctgagattataggcatgagccaccattcccagccatgttttcctttttcattgaactttatctactttagccattaaactccactccattggtcttgtcattactaagagctgaaccacctgcaaaatattaagttaaaaagcgttttctttgacaacagttttcttttcttcatcttcctctatcactttacttctgaacttttattctctcattttgatctgacccctacttctctgtttttcctggccatttagtactttcttgttttgctcatcccatttcccagtggagaccttctggtctgctgctttatcactggttttgttagaagacatacaaatggcaaggaggtatatgaaaaggtgcctaacatcattgatcatcagagaaatgcagaccaaaactacaatgagatatcatttcaccccagttaaaatggctttttttttttttttccaaaagacaggcaataacaaagtactggtgaggatgtggagtaaagggaacccacatacactattagtaggaatgtaaattagtacagccactgtggagaacagtttgaaggttcctcaaaaaactaaaaatagagctaccatataatccagcaatcccactgctaggtatatatccaaaagaaaggcaatcaatatacggaagagatacctgcacacccaggtttattgcagcactattcacaatagccaagatttggaagcaacccaggtgtccaacagatgaatggataaagaaaacatggtatataaacacaatggaatactattcagctgtgaaaaagaatgaaatcctgtcatttgcaatcctgtcttgaatagaactggaggtcatgatgttaagtgaaataagacaggcacaaacttcacatgttctcacttatttgtgggagctaaaaattaaaacaatcgaactcatggagctagagaatagaattatggttaccagaggctggaagggtggttgggcgtataagtgtagggggagtggggatggttaatgggtacaaaaaaatgagaacgaataagatctacttgataacacaacagggtgactatagtcaacagtaattatacatttaaaaataactagaagagtataattagattgtaacacaaaagataaatgcttgaggtgatggatacctatttaccctgatgtgattattacttatttcatgcctatatcaaaatatttatactccaaaaatatatatacctactatgtacccacaaaaatttaaaaatttatatattgtttttgctatcacctttagaatttcttgtcattggatagttcgtctgtataccattctggtcttcattccccagggcccccgttgtctgatttttctgcttctagaactgttagaggtcacaaaagcaagatggttgtatctatcacaatttttgtctgactttaactgggtatctgttacgatttagtagtcatcttactgacttcttgttggtttccaattgaatcctcacagtagactgttttcattgtaatcagtatcgaattatagcctgttcccttcttcataaatgaaggctttcttcttcaacagttcttagtgacttcacctgtactttatttctctgctttgaatatttcgaagaaaacatattcttgctctttcccaaggttaacactacatacattaccttgaccacaggatgttttcttgcagattgtgacctaattccatcacccttcagcagcccccaccgttttcatggattcagctaaaccttctgtaagatgactctttttccccctaatctttatatctcttttgatatgtagctttagtctcactttttttccttttggattttgccagttagatgtctccctggaattccacttcagcatggctaagactaagcttgtcttctctttcctccccaaagcaaattgtaattaggatagactgaaggtgacagaagataactaagatcttcttcatcctttcggctcttatggaagctgaattccagtagtcattctaaatttgttgtatgtcagcttatggtatcttttcatgtctttacattcagccaaagaggaagttccttgaaggggagaccagagggcgtgctgtgcttcttaatcctctctttcttaaccagtaagaggcattcagtagatatctgatgatactgattaatagaggggaacttttcagattcttttttttttttaaccctagtaagctttagtacaaactaaatgctgagagattatcaagtaagggattgatcatcacaagaagactcaggatgttacatcctgtaggttttatagtttcctatattgtaaaaaatatgagttatagcagcttgtctggatgtcatacaggtataaaaatcagttttataaacttgagtaaattggggcccattttagaaaaaactcttgcaggctgtgaatgccaatatataagtaaagtattaagtataatgttatttaatgtgggcaaacataaagccaggtgtaaattttttaggtttaaaatcttatagaactatacatccaaaagaaaatttcaagttaaacataatacaaagcaatacaatctaaattaacattaatttaatgtgatgaatgatattgccttgctaaaagtgggtcactacttacaatgtgcaaatggtactcatcgttagggtatagattcttttaaactatgacatacgtacactaccatgtggaacgtgatgatgtgttctctgttctaactactgggaagacttccttggcatagcacatgccatggggtcagttggctttgacttcatatagatatgccatttacttggtcagtgtcacttctatgacaagtagtatgttgtgccagtttgattataagtacaaatatgggcaatgaagtaacttggttttaaggttgttactaagctgagtaacagtgtgtggctatacaaatttttataggctatcaggaatgaaaacacaggagattgttgtagattcaagtattttagattcaagtttgaagatgctcatgcagatgtttaactgagttgtatagacctttatgtttctttctttttctctttttttttttttgagacagagtcttgctctgtcacccaagctggagtgcaatggtgtgatctcggcttactgcaacctccgcctcccaggttcaagcaattctcctgcctcagcctcccaagtagctgggattacagatgtgcaccacgacgcccagctgattttttgtattttagtagaggcggggtctcaccatgttgtcaagatggtctcaatctcctgaccttgtgatccacccacctctgcctcccaaagtgctgtgattacaggcgtgagccaccgcgcctgactgacctttatgtttcttaactttatgctatacatcagttgatatttcaaaaatttaaatggtttctatgattattctttgggctaagaaattgggcattaattgtcctcatatgtatggtttttgtggctacttcatgtagattttatttttggtggttatcaaattggaatttttttttttttttttttttttgagacggagtctcattctgtttcccaggttggagtacagtggtgcaatctcagctcactgcagcctcgacctcccaggctcaagcagtcctctcacctcagccttctaagtagctgggactacaggcacgcaccaccacacctggctagttttttgtgtttttagtagagatggggttttaccctgttggccaggctggtcttgaactcctggcctcaagtgatccacctgcctcagcctcccaaagtgctgggattagaggcatgagccaccacacctggctgaaattggaatttcattggtactgcctgtaattttatgttaatttttttttttttttgtcgtcactagcttttatctaaagcccctagagagaaaggccatgataccttgtatacaaggttataagagtatacaagggaaagggagggctgaagggaacagggtgggctggtacaagcctcattagaaataccattgagtctgtgagtaaaacatcattatatgaaaaggagatgtggttttagggtggtccaattacttttgcaccagcctaataaaattacaagtcattatcaatagagacattgtaaaacctttttttttcccaaaagaagtatcaggtatgataattacatgtctgcccaactttcgttatagattaacataacttaattgtatttaaggtacaatttaggagagttgctgaaaaatgaatctttagtattgggatgccttgattctaccctcaatagctataatggattatgtgtctgagtagattaataaaaatcttttgagcatttttcttgaactacttcactgaagattagctttttgagcatccattttaatttctcagtatataaggatcggtttatcacaactgtattgttttccctggccttgttagattatattttcatatcatgtagaaaaataggtgtattcgttctcccttgaagtcctttgtctcccaaaggaaatggttgcaatacagatgtgtcacctcttccacaggtaaagtggaatggagaagtagccagttaaatagtgcatgctcaatttggaacatttagagcatacaggaaagttatttatttggtaaatattttttaagcatttactatgtttcatgcattgtactagttgtagaggatataattgaatacaactacatgtagcccttgactttatggaactagtctagtataaagatttaagattgcctggcatggtggctcacgccactaatcccagcactttgagaggccaaggcaggattgcttgaggccagaagtttaagagtagcttggtcaacataatgagactccatctctaaaataaatagatagatagatagatagatagatagatagatagatagatagaagtagttagacaacacaaagcagtttcactcatcttgtggcaaggagttatgtatttctaatcaaatttggcaactcaagcattttcaacaaaatctacatgttttttcagaataaagtgaccaacacagaatgttacctgtaaaaatcagagcaataattgctatctaaaataattttgaaaattaagtggtactgaaaggctcatatagcaaaaatatggcctcctgtcattgtactttcctacttcccagactcaccattttcaacattttttagtagtttattttgccattttatagcatagtacctgacattttatttattcaacagacatttcttaagtacctaatacatgccattccttgtttgaagggatgctaaggatacagtggtgaacaaggcgttgtggggttgtatagagggtattcattcctaaccttgaaccaaatatttctttctgttggataatgcattaaaaattgcaaacagtttacaaacttttggagcaatggtggccttgatcataaagtagggactgcttctaccgtatacatgcttggtggtgtatttgtgatatctggctaaagtttctacatggaaattgactgactttagttttgagacttctgggaaccagtcaggcaaaatagtgaaactgtgtatcctgtttccaagagttgtcttttaaggttatctgcttcattcatttggcctgacttgctaggcaaatgcctagggtaaatatgatttgattaactataacaacaacagcaacaacaacaactttattttttagagcagtttgaggttcacagcaaaattgagcagaatgtacagagattttccctatacccgcttcccctacgcatgtgcggcctcccctactatcaacatcccccaccagagtggtttgttacaattaatgaacctacattgacacatcattatcactcaaggtccgtagtttacattagagtccactcttggtgttgtgtatgggtttggtcgattttataatgacatttatccaccattatagtgtcatacatagtaattttgctaccctaaaaatccagtgtgctccacctgttcctccttccctcctccctcatccctggcaaccactgaactttttaacatctccatagttttgccttttccagaatgtcatatcattggaatcacacagtatgcagccttttcaaatgggcttctttccgttagtaataggcatttaagtttcatcctcatcttttcatggcttgatagctcatttctttccctccctcttttcttccctgtcttccttccttcctcttctttcctgtttcctctttcttcttccttttttaagagacaaggtgtctcactctgttgcccaggctggagtgcagtggcccaatcatagctcattgcagccttgaattcctgggctcaagtgatcctcctgcgttagcctcctgagtagctgggatcacaggctccagtcattttagtgctgaataatatttcattatctggatgtaccgcctattcattcacctactgaagaatatcttggttgcttctaagttttggcaattatgagtgaagttactataaacattgtatacaagttttatgtggatgtatgttgtcatctcccttgggcagataccaaggagtgccattgttggatcatatggtaaatatatctttagttttgtacagaattctaggttggtatttttttctctctcagtcctttattttatttggagacagtctcgctatgtcgcccaggctgccatacagtggtgccatctgggctcactgaaacctccacctcccaggttcaagcgattcttgtgccttggcctcccaagtagctgggattacaggagtgcgccaccacgcctgctaatttttgtatttttagtagagacagggttttgccatgttgcccaggctggtctcaaactcctgaccttaagtgattcacccacctcaatctcccaaaatcctgggattacaggcctgagctactgtgcctgatctctctcagtactttaaagaaatatttcattccacttttcttttttttcttctttttgagatggagtctcactctgtcgcctgggctggagtgcagtggcgcgatctcagctcactgccacctccgcctcctgggttcaagtgattctcctgcctcagcctcctgaatagctgagattacaggcgcccaccaccatgcccagctaattttttgcatttttagtagagacgggggttccaccatgttggccaggctggtctcgaactcctgacctcgtgattcgcacatctcggcctcccaaattgctgggattacaggtgtgagctaccacgcctggcccactcttcttgcttacatagtttctgaggagatgtcagatgtaatttttatttttgctcttctgtaggcaagttgagttttttccccctctagcttctctcaggatttttttctttatctttgattttcagtagtttgaaaattatatgcctagctgtcagggttttttgcttgtttgtttttgttttctcaggtgtgactccagaaaggttctaaagaggagctttacaatctcttctctggggtttatggagacttcctttacccttctgtgttagccccttaaagcactgcgtcaaccttaaaagggcacaggaaagggtgtctatgccatttttatgccatttatcctgcttggtgttttctgagctttcttcatctgcggtttaatgtctcacattaatttgtagaaattctctgtcattgtttcaaatttttcttcagttcttttctctgtttcttcttctggtgttcccattatgcttttgtggttgtcgtacagttattggatattttgttccaggcttttttttttccagtctttttttccttttgcttctcggttttgtaggtgtctgttgagatactctcaagtgcagatattctttcctcagctttgtctagtttactaataagcccattaaaggcagtcttcatttctgttacagtctttttgatcagtagcatttcttttttattctttcttaaaatttctgtctttctgcttacattgcccatctgttcttgcatggtttctactttgtccattagagttcttaggatatttatcataattatttcaaatttctggtgtaacaattccaacatccctgcaacatccaagtctagtttcgatgcttactgtgtctcttccagctgtgttttttcctatttaatatgtcttataattttttcttgatagccatacatgatgcattaggtaacagaaactgctgtgagtggacctttagtaatgtggtggtaaggtgtgcatggaggggaaacattttcagtctgttagtgaacttttgtcaacttcacatgtgcttctcaagtccatcctgtaagtgggagagtagggctagagaggactgaagttgggtatatattaaatactttctcctacaaagaagcctagaggggacgcattaggggattttttttcccccagtattcactgtgatgacccttattgagctcctggaggtaaaactcacaaaactgtggttctcccccctgcccatattactacatgtccctggagtttatatctttcagacttgtctgcactgagcttccaccaatttgtcaaatacagatcaggtttccctaccacccgtgcagttgaaaacccacatacaacttttgactcctccagagcttaactactcatagcctgctattgactggaagccttgccaataacataaacagttgattaatacatattttatatgttttctgtattatatattgtattcttacaataaagagaaaagaagatgttattaagaaaatcataaggaagataaaatatatttactgttcattaagtggttcccatgggtgctggttcccatggaggttgccccttgtgagtttttgctcagggaagttgtgattctctatatttgcctgttggtctcctaatttgggagtcatcagttttccctgtgacctcacttctcttacagagttaagaacagttgttggtttttcagtttgttcagtgttttacatgttgttagaacacagtggtacttctaagtttcttaacatgctagatcagaaacctgaagtctcacctaatttggctttttatattttttcttcttttttttcttccattgctaccaaagcatttttcatctgtgtctggggtgacattagagcagaatgtgatttctaggtaaacattattgggctccctagcagaaaaatttttgaaagtagtacatgaattctgtataattaaaattttcttttcatcttaataggtataggtaataggcacggcctattttttttttgctcaacagtctaaaatagtaatttaatcacctaatagccttagttatatagttgaaagaagagttggaaatctgattcatgggttggaaatcacctgtcacatatgagttttaggcactggtcactttattttgaaacagctttggggttttttcctttttcaactcataataggctttaacagcttttagttttgtttctgtttttttaacagcatgagttgccaaatttggttatagcttcttggtacaagatgggtaaatttgctttgtgttgtgtaattactttttattttaaatgctacctcttttatgaacactaactttacactaagattaggaaaatgagaattgcatgtctgcaacaaatagctatctgtagtattaaattgtgaaaatgtagactttggattggagctggcatctcttaatatgtaattgtaacatagagtaaataagtattttgtcccttgtagggtcaaacagtacagtgcatgggcagaattagagatgtaggcttttttttttttttttttttttactggcttagagaaccgtttgatcagctaatatggaattaagtccctagggctgcccaggcacaacattaactgctattaaaggaaaatttaaaagagtattagtgaaggttaaatactgaccatggacatctggcaaaattgatgttttttttcccctccaccattgtttatagtttattgttatttatcagagaattaatgtttattttcagaatctattaccataagaaatctgtttgaggacttcgtatgtgccaggaattctactaaataatgatataatgctgaacagaattagataggatcctcacttcgttaagcttacagtctagtggtatagatcaacattaatcaaagaataacacaaatagaaagcagagcagtggttcatgggattgactgtagagaagcatgagggaagttcccaggtgatggaaaatactttatttcttaatcgtggtggttacatgtgtgcatatgtttatgaaaatatattgtacatttaaagtggatacattttatcacatgtaaattatgactctataaagttaattaaaaagaataactcaggtaaggtggtgtgtgcgcctgtagtcccagctatttctgaggcaggaagatcacttgagcccaggagtttgagttcagcatgggcaacatgagacctgtgagactttgtctctaaaaaaatttaaataaataactaagataaatgtaaaattacagctgtagtaagttctacaaaggagagttacatgggctatgacgatgtaagatagcaagaactgacattggcagggaggaaatgatgatgagtagaagtaaataagtgaagtgtggggattgatgtcaaggggacagtataaaagaaataacagcatgcgccaaggccctaaaattggaaagtccttggcaaattaaaggagtttgaaaaaggccattgtgtgcaaagcagaaaataggtactacaaggtaaaagatggagctaagcggtaggtaaggctaaaccttgtcagccattgttaaatattgaattgtatcctaagcacaactcagtggaaagcagttaaagttctttaattgggggaggcaatgaaggggtaataaaattggttatagaaatactgctctggctctagtgttgagaatgaattggagtagccagagtagattcaagaagactttagtaagattattccaacaggccaggacctgttatagggtggtggcaatggagagagatggacagaatggagagtgtatttaggaggtaaaaatgacagaacttggtgatgcactgaatgtgaaatggggaaggtgtctaggaggactactaggtttatggtttgcgtattagggtggatgatagcagtttcatttactgagacagggagccctggcagagtacccagcttttagagtgggtagggggaaggggagagtgcatctggtgttgggcattttgaagtgatttacatacaacaaactgaaggtatctttaacactgagtccagcaggttagcatatttattcagcaagcattgcacctttttttgttgtttttggggtcttcaactcctggcctcgaatcctccctccttcccccgcctctcccagcctccgcctcccaaagtgctgggatttcaggagtgagccaccgcgcctggccagcatcgcgctgtttgtgcagtgtgccctgtgctaggtcttgcagtgggtaccagtagagacataaaagtacaaaagataattggacgtttagtagagtcctgaaagggggcgggataggaagatacctaaccataagaaaaaccagcaagagcggaaaaggagctagtcctccagatcaataagttaatcacttatgtttgtgattccctgcattttgggtgattctctgtcgaggtcctcttaagtccagacttttgatataatctgcagtttgcgccatttggattcctgaagcatctttacaagccacctacattccttatggagctgtggcacaacagcaagcccacgatgtctcaccggattaataaaaatataggcgctcacgcttttgtttaccgatatagtatctcctcctcccctcactccatcaacccccacgcgacacaactttccggaagtaagcaaaatccgttatcaaggtgaaactccggggaccaggctccacagctgccataaactggatggcacgttagaagccggtgggtgtaggtgaggcacgctggcgcccgcgggcccttctccagccgctacccagtgggaatccgcggggctgaagccccgaaaccaggctgagcgtcccagagcgcaacctccctttcccccagcagcgccggcgccgcagaagccgcgtgtccccaggcgcactcccccaaggtgaacccccgccccccacggaggcggctgggtcgcgggtctgggcggggcgctccggacgccctcccgccgctgcgcacccctcccgcgagctgccagctccctcggcctctccacccaaaactggcccaaccgccaatcgtctgcctctcacctcctacagcaggtgacccatggccaatcgccaggggtctctttgccaggagccgccagggccagccaatcggggcgacccctccgccggggaggggacgggaaaggggtggggggtgaagggggtgaagggggtgtcccgggggacgggctgaacctcagtcaggaccgcctgcaccgcagtccggggatcgggtcgaggggagaagaaaaaggggtgctcgggagcagcccccggctacctcccctggaggcacagagggcgggggccttggcgaatggctttcttgctggccacttgcggagtgagtagaccccgagggtctgggagaggggccggcccctacccctgagtccccggggtcccggccgccaggccggagcgcgaatgtcgtgctcaccctgcctccttcccgccgccccctgggctttttgatgacaagcttcaaaactgcaaagaagatgaacagagaaagaaaattgaaactctcaaagagacaacaaatagcatggtagaatcaattaaacactgcattgtgttgctgcagattgccaaagaccagagtaatgcggagaagcacgcagatggaatgataagtactattaatcccgtagatgcaatatatcaacctagtcctttggaacctgtgatcagcacaatgccttcccagactgtgttacctccagaacctgttcagttgtgtaagtcagagcagcgtccatcttccctaccagttggacctgtgttggctaccttgggacatcatcagactcctacaccaaatagtacaggcagtggccattcaccaccgagtagcagtctcacttctccaagccacgtgaacttgtctccaaatacagtcccagagttctcttactccagcagtgaagatgaattttatgatgctgatgaattccatcaaagtggctcatccccaaagcgcttaatagattcttctggatctgcctcagtcctgacacacagcagctcgggaaatagtctaaaacgcccagataccacagaatcacttaattcttccttgtccaatggaacaagtgatgctgacctgtttgattcacatgatgacagagatgatgatgcggaggcagggtctgtggaggagcacaagagcgttatcatgcatctcttgtcgcaggttagacttggaatggatcttactaaggtagttcttccaacgtttattcttgaaagaagatctcttttagaaatgtatgcagacttttttgcacatccggacctgtttgtgagcattagtgaccagaaggatcccaaggatcgaatggttcaggttgtgaaatggtacctctcagcctttcatgcgggaaggaaaggatcagttgccaaaaagccatacaatcccattttgggcgagatttttcagtgtcattggacattaccaaatgatactgaagagaacacagaactagtttcagaaggaccagttccctgggtttccaaaaacagtgtaacatttgtggctgagcaggtttcccatcatccacccatttcagccttttatgctgagtgttttaacaagaagatacaattcaatgctcatatctggaccaaatcaaaattccttgggatgtcaattggggtgcacaacatagggcagggctgtgtctcatgtctagactatgatgaacattacattctcacattccccaatggctatggaaggcaagtgtgtccatttcctctgatcagcagtagactctgctgttccttgagacatgccccttccccctcttcctcttaactgtcaaccttacctaaaaacttttgattttgcaggtctatcctcacagtgccctgggtggaattaggaggagaatgcaatattaattgttccaaaacaggctatagtgcaaatatcatcttccacactaaacccttctatgggggcaagaagcacagaattactgccgagattttttctccaaatgacaagaagtctttttgctcaattgaaggggaatggaatggtgtgatgtatgcaaaatatgcaacaggggaaaatacagtctttgtagataccaagaagttgcctataatcaagaagaaagtgaggaagttggaagatcagaacgagtatgaatcccgcagcctttggaaggatgtcactttcaacttaaaaatcagagacattgatgcagcaactgaagcaaagcacaggcttgaagaaagacaaagagcagaagcccgagaaaggaaggagaaggaaattcagtgggagacaaggttatttcatgaagatggagaatgctgggtttatgatgaaccattactgaaacgtcttggtgctgccaagcattaggttggaagatgcaaagtttatacctgatgatcagggcagtaggcataattcagcaacaaacaatcttcctttgggagaaacctgttcattccaatcttctaattacagtggttcctatctcagggatactggactttctgacgcagatgaacaattaaggggaaaagcttcccttttccctctgtggcagttacgattttgacttcagtcctgagaaaaacttcaggttttgaaaatcagatgatgtcttctccttttccaaacaccacacgttgaaagcatttataaatccaagtctgaaactctgcgctctagtactgctgttaagatacacaacttgtttcttagttcatataatctcgggatacacacacacacacacatatatatacacacacatacgtatacacacacatacatatatataaatatacctgatgccagatttttttcataaatattctgcctactgtaaatatggggnccccgggtggntaaanatngngccggtttaacccggggggaattcggggtaccacacaaaaccattgggaggcaca

SEQ ID NO: 735127 - DNA, 18685 bp, Homo sapiens
gtaagggtctttacatggtttccagatagttcattagttgttgctttctttttttgtctgttttctgttttttttttttaaataactgtggtatgatgtaataggaacttataatttctgagttgcttatttttcctttacagttatagtaaagttatactcatttattttctcctgctttctgcagagtaaaatactgatttttgtctagaaacaagacagtgcaagacaatgttgaaagtgaaattctatgttaaaatatgccagatttattttaagaatttaatatctgtagtcagttatcaatacaaccaaattacataattatgcatgataataggtaaatactgagaagttcacctcattttcttgttaaaggatttggctattaccgtatgtgtcagttagtactcttttgtatggtagtgaaagaaaactcaacccaaactgattcatgaagaagaaagtaaatctggttagatgtggtttgaattaggtaattcatgtcatgaggactcagatctcccatctctatttctacgttccacttttgcattggcttcattttcggttaggttctcccttggtggtggtaaggtggttgtagcaatgtcagcctcccatttttggaaccgagtccataggaggctattctttctagaccttaataggagtaacacaattattgctcatcaccctagctttggccatgtgtcaaatcctgaccagtcacaatttcacagtcatagattctaccctggagctgggatgttactggcctcactagaaacacattgctgatagggtagaaggtgtgttcatcctacccaacccgacccgcaccaaagtcagaatagggaaaaacagatgttgggtgacatgcaactaacgtctgccgtactacactgaagatatttttctatgtttattctccagtgaaagagcttatatttgtggtacataggggattttgttttaatttagaaaatttaattgtagaaaacatgttttataaccctttctctgtactttgttctatatcaggaattgacttgattagataaggtgacatagggtatcttaggccctacaagatagtaaaccccccatcacttgaaagtattcagtagaggcttaaaaaacattattaaaggatgtggttattaggggactttaagaaatgaatatgaaattgaagtaggaaatctttaagctactctgtgagttatgccttttaaaagcaatttgtaattcctgtagatttcttttaaatttaggcagtttcataaatgactatagcatcattttagcaaatttgtgatcctgtaagaggaggataagtgttttttgtttgtttgtttgttttttgtttttttgagacagagtctcactttgtaccccagaaagtaaatctagttagatgtggtttgtctcggctcactgcaacctccaccccgtgcgttctagcaattctcctgcctcagccaccacacctggcctaagaggggaggataagtgttttagtgatcatattagactgaatgtggcagatgagatttcccgcccccccattgttggttagactgacattcaacattcaacaagagccacctgcccttgtaggcatttctgccactatacccctacataaacctagagtgctattgcttacttgctttccttcaaatacattttttcatttgtggcctccacattcttgtgtgtgatgtcctttctctgtgaaatgtcttctaccctttttttcaaagcctagtttagaactgacctcttctatgaaccctctgccgactggcctttccttccccagtcccccaagttcaaaatgatctctttcctttgaatactatagtatttgcacaattcactatctccttatcatattcttcttgtttatttgttatcagctgatgttgacatcataagttcaggttcctaactagatccaatattggaatttttcagcttttgctaagaagagagcttgtatgtctttgggaataatgggcagaaaaagataactttgagaagtcttagacttctaatagctttgatatttaaaagtacatgtaatacaagaggtttttttcctacatttaatgcatggagaagataggacatttagaaatatggaattaatgttcatttgactggcaaaagattattttctcagatgtagtgaagtgtggtaaagaacttcactctagagccagaatgtctgtgtttgtatcccagagcccaccacttacatttaaccattaacattcaacttactgtctctgagtttcagtggcctcatctataaaatgaggataataagagtacctacttcatagagttgttttagtggttaaataaactaacgtaaacttgctagaacttgataaactaatattggatgagaactggttgaaataatgcctggctatagtaaaaacttggtaaatgttagttgccattacaatgcaactactgttcctaccattccctctgccagtgcctggtattcagtagcactcagtaaatgttagttaaatgaagaaataactgaaggaatgaatgaacaaatggttgatgtagagattgcttttccattgttgtttattgaatattttgagatgtataacatactgtctgttaggcactgtgggatgggcactcacggagctgtcttccaaaggggtataggagaggagacgcagtgatctcagcaacctacctttaaaacatatcctagtatctactgccatgttaggttctcttcttttgctttttttaaaaaaaaattctcacaaaactccccccacccacttcagtttatagatgaggaagctcctactacataatagtgcttcccagtctaattcttgacctcattgtatttatatgtcctttttttttttgacagagtctcactcattgcagtggcacaatcacagctcactgcaacctctgcctcccctgctcaagtgatcctcccacctcaacctcctgagtagctgggactacaggcatgcaccaccacgcctggctaatttttgtatttttttgtagagatgcggttttgccatgttggccaggctggtctcgaactcctgggctcaagccatctgcccactttggcctctgagagtgctgagattataggcatgagccaccattcccagccatgttttcctttttcattgaactttatctactttagccattaaactccactccattggtcttgtcattactaagagctgaaccacctgcaaaatattaagttaaaaagcgttttctttgacaacagttttcttttcttcatcttcctctatcactttacttctgaacttttattctctcattttgatctgacccctacttctctgtttttcctggccatttagtactttcttgttttgctcatcccatttcccagtggagaccttctggtctgctgctttatcactggttttgttagaagacatacaaatggcaaggaggtatatgaaaaggtgcctaacatcattgatcatcagagaaatgcagaccaaaactacaatgagatatcatttcaccccagttaaaatggctttttttttttttttccaaaagacaggcaataacaaagtactggtgaggatgtggagtaaagggaacccacatacactattagtaggaatgtaaattagtacagccactgtggagaacagtttgaaggttcctcaaaaaactaaaaatagagctaccatataatccagcaatcccactgctaggtatatatccaaaagaaaggcaatcaatatacggaagagatacctgcacacccaggtttattgcagcactattcacaatagccaagatttggaagcaacccaggtgtccaacagatgaatggataaagaaaacatggtatataaacacaatggaatactattcagctgtgaaaaagaatgaaatcctgtcatttgcaatcctgtcttgaatagaactggaggtcatgatgttaagtgaaataagacaggcacaaacttcacatgttctcacttatttgtgggagctaaaaattaaaacaatcgaactcatggagctagagaatagaattatggttaccagaggctggaagggtggttgggcgtataagtgtagggggagtggggatggttaatgggtacaaaaaaatgagaacgaataagatctacttgataacacaacagggtgactatagtcaacagtaattatacatttaaaaataactagaagagtataattagattgtaacacaaaagataaatgcttgaggtgatggatacctatttaccctgatgtgattattacttatttcatgcctatatcaaaatatttatactccaaaaatatatatacctactatgtacccacaaaaatttaaaaatttatatattgtttttgctatcacctttagaatttcttgtcattggatagttcgtctgtataccattctggtcttcattccccagggcccccgttgtctgatttttctgcttctagaactgttagaggtcacaaaagcaagatggttgtatctatcacaatttttgtctgactttaactgggtatctgttacgatttagtagtcatcttactgacttcttgttggtttccaattgaatcctcacagtagactgttttcattgtaatcagtatcgaattatagcctgttcccttcttcataaatgaaggctttcttcttcaacagttcttagtgacttcacctgtactttatttctctgctttgaatatttcgaagaaaacatattcttgctctttcccaaggttaacactacatacattaccttgaccacaggatgttttcttgcagattgtgacctaattccatcacccttcagcagcccccaccgttttcatggattcagctaaaccttctgtaagatgactctttttccccctaatctttatatctcttttgatatgtagctttagtctcactttttttccttttggattttgccagttagatgtctccctggaattccacttcagcatggctaagactaagcttgtcttctctttcctccccaaagcaaattgtaattaggatagactgaaggtgacagaagataactaagatcttcttcatcctttcggctcttatggaagctgaattccagtagtcattctaaatttgttgtatgtcagcttatggtatcttttcatgtctttacattcagccaaagaggaagttccttgaaggggagaccagagggcgtgctgtgcttcttaatcctctctttcttaaccagtaagaggcattcagtagatatctgatgatactgattaatagaggggaacttttcagattcttttttttttttaaccctagtaagctttagtacaaactaaatgctgagagattatcaagtaagggattgatcatcacaagaagactcaggatgttacatcctgtaggttttatagtttcctatattgtaaaaaatatgagttatagcagcttgtctggatgtcatacaggtataaaaatcagttttataaacttgagtaaattggggcccattttagaaaaaactcttgcaggctgtgaatgccaatatataagtaaagtattaagtataatgttatttaatgtgggcaaacataaagccaggtgtaaattttttaggtttaaaatcttatagaactatacatccaaaagaaaatttcaagttaaacataatacaaagcaatacaatctaaattaacattaatttaatgtgatgaatgatattgccttgctaaaagtgggtcactacttacaatgtgcaaatggtactcatcgttagggtatagattcttttaaactatgacatacgtacactaccatgtggaacgtgatgatgtgttctctgttctaactactgggaagacttccttggcatagcacatgccatggggtcagttggctttgacttcatatagatatgccatttacttggtcagtgtcacttctatgacaagtagtatgttgtgccagtttgattataagtacaaatatgggcaatgaagtaacttggttttaaggttgttactaagctgagtaacagtgtgtggctatacaaatttttataggctatcaggaatgaaaacacaggagattgttgtagattcaagtattttagattcaagtttgaagatgctcatgcagatgtttaactgagttgtatagacctttatgtttctttctttttctctttttttttttttgagacagagtcttgctctgtcacccaagctggagtgcaatggtgtgatctcggcttactgcaacctccgcctcccaggttcaagcaattctcctgcctcagcctcccaagtagctgggattacagatgtgcaccacgacgcccagctgattttttgtattttagtagaggcggggtctcaccatgttgtcaagatggtctcaatctcctgaccttgtgatccacccacctctgcctcccaaagtgctgtgattacaggcgtgagccaccgcgcctgactgacctttatgtttcttaactttatgctatacatcagttgatatttcaaaaatttaaatggtttctatgattattctttgggctaagaaattgggcattaattgtcctcatatgtatggtttttgtggctacttcatgtagattttatttttggtggttatcaaattggaatttttttttttttttttttttttgagacggagtctcattctgtttcccaggttggagtacagtggtgcaatctcagctcactgcagcctcgacctcccaggctcaagcagtcctctcacctcagccttctaagtagctgggactacaggcacgcaccaccacacctggctagttttttgtgtttttagtagagatggggttttaccctgttggccaggctggtcttgaactcctggcctcaagtgatccacctgcctcagcctcccaaagtgctgggattagaggcatgagccaccacacctggctgaaattggaatttcattggtactgcctgtaattttatgttaatttttttttttttttgtcgtcactagcttttatctaaagcccctagagagaaaggccatgataccttgtatacaaggttataagagtatacaagggaaagggagggctgaagggaacagggtgggctggtacaagcctcattagaaataccattgagtctgtgagtaaaacatcattatatgaaaaggagatgtggttttagggtggtccaattacttttgcaccagcctaataaaattacaagtcattatcaatagagacattgtaaaacctttttttttcccaaaagaagtatcaggtatgataattacatgtctgcccaactttcgttatagattaacataacttaattgtatttaaggtacaatttaggagagttgctgaaaaatgaatctttagtattgggatgccttgattctaccctcaatagctataatggattatgtgtctgagtagattaataaaaatcttttgagcatttttcttgaactacttcactgaagattagctttttgagcatccattttaatttctcagtatataaggatcggtttatcacaactgtattgttttccctggccttgttagattatattttcatatcatgtagaaaaataggtgtattcgttctcccttgaagtcctttgtctcccaaaggaaatggttgcaatacagatgtgtcacctcttccacaggtaaagtggaatggagaagtagccagttaaatagtgcatgctcaatttggaacatttagagcatacaggaaagttatttatttggtaaatattttttaagcatttactatgtttcatgcattgtactagttgtagaggatataattgaatacaactacatgtagcccttgactttatggaactagtctagtataaagatttaagattgcctggcatggtggctcacgccactaatcccagcactttgagaggccaaggcaggattgcttgaggccagaagtttaagagtagcttggtcaacataatgagactccatctctaaaataaatagatagatagatagatagatagatagatagatagatagatagaagtagttagacaacacaaagcagtttcactcatcttgtggcaaggagttatgtatttctaatcaaatttggcaactcaagcattttcaacaaaatctacatgttttttcagaataaagtgaccaacacagaatgttacctgtaaaaatcagagcaataattgctatctaaaataattttgaaaattaagtggtactgaaaggctcatatagcaaaaatatggcctcctgtcattgtactttcctacttcccagactcaccattttcaacattttttagtagtttattttgccattttatagcatagtacctgacattttatttattcaacagacatttcttaagtacctaatacatgccattccttgtttgaagggatgctaaggatacagtggtgaacaaggcgttgtggggttgtatagagggtattcattcctaaccttgaaccaaatatttctttctgttggataatgcattaaaaattgcaaacagtttacaaacttttggagcaatggtggccttgatcataaagtagggactgcttctaccgtatacatgcttggtggtgtatttgtgatatctggctaaagtttctacatggaaattgactgactttagttttgagacttctgggaaccagtcaggcaaaatagtgaaactgtgtatcctgtttccaagagttgtcttttaaggttatctgcttcattcatttggcctgacttgctaggcaaatgcctagggtaaatatgatttgattaactataacaacaacagcaacaacaacaactttattttttagagcagtttgaggttcacagcaaaattgagcagaatgtacagagattttccctatacccgcttcccctacgcatgtgcggcctcccctactatcaacatcccccaccagagtggtttgttacaattaatgaacctacattgacacatcattatcactcaaggtccgtagtttacattagagtccactcttggtgttgtgtatgggtttggtcgattttataatgacatttatccaccattatagtgtcatacatagtaattttgctaccctaaaaatccagtgtgctccacctgttcctccttccctcctccctcatccctggcaaccactgaactttttaacatctccatagttttgccttttccagaatgtcatatcattggaatcacacagtatgcagccttttcaaatgggcttctttccgttagtaataggcatttaagtttcatcctcatcttttcatggcttgatagctcatttctttccctccctcttttcttccctgtcttccttccttcctcttctttcctgtttcctctttcttcttccttttttaagagacaaggtgtctcactctgttgcccaggctggagtgcagtggcccaatcatagctcattgcagccttgaattcctgggctcaagtgatcctcctgcgttagcctcctgagtagctgggatcacaggctccagtcattttagtgctgaataatatttcattatctggatgtaccgcctattcattcacctactgaagaatatcttggttgcttctaagttttggcaattatgagtgaagttactataaacattgtatacaagttttatgtggatgtatgttgtcatctcccttgggcagataccaaggagtgccattgttggatcatatggtaaatatatctttagttttgtacagaattctaggttggtatttttttctctctcagtcctttattttatttggagacagtctcgctatgtcgcccaggctgccatacagtggtgccatctgggctcactgaaacctccacctcccaggttcaagcgattcttgtgccttggcctcccaagtagctgggattacaggagtgcgccaccacgcctgctaatttttgtatttttagtagagacagggttttgccatgttgcccaggctggtctcaaactcctgaccttaagtgattcacccacctcaatctcccaaaatcctgggattacaggcctgagctactgtgcctgatctctctcagtactttaaagaaatatttcattccacttttcttttttttcttctttttgagatggagtctcactctgtcgcctgggctggagtgcagtggcgcgatctcagctcactgccacctccgcctcctgggttcaagtgattctcctgcctcagcctcctgaatagctgagattacaggcgcccaccaccatgcccagctaattttttgcatttttagtagagacgggggttccaccatgttggccaggctggtctcgaactcctgacctcgtgattcgcacatctcggcctcccaaattgctgggattacaggtgtgagctaccacgcctggcccactcttcttgcttacatagtttctgaggagatgtcagatgtaatttttatttttgctcttctgtaggcaagttgagttttttccccctctagcttctctcaggatttttttctttatctttgattttcagtagtttgaaaattatatgcctagctgtcagggttttttgcttgtttgtttttgttttctcaggtgtgactccagaaaggttctaaagaggagctttacaatctcttctctggggtttatggagacttcctttacccttctgtgttagccccttaaagcactgcgtcaaccttaaaagggcacaggaaagggtgtctatgccatttttatgccatttatcctgcttggtgttttctgagctttcttcatctgcggtttaatgtctcacattaatttgtagaaattctctgtcattgtttcaaatttttcttcagttcttttctctgtttcttcttctggtgttcccattatgcttttgtggttgtcgtacagttattggatattttgttccaggcttttttttttccagtctttttttccttttgcttctcggttttgtaggtgtctgttgagatactctcaagtgcagatattctttcctcagctttgtctagtttactaataagcccattaaaggcagtcttcatttctgttacagtctttttgatcagtagcatttcttttttattctttcttaaaatttctgtctttctgcttacattgcccatctgttcttgcatggtttctactttgtccattagagttcttaggatatttatcataattatttcaaatttctggtgtaacaattccaacatccctgcaacatccaagtctagtttcgatgcttactgtgtctcttccagctgtgttttttcctatttaatatgtcttataattttttcttgatagccatacatgatgcattaggtaacagaaactgctgtgagtggacctttagtaatgtggtggtaaggtgtgcatggaggggaaacattttcagtctgttagtgaacttttgtcaacttcacatgtgcttctcaagtccatcctgtaagtgggagagtagggctagagaggactgaagttgggtatatattaaatactttctcctacaaagaagcctagaggggacgcattaggggattttttttcccccagtattcactgtgatgacccttattgagctcctggaggtaaaactcacaaaactgtggttctcccccctgcccatattactacatgtccctggagtttatatctttcagacttgtctgcactgagcttccaccaatttgtcaaatacagatcaggtttccctaccacccgtgcagttgaaaacccacatacaacttttgactcctccagagcttaactactcatagcctgctattgactggaagccttgccaataacataaacagttgattaatacatattttatatgttttctgtattatatattgtattcttacaataaagagaaaagaagatgttattaagaaaatcataaggaagataaaatatatttactgttcattaagtggttcccatgggtgctggttcccatggaggttgccccttgtgagtttttgctcagggaagttgtgattctctatatttgcctgttggtctcctaatttgggagtcatcagttttccctgtgacctcacttctcttacagagttaagaacagttgttggtttttcagtttgttcagtgttttacatgttgttagaacacagtggtacttctaagtttcttaacatgctagatcagaaacctgaagtctcacctaatttggctttttatattttttcttcttttttttcttccattgctaccaaagcatttttcatctgtgtctggggtgacattagagcagaatgtgatttctaggtaaacattattgggctccctagcagaaaaatttttgaaagtagtacatgaattctgtataattaaaattttcttttcatcttaataggtataggtaataggcacggcctattttttttttgctcaacagtctaaaatagtaatttaatcacctaatagccttagttatatagttgaaagaagagttggaaatctgattcatgggttggaaatcacctgtcacatatgagttttaggcactggtcactttattttgaaacagctttggggttttttcctttttcaactcataataggctttaacagcttttagttttgtttctgtttttttaacagcatgagttgccaaatttggttatagcttcttggtacaagatgggtaaatttgctttgtgttgtgtaattactttttattttaaatgctacctcttttatgaacactaactttacactaagattaggaaaatgagaattgcatgtctgcaacaaatagctatctgtagtattaaattgtgaaaatgtagactttggattggagctggcatctcttaatatgtaattgtaacatagagtaaataagtattttgtcccttgtagggtcaaacagtacagtgcatgggcagaattagagatgtaggcttttttttttttttttttttttactggcttagagaaccgtttgatcagctaatatggaattaagtccctagggctgcccaggcacaacattaactgctattaaaggaaaatttaaaagagtattagtgaaggttaaatactgaccatggacatctggcaaaattgatgttttttttcccctccaccattgtttatagtttattgttatttatcagagaattaatgtttattttcagaatctattaccataagaaatctgtttgaggacttcgtatgtgccaggaattctactaaataatgatataatgctgaacagaattagataggatcctcacttcgttaagcttacagtctagtggtatagatcaacattaatcaaagaataacacaaatagaaagcagagcagtggttcatgggattgactgtagagaagcatgagggaagttcccaggtgatggaaaatactttatttcttaatcgtggtggttacatgtgtgcatatgtttatgaaaatatattgtacatttaaagtggatacattttatcacatgtaaattatgactctataaagttaattaaaaagaataactcaggtaaggtggtgtgtgcgcctgtagtcccagctatttctgaggcaggaagatcacttgagcccaggagtttgagttcagcatgggcaacatgagacctgtgagactttgtctctaaaaaaatttaaataaataactaagataaatgtaaaattacagctgtagtaagttctacaaaggagagttacatgggctatgacgatgtaagatagcaagaactgacattggcagggaggaaatgatgatgagtagaagtaaataagtgaagtgtggggattgatgtcaaggggacagtataaaagaaataacagcatgcgccaaggccctaaaattggaaagtccttggcaaattaaaggagtttgaaaaaggccattgtgtgcaaagcagaaaataggtactacaaggtaaaagatggagctaagcggtaggtaaggctaaaccttgtcagccattgttaaatattgaattgtatcctaagcacaactcagtggaaagcagttaaagttctttaattgggggaggcaatgaaggggtaataaaattggttatagaaatactgctctggctctagtgttgagaatgaattggagtagccagagtagattcaagaagactttagtaagattattccaacaggccaggacctgttatagggtggtggcaatggagagagatggacagaatggagagtgtatttaggaggtaaaaatgacagaacttggtgatgcactgaatgtgaaatggggaaggtgtctaggaggactactaggtttatggtttgcgtattagggtggatgatagcagtttcatttactgagacagggagccctggcagagtacccagcttttagagtgggtagggggaaggggagagtgcatctggtgttgggcattttgaagtgatttacatacaacaaactgaaggtatctttaacactgagtccagcaggttagcatatttattcagcaagcattgcacctttttttgttgtttttggggtcttcaactcctggcctcgaatcctccctccttcccccgcctctcccagcctccgcctcccaaagtgctgggatttcaggagtgagccaccgcgcctggccagcatcgcgctgtttgtgcagtgtgccctgtgctaggtcttgcagtgggtaccagtagagacataaaagtacaaaagataattggacgtttagtagagtcctgaaagggggcgggataggaagatacctaaccataagaaaaaccagcaagagcggaaaaggagctagtcctccagatcaataagttaatcacttatgtttgtgattccctgcattttgggtgattctctgtcgaggtcctcttaagtccagacttttgatataatctgcagtttgcgccatttggattcctgaagcatctttacaagccacctacattccttatggagctgtggcacaacagcaagcccacgatgtctcaccggattaataaaaatataggcgctcacgcttttgtttaccgatatagtatctcctcctcccctcactccatcaacccccacgcgacacaactttccggaagtaagcaaaatccgttatcaaggtgaaactccggggaccaggctccacagctgccataaactggatggcacgttagaagccggtgggtgtaggtgaggcacgctggcgcccgcgggcccttctccagccgctacccagtgggaatccgcggggctgaagccccgaaaccaggctgagcgtcccagagcgcaacctccctttcccccagcagcgccggcgccgcagaagccgcgtgtccccaggcgcactcccccaaggtgaacccccgccccccacggaggcggctgggtcgcgggtctgggcggggcgctccggacgccctcccgccgctgcgcacccctcccgcgagctgccagctccctcggcctctccacccaaaactggcccaaccgccaatcgtctgcctctcacctcctacagcaggtgacccatggccaatcgccaggggtctctttgccaggagccgccagggccagccaatcggggcgacccctccgccggggaggggacgggaaaggggtggggggtgaagggggtgaagggggtgtcccgggggacgggctgaacctcagtcaggaccgcctgcaccgcagtccggggatcgggtcgaggggagaagaaaaaggggtgctcgggagcagcccccggctacctcccctggaggcacagagggcgggggccttggcgaatggctttcttgctggccacttgcggagtgagtagaccccgagggtctgggagaggggccggcccctacccctgagtccccggggtcccggccgccaggccggagcgcgaatgtcgtgctcaccctgcctccttcccgccgccccctgggctttttgatgacaagcttcaaaactgcaaagaagatgaacagagaaagaaaattgaaactctcaaagagacaacaaatagcatggtagaatcaattaaacactgcattgtgttgctgcagattgccaaagaccagagtaatgcggagaagcacgcagatggaatgataagtactattaatcccgtagatgcaatatatcaacctagtcctttggaacctgtgatcagcacaatgccttcccagactgtgttacctccagaacctgttcagttgtgtaagtcagagcagcgtccatcttccctaccagttggacctgtgttggctaccttgggacatcatcagactcctacaccaaatagtacaggcagtggccattcaccaccgagtagcagtctcacttctccaagccacgtgaacttgtctccaaatacagtcccagagttctcttactccagcagtgaagatgaattttatgatgctgatgaattccatcaaagtggctcatccccaaagcgcttaatagattcttctggatctgcctcagtcctgacacacagcagctcgggaaatagtctaaaacgcccagataccacagaatcacttaattcttccttgtccaatggaacaagtgatgctgacctgtttgattcacatgatgacagagatgatgatgcggaggcagggtctgtggaggagcacaagagcgttatcatgcatctcttgtcgcaggttagacttggaatggatcttactaaggtagttcttccaacgtttattcttgaaagaagatctcttttagaaatgtatgcagacttttttgcacatccggacctgtttgtgagcattagtgaccagaaggatcccaaggatcgaatggttcaggttgtgaaatggtacctctcagcctttcatgcgggaaggaaaggatcagttgccaaaaagccatacaatcccattttgggcgagatttttcagtgtcattggacattaccaaatgatactgaagagaacacagaactagtttcagaaggaccagttccctgggtttccaaaaacagtgtaacatttgtggctgagcaggtttcccatcatccacccatttcagccttttatgctgagtgttttaacaagaagatacaattcaatgctcatatctggaccaaatcaaaattccttgggatgtcaattggggtgcacaacatagggcagggctgtgtctcatgtctagactatgatgaacattacattctcacattccccaatggctatggaaggtctatcctcacagtgccctgggtggaattaggaggagaatgcaatattaattgttccaaaacaggctatagtgcaaatatcatcttccacactaaacccttctatgggggcaagaagcacagaattactgccgagattttgtaggtattttttctgccttagagctcttatgcttttctgaaataactgccttttgtcttgaactacagcttctggattaggagtgtgaaagaatggttctgtctttgtaagcgtgtttcacattttatgtgtcatgtcttttgctgaagtcccatatcagaagaagacctaaaacatatattcagagcagtcagaggtcattgataggtttccttcctaaaaacctgacttgcaatgttgaactaaaagaggccttcctaggttgcctagctaaaccagattatggatccctaatttattcttgccagattgaatgatgagctggtccttacagcagactttgtgacccctgcagcactgcctcctggtcctcacagctatccctttttctgtgcctttgctggggaaaaacagtaaccatcacattttgcacgcatctggcttgcttccacttgacactcttgggtcacgtgcagatgactgtgccagtcagtggaaagtctatagtgatggcaccatgactctctctgcctctggaacccttaactgggggggaaggggacagtgggaaagaaagtttcaggcgttgatagcagctctcctccctctgccctggtcatgtctcccttttctggcctctttcaatcctgtttatgccttgcccttcctaaccaggcctttgctgtgttgcttatcttctcacattccatagttgtgtgtccaagtagaggtctgttacggcttttgcagaatggatccttgctcagggaaagtattcacaccatctggcacagaggtccctttcaacctgaggatgaaagcctgcattatattcttaagcaaagccttccctgacccccagtgcccatgtaagctcaccacagcacttaccacctagaatttcaatggtggttacgtctctctccactacgctgtgaacagcttgaggatagggaatttgccaactctgttatggtccttgcacccagaataggacgttcttgcccaaacccaccattcttgggatctcaagttcataagcgtcctgttgaaggccctcattcttatagttagccctggggagtccagttctgttaagatgctttcatcaaaaacttcacagttgctcttctgtgctctactctgtagttgggccacactgagcagattctttggtagaattttcaacttgagactaacacaagtatttccttttctgttcag

SEQ ID NO: 735128 - DNA, 19081 bp, Homo sapiens
gtaagggtctttacatggtttccagatagttcattagttgttgctttctttttttgtctgttttctgttttttttttttaaataactgtggtatgatgtaataggaacttataatttctgagttgcttatttttcctttacagttatagtaaagttatactcatttattttctcctgctttctgcagagtaaaatactgatttttgtctagaaacaagacagtgcaagacaatgttgaaagtgaaattctatgttaaaatatgccagatttattttaagaatttaatatctgtagtcagttatcaatacaaccaaattacataattatgcatgataataggtaaatactgagaagttcacctcattttcttgttaaaggatttggctattaccgtatgtgtcagttagtactcttttgtatggtagtgaaagaaaactcaacccaaactgattcatgaagaagaaagtaaatctggttagatgtggtttgaattaggtaattcatgtcatgaggactcagatctcccatctctatttctacgttccacttttgcattggcttcattttcggttaggttctcccttggtggtggtaaggtggttgtagcaatgtcagcctcccatttttggaaccgagtccataggaggctattctttctagaccttaataggagtaacacaattattgctcatcaccctagctttggccatgtgtcaaatcctgaccagtcacaatttcacagtcatagattctaccctggagctgggatgttactggcctcactagaaacacattgctgatagggtagaaggtgtgttcatcctacccaacccgacccgcaccaaagtcagaatagggaaaaacagatgttgggtgacatgcaactaacgtctgccgtactacactgaagatatttttctatgtttattctccagtgaaagagcttatatttgtggtacataggggattttgttttaatttagaaaatttaattgtagaaaacatgttttataaccctttctctgtactttgttctatatcaggaattgacttgattagataaggtgacatagggtatcttaggccctacaagatagtaaaccccccatcacttgaaagtattcagtagaggcttaaaaaacattattaaaggatgtggttattaggggactttaagaaatgaatatgaaattgaagtaggaaatctttaagctactctgtgagttatgccttttaaaagcaatttgtaattcctgtagatttcttttaaatttaggcagtttcataaatgactatagcatcattttagcaaatttgtgatcctgtaagaggaggataagtgttttttgtttgtttgtttgttttttgtttttttgagacagagtctcactttgtaccccagaaagtaaatctagttagatgtggtttgtctcggctcactgcaacctccaccccgtgcgttctagcaattctcctgcctcagccaccacacctggcctaagaggggaggataagtgttttagtgatcatattagactgaatgtggcagatgagatttcccgcccccccattgttggttagactgacattcaacattcaacaagagccacctgcccttgtaggcatttctgccactatacccctacataaacctagagtgctattgcttacttgctttccttcaaatacattttttcatttgtggcctccacattcttgtgtgtgatgtcctttctctgtgaaatgtcttctaccctttttttcaaagcctagtttagaactgacctcttctatgaaccctctgccgactggcctttccttccccagtcccccaagttcaaaatgatctctttcctttgaatactatagtatttgcacaattcactatctccttatcatattcttcttgtttatttgttatcagctgatgttgacatcataagttcaggttcctaactagatccaatattggaatttttcagcttttgctaagaagagagcttgtatgtctttgggaataatgggcagaaaaagataactttgagaagtcttagacttctaatagctttgatatttaaaagtacatgtaatacaagaggtttttttcctacatttaatgcatggagaagataggacatttagaaatatggaattaatgttcatttgactggcaaaagattattttctcagatgtagtgaagtgtggtaaagaacttcactctagagccagaatgtctgtgtttgtatcccagagcccaccacttacatttaaccattaacattcaacttactgtctctgagtttcagtggcctcatctataaaatgaggataataagagtacctacttcatagagttgttttagtggttaaataaactaacgtaaacttgctagaacttgataaactaatattggatgagaactggttgaaataatgcctggctatagtaaaaacttggtaaatgttagttgccattacaatgcaactactgttcctaccattccctctgccagtgcctggtattcagtagcactcagtaaatgttagttaaatgaagaaataactgaaggaatgaatgaacaaatggttgatgtagagattgcttttccattgttgtttattgaatattttgagatgtataacatactgtctgttaggcactgtgggatgggcactcacggagctgtcttccaaaggggtataggagaggagacgcagtgatctcagcaacctacctttaaaacatatcctagtatctactgccatgttaggttctcttcttttgctttttttaaaaaaaaattctcacaaaactccccccacccacttcagtttatagatgaggaagctcctactacataatagtgcttcccagtctaattcttgacctcattgtatttatatgtcctttttttttttgacagagtctcactcattgcagtggcacaatcacagctcactgcaacctctgcctcccctgctcaagtgatcctcccacctcaacctcctgagtagctgggactacaggcatgcaccaccacgcctggctaatttttgtatttttttgtagagatgcggttttgccatgttggccaggctggtctcgaactcctgggctcaagccatctgcccactttggcctctgagagtgctgagattataggcatgagccaccattcccagccatgttttcctttttcattgaactttatctactttagccattaaactccactccattggtcttgtcattactaagagctgaaccacctgcaaaatattaagttaaaaagcgttttctttgacaacagttttcttttcttcatcttcctctatcactttacttctgaacttttattctctcattttgatctgacccctacttctctgtttttcctggccatttagtactttcttgttttgctcatcccatttcccagtggagaccttctggtctgctgctttatcactggttttgttagaagacatacaaatggcaaggaggtatatgaaaaggtgcctaacatcattgatcatcagagaaatgcagaccaaaactacaatgagatatcatttcaccccagttaaaatggctttttttttttttttccaaaagacaggcaataacaaagtactggtgaggatgtggagtaaagggaacccacatacactattagtaggaatgtaaattagtacagccactgtggagaacagtttgaaggttcctcaaaaaactaaaaatagagctaccatataatccagcaatcccactgctaggtatatatccaaaagaaaggcaatcaatatacggaagagatacctgcacacccaggtttattgcagcactattcacaatagccaagatttggaagcaacccaggtgtccaacagatgaatggataaagaaaacatggtatataaacacaatggaatactattcagctgtgaaaaagaatgaaatcctgtcatttgcaatcctgtcttgaatagaactggaggtcatgatgttaagtgaaataagacaggcacaaacttcacatgttctcacttatttgtgggagctaaaaattaaaacaatcgaactcatggagctagagaatagaattatggttaccagaggctggaagggtggttgggcgtataagtgtagggggagtggggatggttaatgggtacaaaaaaatgagaacgaataagatctacttgataacacaacagggtgactatagtcaacagtaattatacatttaaaaataactagaagagtataattagattgtaacacaaaagataaatgcttgaggtgatggatacctatttaccctgatgtgattattacttatttcatgcctatatcaaaatatttatactccaaaaatatatatacctactatgtacccacaaaaatttaaaaatttatatattgtttttgctatcacctttagaatttcttgtcattggatagttcgtctgtataccattctggtcttcattccccagggcccccgttgtctgatttttctgcttctagaactgttagaggtcacaaaagcaagatggttgtatctatcacaatttttgtctgactttaactgggtatctgttacgatttagtagtcatcttactgacttcttgttggtttccaattgaatcctcacagtagactgttttcattgtaatcagtatcgaattatagcctgttcccttcttcataaatgaaggctttcttcttcaacagttcttagtgacttcacctgtactttatttctctgctttgaatatttcgaagaaaacatattcttgctctttcccaaggttaacactacatacattaccttgaccacaggatgttttcttgcagattgtgacctaattccatcacccttcagcagcccccaccgttttcatggattcagctaaaccttctgtaagatgactctttttccccctaatctttatatctcttttgatatgtagctttagtctcactttttttccttttggattttgccagttagatgtctccctggaattccacttcagcatggctaagactaagcttgtcttctctttcctccccaaagcaaattgtaattaggatagactgaaggtgacagaagataactaagatcttcttcatcctttcggctcttatggaagctgaattccagtagtcattctaaatttgttgtatgtcagcttatggtatcttttcatgtctttacattcagccaaagaggaagttccttgaaggggagaccagagggcgtgctgtgcttcttaatcctctctttcttaaccagtaagaggcattcagtagatatctgatgatactgattaatagaggggaacttttcagattcttttttttttttaaccctagtaagctttagtacaaactaaatgctgagagattatcaagtaagggattgatcatcacaagaagactcaggatgttacatcctgtaggttttatagtttcctatattgtaaaaaatatgagttatagcagcttgtctggatgtcatacaggtataaaaatcagttttataaacttgagtaaattggggcccattttagaaaaaactcttgcaggctgtgaatgccaatatataagtaaagtattaagtataatgttatttaatgtgggcaaacataaagccaggtgtaaattttttaggtttaaaatcttatagaactatacatccaaaagaaaatttcaagttaaacataatacaaagcaatacaatctaaattaacattaatttaatgtgatgaatgatattgccttgctaaaagtgggtcactacttacaatgtgcaaatggtactcatcgttagggtatagattcttttaaactatgacatacgtacactaccatgtggaacgtgatgatgtgttctctgttctaactactgggaagacttccttggcatagcacatgccatggggtcagttggctttgacttcatatagatatgccatttacttggtcagtgtcacttctatgacaagtagtatgttgtgccagtttgattataagtacaaatatgggcaatgaagtaacttggttttaaggttgttactaagctgagtaacagtgtgtggctatacaaatttttataggctatcaggaatgaaaacacaggagattgttgtagattcaagtattttagattcaagtttgaagatgctcatgcagatgtttaactgagttgtatagacctttatgtttctttctttttctctttttttttttttgagacagagtcttgctctgtcacccaagctggagtgcaatggtgtgatctcggcttactgcaacctccgcctcccaggttcaagcaattctcctgcctcagcctcccaagtagctgggattacagatgtgcaccacgacgcccagctgattttttgtattttagtagaggcggggtctcaccatgttgtcaagatggtctcaatctcctgaccttgtgatccacccacctctgcctcccaaagtgctgtgattacaggcgtgagccaccgcgcctgactgacctttatgtttcttaactttatgctatacatcagttgatatttcaaaaatttaaatggtttctatgattattctttgggctaagaaattgggcattaattgtcctcatatgtatggtttttgtggctacttcatgtagattttatttttggtggttatcaaattggaatttttttttttttttttttttttgagacggagtctcattctgtttcccaggttggagtacagtggtgcaatctcagctcactgcagcctcgacctcccaggctcaagcagtcctctcacctcagccttctaagtagctgggactacaggcacgcaccaccacacctggctagttttttgtgtttttagtagagatggggttttaccctgttggccaggctggtcttgaactcctggcctcaagtgatccacctgcctcagcctcccaaagtgctgggattagaggcatgagccaccacacctggctgaaattggaatttcattggtactgcctgtaattttatgttaatttttttttttttttgtcgtcactagcttttatctaaagcccctagagagaaaggccatgataccttgtatacaaggttataagagtatacaagggaaagggagggctgaagggaacagggtgggctggtacaagcctcattagaaataccattgagtctgtgagtaaaacatcattatatgaaaaggagatgtggttttagggtggtccaattacttttgcaccagcctaataaaattacaagtcattatcaatagagacattgtaaaacctttttttttcccaaaagaagtatcaggtatgataattacatgtctgcccaactttcgttatagattaacataacttaattgtatttaaggtacaatttaggagagttgctgaaaaatgaatctttagtattgggatgccttgattctaccctcaatagctataatggattatgtgtctgagtagattaataaaaatcttttgagcatttttcttgaactacttcactgaagattagctttttgagcatccattttaatttctcagtatataaggatcggtttatcacaactgtattgttttccctggccttgttagattatattttcatatcatgtagaaaaataggtgtattcgttctcccttgaagtcctttgtctcccaaaggaaatggttgcaatacagatgtgtcacctcttccacaggtaaagtggaatggagaagtagccagttaaatagtgcatgctcaatttggaacatttagagcatacaggaaagttatttatttggtaaatattttttaagcatttactatgtttcatgcattgtactagttgtagaggatataattgaatacaactacatgtagcccttgactttatggaactagtctagtataaagatttaagattgcctggcatggtggctcacgccactaatcccagcactttgagaggccaaggcaggattgcttgaggccagaagtttaagagtagcttggtcaacataatgagactccatctctaaaataaatagatagatagatagatagatagatagatagatagatagatagaagtagttagacaacacaaagcagtttcactcatcttgtggcaaggagttatgtatttctaatcaaatttggcaactcaagcattttcaacaaaatctacatgttttttcagaataaagtgaccaacacagaatgttacctgtaaaaatcagagcaataattgctatctaaaataattttgaaaattaagtggtactgaaaggctcatatagcaaaaatatggcctcctgtcattgtactttcctacttcccagactcaccattttcaacattttttagtagtttattttgccattttatagcatagtacctgacattttatttattcaacagacatttcttaagtacctaatacatgccattccttgtttgaagggatgctaaggatacagtggtgaacaaggcgttgtggggttgtatagagggtattcattcctaaccttgaaccaaatatttctttctgttggataatgcattaaaaattgcaaacagtttacaaacttttggagcaatggtggccttgatcataaagtagggactgcttctaccgtatacatgcttggtggtgtatttgtgatatctggctaaagtttctacatggaaattgactgactttagttttgagacttctgggaaccagtcaggcaaaatagtgaaactgtgtatcctgtttccaagagttgtcttttaaggttatctgcttcattcatttggcctgacttgctaggcaaatgcctagggtaaatatgatttgattaactataacaacaacagcaacaacaacaactttattttttagagcagtttgaggttcacagcaaaattgagcagaatgtacagagattttccctatacccgcttcccctacgcatgtgcggcctcccctactatcaacatcccccaccagagtggtttgttacaattaatgaacctacattgacacatcattatcactcaaggtccgtagtttacattagagtccactcttggtgttgtgtatgggtttggtcgattttataatgacatttatccaccattatagtgtcatacatagtaattttgctaccctaaaaatccagtgtgctccacctgttcctccttccctcctccctcatccctggcaaccactgaactttttaacatctccatagttttgccttttccagaatgtcatatcattggaatcacacagtatgcagccttttcaaatgggcttctttccgttagtaataggcatttaagtttcatcctcatcttttcatggcttgatagctcatttctttccctccctcttttcttccctgtcttccttccttcctcttctttcctgtttcctctttcttcttccttttttaagagacaaggtgtctcactctgttgcccaggctggagtgcagtggcccaatcatagctcattgcagccttgaattcctgggctcaagtgatcctcctgcgttagcctcctgagtagctgggatcacaggctccagtcattttagtgctgaataatatttcattatctggatgtaccgcctattcattcacctactgaagaatatcttggttgcttctaagttttggcaattatgagtgaagttactataaacattgtatacaagttttatgtggatgtatgttgtcatctcccttgggcagataccaaggagtgccattgttggatcatatggtaaatatatctttagttttgtacagaattctaggttggtatttttttctctctcagtcctttattttatttggagacagtctcgctatgtcgcccaggctgccatacagtggtgccatctgggctcactgaaacctccacctcccaggttcaagcgattcttgtgccttggcctcccaagtagctgggattacaggagtgcgccaccacgcctgctaatttttgtatttttagtagagacagggttttgccatgttgcccaggctggtctcaaactcctgaccttaagtgattcacccacctcaatctcccaaaatcctgggattacaggcctgagctactgtgcctgatctctctcagtactttaaagaaatatttcattccacttttcttttttttcttctttttgagatggagtctcactctgtcgcctgggctggagtgcagtggcgcgatctcagctcactgccacctccgcctcctgggttcaagtgattctcctgcctcagcctcctgaatagctgagattacaggcgcccaccaccatgcccagctaattttttgcatttttagtagagacgggggttccaccatgttggccaggctggtctcgaactcctgacctcgtgattcgcacatctcggcctcccaaattgctgggattacaggtgtgagctaccacgcctggcccactcttcttgcttacatagtttctgaggagatgtcagatgtaatttttatttttgctcttctgtaggcaagttgagttttttccccctctagcttctctcaggatttttttctttatctttgattttcagtagtttgaaaattatatgcctagctgtcagggttttttgcttgtttgtttttgttttctcaggtgtgactccagaaaggttctaaagaggagctttacaatctcttctctggggtttatggagacttcctttacccttctgtgttagccccttaaagcactgcgtcaaccttaaaagggcacaggaaagggtgtctatgccatttttatgccatttatcctgcttggtgttttctgagctttcttcatctgcggtttaatgtctcacattaatttgtagaaattctctgtcattgtttcaaatttttcttcagttcttttctctgtttcttcttctggtgttcccattatgcttttgtggttgtcgtacagttattggatattttgttccaggcttttttttttccagtctttttttccttttgcttctcggttttgtaggtgtctgttgagatactctcaagtgcagatattctttcctcagctttgtctagtttactaataagcccattaaaggcagtcttcatttctgttacagtctttttgatcagtagcatttcttttttattctttcttaaaatttctgtctttctgcttacattgcccatctgttcttgcatggtttctactttgtccattagagttcttaggatatttatcataattatttcaaatttctggtgtaacaattccaacatccctgcaacatccaagtctagtttcgatgcttactgtgtctcttccagctgtgttttttcctatttaatatgtcttataattttttcttgatagccatacatgatgcattaggtaacagaaactgctgtgagtggacctttagtaatgtggtggtaaggtgtgcatggaggggaaacattttcagtctgttagtgaacttttgtcaacttcacatgtgcttctcaagtccatcctgtaagtgggagagtagggctagagaggactgaagttgggtatatattaaatactttctcctacaaagaagcctagaggggacgcattaggggattttttttcccccagtattcactgtgatgacccttattgagctcctggaggtaaaactcacaaaactgtggttctcccccctgcccatattactacatgtccctggagtttatatctttcagacttgtctgcactgagcttccaccaatttgtcaaatacagatcaggtttccctaccacccgtgcagttgaaaacccacatacaacttttgactcctccagagcttaactactcatagcctgctattgactggaagccttgccaataacataaacagttgattaatacatattttatatgttttctgtattatatattgtattcttacaataaagagaaaagaagatgttattaagaaaatcataaggaagataaaatatatttactgttcattaagtggttcccatgggtgctggttcccatggaggttgccccttgtgagtttttgctcagggaagttgtgattctctatatttgcctgttggtctcctaatttgggagtcatcagttttccctgtgacctcacttctcttacagagttaagaacagttgttggtttttcagtttgttcagtgttttacatgttgttagaacacagtggtacttctaagtttcttaacatgctagatcagaaacctgaagtctcacctaatttggctttttatattttttcttcttttttttcttccattgctaccaaagcatttttcatctgtgtctggggtgacattagagcagaatgtgatttctaggtaaacattattgggctccctagcagaaaaatttttgaaagtagtacatgaattctgtataattaaaattttcttttcatcttaataggtataggtaataggcacggcctattttttttttgctcaacagtctaaaatagtaatttaatcacctaatagccttagttatatagttgaaagaagagttggaaatctgattcatgggttggaaatcacctgtcacatatgagttttaggcactggtcactttattttgaaacagctttggggttttttcctttttcaactcataataggctttaacagcttttagttttgtttctgtttttttaacagcatgagttgccaaatttggttatagcttcttggtacaagatgggtaaatttgctttgtgttgtgtaattactttttattttaaatgctacctcttttatgaacactaactttacactaagattaggaaaatgagaattgcatgtctgcaacaaatagctatctgtagtattaaattgtgaaaatgtagactttggattggagctggcatctcttaatatgtaattgtaacatagagtaaataagtattttgtcccttgtagggtcaaacagtacagtgcatgggcagaattagagatgtaggcttttttttttttttttttttttactggcttagagaaccgtttgatcagctaatatggaattaagtccctagggctgcccaggcacaacattaactgctattaaaggaaaatttaaaagagtattagtgaaggttaaatactgaccatggacatctggcaaaattgatgttttttttcccctccaccattgtttatagtttattgttatttatcagagaattaatgtttattttcagaatctattaccataagaaatctgtttgaggacttcgtatgtgccaggaattctactaaataatgatataatgctgaacagaattagataggatcctcacttcgttaagcttacagtctagtggtatagatcaacattaatcaaagaataacacaaatagaaagcagagcagtggttcatgggattgactgtagagaagcatgagggaagttcccaggtgatggaaaatactttatttcttaatcgtggtggttacatgtgtgcatatgtttatgaaaatatattgtacatttaaagtggatacattttatcacatgtaaattatgactctataaagttaattaaaaagaataactcaggtaaggtggtgtgtgcgcctgtagtcccagctatttctgaggcaggaagatcacttgagcccaggagtttgagttcagcatgggcaacatgagacctgtgagactttgtctctaaaaaaatttaaataaataactaagataaatgtaaaattacagctgtagtaagttctacaaaggagagttacatgggctatgacgatgtaagatagcaagaactgacattggcagggaggaaatgatgatgagtagaagtaaataagtgaagtgtggggattgatgtcaaggggacagtataaaagaaataacagcatgcgccaaggccctaaaattggaaagtccttggcaaattaaaggagtttgaaaaaggccattgtgtgcaaagcagaaaataggtactacaaggtaaaagatggagctaagcggtaggtaaggctaaaccttgtcagccattgttaaatattgaattgtatcctaagcacaactcagtggaaagcagttaaagttctttaattgggggaggcaatgaaggggtaataaaattggttatagaaatactgctctggctctagtgttgagaatgaattggagtagccagagtagattcaagaagactttagtaagattattccaacaggccaggacctgttatagggtggtggcaatggagagagatggacagaatggagagtgtatttaggaggtaaaaatgacagaacttggtgatgcactgaatgtgaaatggggaaggtgtctaggaggactactaggtttatggtttgcgtattagggtggatgatagcagtttcatttactgagacagggagccctggcagagtacccagcttttagagtgggtagggggaaggggagagtgcatctggtgttgggcattttgaagtgatttacatacaacaaactgaaggtatctttaacactgagtccagcaggttagcatatttattcagcaagcattgcacctttttttgttgtttttggggtcttcaactcctggcctcgaatcctccctccttcccccgcctctcccagcctccgcctcccaaagtgctgggatttcaggagtgagccaccgcgcctggccagcatcgcgctgtttgtgcagtgtgccctgtgctaggtcttgcagtgggtaccagtagagacataaaagtacaaaagataattggacgtttagtagagtcctgaaagggggcgggataggaagatacctaaccataagaaaaaccagcaagagcggaaaaggagctagtcctccagatcaataagttaatcacttatgtttgtgattccctgcattttgggtgattctctgtcgaggtcctcttaagtccagacttttgatataatctgcagtttgcgccatttggattcctgaagcatctttacaagccacctacattccttatggagctgtggcacaacagcaagcccacgatgtctcaccggattaataaaaatataggcgctcacgcttttgtttaccgatatagtatctcctcctcccctcactccatcaacccccacgcgacacaactttccggaagtaagcaaaatccgttatcaaggtgaaactccggggaccaggctccacagctgccataaactggatggcacgttagaagccggtgggtgtaggtgaggcacgctggcgcccgcgggcccttctccagccgctacccagtgggaatccgcggggctgaagccccgaaaccaggctgagcgtcccagagcgcaacctccctttcccccagcagcgccggcgccgcagaagccgcgtgtccccaggcgcactcccccaaggtgaacccccgccccccacggaggcggctgggtcgcgggtctgggcggggcgctccggacgccctcccgccgctgcgcacccctcccgcgagctgccagctccctcggcctctccacccaaaactggcccaaccgccaatcgtctgcctctcacctcctacagcaggtgacccatggccaatcgccaggggtctctttgccaggagccgccagggccagccaatcggggcgacccctccgccggggaggggacgggaaaggggtggggggtgaagggggtgaagggggtgtcccgggggacgggctgaacctcagtcaggaccgcctgcaccgcagtccggggatcgggtcgaggggagaagaaaaaggggtgctcgggagcagcccccggctacctcccctggaggcacagagggcgggggccttggcgaatggctttcttgctggccacttgcggagtgagtagaccccgagggtctgggagaggggccggcccctacccctgagtccccggggtcccggccgccaggccggagcgcgaatgtcgtgctcaccctgcctccttcccgccgccccctgggctttttgatgacaagcttcaaaactgcaaagaagatgaacagagaaagaaaattgaaactctcaaagagacaacaaatagcatggtagaatcaattaaacactgcattgtgttgctgcagattgccaaagaccagagtaatgcggagaagcacgcagatggaatgataagtactattaatcccgtagatgcaatatatcaacctagtcctttggaacctgtgatcagcacaatgccttcccagactgtgttacctccagaacctgttcagttgtgtaagtcagagcagcgtccatcttccctaccagttggacctgtgttggctaccttgggacatcatcagactcctacaccaaatagtacaggcagtggccattcaccaccgagtagcagtctcacttctccaagccacgtgaacttgtctccaaatacagtcccagagttctcttactccagcagtgaagatgaattttatgatgctgatgaattccatcaaagtggctcatccccaaagcgcttaatagattcttctggatctgcctcagtcctgacacacagcagctcgggaaatagtctaaaacgcccagataccacagaatcacttaattcttccttgtccaatggaacaagtgatgctgacctgtttgattcacatgatgacagagatgatgatgcggaggcagggtctgtggaggagcacaagagcgttatcatgcatctcttgtcgcaggttagacttggaatggatcttactaaggtagttcttccaacgtttattcttgaaagaagatctcttttagaaatgtatgcagacttttttgcacatccggacctgtttgtgagcattagtgaccagaaggatcccaaggatcgaatggttcaggttgtgaaatggtacctctcagcctttcatgcgggaaggaaaggatcagttgccaaaaagccatacaatcccattttgggcgagatttttcagtgtcattggacattaccaaatgatactgaagagaacacagaactagtttcagaaggaccagttccctgggtttccaaaaacagtgtaacatttgtggctgagcaggtttcccatcatccacccatttcagccttttatgctgagtgttttaacaagaagatacaattcaatgctcatatctggaccaaatcaaaattccttgggatgtcaattggggtgcacaacatagggcagggctgtgtctcatgtctagactatgatgaacattacattctcacattccccaatggctatggaaggtctatcctcacagtgccctgggtggaattaggaggagaatgcaatattaattgttccaaaacaggctatagtgcaaatatcatcttccacactaaacccttctatgggggcaagaagcacagaattactgccgagattttttctccaaatgacaagaagtctttttgctcaattgaaggggaatggaatggtgtgatgtatgcaaaatatgcaacaggggaaaatacagtctttgtagataccaagaagttgcctataatcaagaagaaagtgaggaagttggaagatcagaacgagtatgaatcccgcagcctttggaaggatgtcactttcaacttaaaaatcagagacattgatgcagcaactgaagcaaagcacaggcttgaagaaagacaaagagcagaagcccgagaaaggaaggagaaggaaattcagtgggagacaaggttatttcatgaagatggagaatgctgggtttatgatgaaccattactgaaacgtcttggtgctgccaagcattaggttggaagatgcaaagtttatacctgatgatcagggcagtaggcataattcagcaacaaacaatcttcctttgggagaaacctgttcattccaatcttctaattacagtggttcctatctcagggatactggactttctgacgcagatgaacaattaaggggaaaagcttcccttttccctctgtggcagttacgattttgacttcagtcctgagaaaaacttcaggttttgaaaatcagatgatgtcttctccttttccaaacaccacacgttgaaagcatttataaatccaagtctgaaactctgcgctctagtactgctgttaagatacacaacttgtttcttagttcatataatctcgggatacacacacacacacacatatatatacacacacatacgtatacacacacatacatatatataaatatacctgatgccagatttttttcataaatattctgcctactgtaaatatgggttcctctgagttgttttagaaaattagcgcaatgtattaaaatcaagtgttaggaaatttcatggtcttacctacaataacttttattttggaattgaactattattaaattgtatctaatcctggattacagtttaattaattattcttagtgcttaaggcttcataaagtaatttttccaacctttttttaaaaagagcatcttttattatcttttatggttaaacttggaagccaattatttggcaaccttgaatacaagagctagcttttcaaagaaagacacttgaaataatggaggatccattcttttcctctgtcagattgtatgttctgtctttagcccctgccaggcaattccccagaatcttcacttaactcatattgcacatgtagggctgcctaccaacattttatccaaaaatgttttattgccttagagggtttgggaagagtgtgtatttatagatccccaccccacagtgaacaaaaatagatagatagatagaataaaatgaatgccacagcagcagatggctcattctgaagggaaatacagaactatatctatctatctatctatcatcttttttatttaaaaatacattaaaaaaacaggtattagtacctagcatttagttagttattcaatatactggttacgtaaggcctttcaagaagtagattctcagtctgagaggacacaggccagggcttctcaaagtgctgctgcaggctttctggtctcgcttggcc

SEQ ID NO: 735129 - DNA, 19123 bp, Homo sapiens
  misc_feature (19123)..(19123): n is a, c, g, or t
gtaagggtctttacatggtttccagatagttcattagttgttgctttctttttttgtctgttttctgttttttttttttaaataactgtggtatgatgtaataggaacttataatttctgagttgcttatttttcctttacagttatagtaaagttatactcatttattttctcctgctttctgcagagtaaaatactgatttttgtctagaaacaagacagtgcaagacaatgttgaaagtgaaattctatgttaaaatatgccagatttattttaagaatttaatatctgtagtcagttatcaatacaaccaaattacataattatgcatgataataggtaaatactgagaagttcacctcattttcttgttaaaggatttggctattaccgtatgtgtcagttagtactcttttgtatggtagtgaaagaaaactcaacccaaactgattcatgaagaagaaagtaaatctggttagatgtggtttgaattaggtaattcatgtcatgaggactcagatctcccatctctatttctacgttccacttttgcattggcttcattttcggttaggttctcccttggtggtggtaaggtggttgtagcaatgtcagcctcccatttttggaaccgagtccataggaggctattctttctagaccttaataggagtaacacaattattgctcatcaccctagctttggccatgtgtcaaatcctgaccagtcacaatttcacagtcatagattctaccctggagctgggatgttactggcctcactagaaacacattgctgatagggtagaaggtgtgttcatcctacccaacccgacccgcaccaaagtcagaatagggaaaaacagatgttgggtgacatgcaactaacgtctgccgtactacactgaagatatttttctatgtttattctccagtgaaagagcttatatttgtggtacataggggattttgttttaatttagaaaatttaattgtagaaaacatgttttataaccctttctctgtactttgttctatatcaggaattgacttgattagataaggtgacatagggtatcttaggccctacaagatagtaaaccccccatcacttgaaagtattcagtagaggcttaaaaaacattattaaaggatgtggttattaggggactttaagaaatgaatatgaaattgaagtaggaaatctttaagctactctgtgagttatgccttttaaaagcaatttgtaattcctgtagatttcttttaaatttaggcagtttcataaatgactatagcatcattttagcaaatttgtgatcctgtaagaggaggataagtgttttttgtttgtttgtttgttttttgtttttttgagacagagtctcactttgtaccccagaaagtaaatctagttagatgtggtttgtctcggctcactgcaacctccaccccgtgcgttctagcaattctcctgcctcagccaccacacctggcctaagaggggaggataagtgttttagtgatcatattagactgaatgtggcagatgagatttcccgcccccccattgttggttagactgacattcaacattcaacaagagccacctgcccttgtaggcatttctgccactatacccctacataaacctagagtgctattgcttacttgctttccttcaaatacattttttcatttgtggcctccacattcttgtgtgtgatgtcctttctctgtgaaatgtcttctaccctttttttcaaagcctagtttagaactgacctcttctatgaaccctctgccgactggcctttccttccccagtcccccaagttcaaaatgatctctttcctttgaatactatagtatttgcacaattcactatctccttatcatattcttcttgtttatttgttatcagctgatgttgacatcataagttcaggttcctaactagatccaatattggaatttttcagcttttgctaagaagagagcttgtatgtctttgggaataatgggcagaaaaagataactttgagaagtcttagacttctaatagctttgatatttaaaagtacatgtaatacaagaggtttttttcctacatttaatgcatggagaagataggacatttagaaatatggaattaatgttcatttgactggcaaaagattattttctcagatgtagtgaagtgtggtaaagaacttcactctagagccagaatgtctgtgtttgtatcccagagcccaccacttacatttaaccattaacattcaacttactgtctctgagtttcagtggcctcatctataaaatgaggataataagagtacctacttcatagagttgttttagtggttaaataaactaacgtaaacttgctagaacttgataaactaatattggatgagaactggttgaaataatgcctggctatagtaaaaacttggtaaatgttagttgccattacaatgcaactactgttcctaccattccctctgccagtgcctggtattcagtagcactcagtaaatgttagttaaatgaagaaataactgaaggaatgaatgaacaaatggttgatgtagagattgcttttccattgttgtttattgaatattttgagatgtataacatactgtctgttaggcactgtgggatgggcactcacggagctgtcttccaaaggggtataggagaggagacgcagtgatctcagcaacctacctttaaaacatatcctagtatctactgccatgttaggttctcttcttttgctttttttaaaaaaaaattctcacaaaactccccccacccacttcagtttatagatgaggaagctcctactacataatagtgcttcccagtctaattcttgacctcattgtatttatatgtcctttttttttttgacagagtctcactcattgcagtggcacaatcacagctcactgcaacctctgcctcccctgctcaagtgatcctcccacctcaacctcctgagtagctgggactacaggcatgcaccaccacgcctggctaatttttgtatttttttgtagagatgcggttttgccatgttggccaggctggtctcgaactcctgggctcaagccatctgcccactttggcctctgagagtgctgagattataggcatgagccaccattcccagccatgttttcctttttcattgaactttatctactttagccattaaactccactccattggtcttgtcattactaagagctgaaccacctgcaaaatattaagttaaaaagcgttttctttgacaacagttttcttttcttcatcttcctctatcactttacttctgaacttttattctctcattttgatctgacccctacttctctgtttttcctggccatttagtactttcttgttttgctcatcccatttcccagtggagaccttctggtctgctgctttatcactggttttgttagaagacatacaaatggcaaggaggtatatgaaaaggtgcctaacatcattgatcatcagagaaatgcagaccaaaactacaatgagatatcatttcaccccagttaaaatggctttttttttttttttccaaaagacaggcaataacaaagtactggtgaggatgtggagtaaagggaacccacatacactattagtaggaatgtaaattagtacagccactgtggagaacagtttgaaggttcctcaaaaaactaaaaatagagctaccatataatccagcaatcccactgctaggtatatatccaaaagaaaggcaatcaatatacggaagagatacctgcacacccaggtttattgcagcactattcacaatagccaagatttggaagcaacccaggtgtccaacagatgaatggataaagaaaacatggtatataaacacaatggaatactattcagctgtgaaaaagaatgaaatcctgtcatttgcaatcctgtcttgaatagaactggaggtcatgatgttaagtgaaataagacaggcacaaacttcacatgttctcacttatttgtgggagctaaaaattaaaacaatcgaactcatggagctagagaatagaattatggttaccagaggctggaagggtggttgggcgtataagtgtagggggagtggggatggttaatgggtacaaaaaaatgagaacgaataagatctacttgataacacaacagggtgactatagtcaacagtaattatacatttaaaaataactagaagagtataattagattgtaacacaaaagataaatgcttgaggtgatggatacctatttaccctgatgtgattattacttatttcatgcctatatcaaaatatttatactccaaaaatatatatacctactatgtacccacaaaaatttaaaaatttatatattgtttttgctatcacctttagaatttcttgtcattggatagttcgtctgtataccattctggtcttcattccccagggcccccgttgtctgatttttctgcttctagaactgttagaggtcacaaaagcaagatggttgtatctatcacaatttttgtctgactttaactgggtatctgttacgatttagtagtcatcttactgacttcttgttggtttccaattgaatcctcacagtagactgttttcattgtaatcagtatcgaattatagcctgttcccttcttcataaatgaaggctttcttcttcaacagttcttagtgacttcacctgtactttatttctctgctttgaatatttcgaagaaaacatattcttgctctttcccaaggttaacactacatacattaccttgaccacaggatgttttcttgcagattgtgacctaattccatcacccttcagcagcccccaccgttttcatggattcagctaaaccttctgtaagatgactctttttccccctaatctttatatctcttttgatatgtagctttagtctcactttttttccttttggattttgccagttagatgtctccctggaattccacttcagcatggctaagactaagcttgtcttctctttcctccccaaagcaaattgtaattaggatagactgaaggtgacagaagataactaagatcttcttcatcctttcggctcttatggaagctgaattccagtagtcattctaaatttgttgtatgtcagcttatggtatcttttcatgtctttacattcagccaaagaggaagttccttgaaggggagaccagagggcgtgctgtgcttcttaatcctctctttcttaaccagtaagaggcattcagtagatatctgatgatactgattaatagaggggaacttttcagattcttttttttttttaaccctagtaagctttagtacaaactaaatgctgagagattatcaagtaagggattgatcatcacaagaagactcaggatgttacatcctgtaggttttatagtttcctatattgtaaaaaatatgagttatagcagcttgtctggatgtcatacaggtataaaaatcagttttataaacttgagtaaattggggcccattttagaaaaaactcttgcaggctgtgaatgccaatatataagtaaagtattaagtataatgttatttaatgtgggcaaacataaagccaggtgtaaattttttaggtttaaaatcttatagaactatacatccaaaagaaaatttcaagttaaacataatacaaagcaatacaatctaaattaacattaatttaatgtgatgaatgatattgccttgctaaaagtgggtcactacttacaatgtgcaaatggtactcatcgttagggtatagattcttttaaactatgacatacgtacactaccatgtggaacgtgatgatgtgttctctgttctaactactgggaagacttccttggcatagcacatgccatggggtcagttggctttgacttcatatagatatgccatttacttggtcagtgtcacttctatgacaagtagtatgttgtgccagtttgattataagtacaaatatgggcaatgaagtaacttggttttaaggttgttactaagctgagtaacagtgtgtggctatacaaatttttataggctatcaggaatgaaaacacaggagattgttgtagattcaagtattttagattcaagtttgaagatgctcatgcagatgtttaactgagttgtatagacctttatgtttctttctttttctctttttttttttttgagacagagtcttgctctgtcacccaagctggagtgcaatggtgtgatctcggcttactgcaacctccgcctcccaggttcaagcaattctcctgcctcagcctcccaagtagctgggattacagatgtgcaccacgacgcccagctgattttttgtattttagtagaggcggggtctcaccatgttgtcaagatggtctcaatctcctgaccttgtgatccacccacctctgcctcccaaagtgctgtgattacaggcgtgagccaccgcgcctgactgacctttatgtttcttaactttatgctatacatcagttgatatttcaaaaatttaaatggtttctatgattattctttgggctaagaaattgggcattaattgtcctcatatgtatggtttttgtggctacttcatgtagattttatttttggtggttatcaaattggaatttttttttttttttttttttttgagacggagtctcattctgtttcccaggttggagtacagtggtgcaatctcagctcactgcagcctcgacctcccaggctcaagcagtcctctcacctcagccttctaagtagctgggactacaggcacgcaccaccacacctggctagttttttgtgtttttagtagagatggggttttaccctgttggccaggctggtcttgaactcctggcctcaagtgatccacctgcctcagcctcccaaagtgctgggattagaggcatgagccaccacacctggctgaaattggaatttcattggtactgcctgtaattttatgttaatttttttttttttttgtcgtcactagcttttatctaaagcccctagagagaaaggccatgataccttgtatacaaggttataagagtatacaagggaaagggagggctgaagggaacagggtgggctggtacaagcctcattagaaataccattgagtctgtgagtaaaacatcattatatgaaaaggagatgtggttttagggtggtccaattacttttgcaccagcctaataaaattacaagtcattatcaatagagacattgtaaaacctttttttttcccaaaagaagtatcaggtatgataattacatgtctgcccaactttcgttatagattaacataacttaattgtatttaaggtacaatttaggagagttgctgaaaaatgaatctttagtattgggatgccttgattctaccctcaatagctataatggattatgtgtctgagtagattaataaaaatcttttgagcatttttcttgaactacttcactgaagattagctttttgagcatccattttaatttctcagtatataaggatcggtttatcacaactgtattgttttccctggccttgttagattatattttcatatcatgtagaaaaataggtgtattcgttctcccttgaagtcctttgtctcccaaaggaaatggttgcaatacagatgtgtcacctcttccacaggtaaagtggaatggagaagtagccagttaaatagtgcatgctcaatttggaacatttagagcatacaggaaagttatttatttggtaaatattttttaagcatttactatgtttcatgcattgtactagttgtagaggatataattgaatacaactacatgtagcccttgactttatggaactagtctagtataaagatttaagattgcctggcatggtggctcacgccactaatcccagcactttgagaggccaaggcaggattgcttgaggccagaagtttaagagtagcttggtcaacataatgagactccatctctaaaataaatagatagatagatagatagatagatagatagatagatagatagaagtagttagacaacacaaagcagtttcactcatcttgtggcaaggagttatgtatttctaatcaaatttggcaactcaagcattttcaacaaaatctacatgttttttcagaataaagtgaccaacacagaatgttacctgtaaaaatcagagcaataattgctatctaaaataattttgaaaattaagtggtactgaaaggctcatatagcaaaaatatggcctcctgtcattgtactttcctacttcccagactcaccattttcaacattttttagtagtttattttgccattttatagcatagtacctgacattttatttattcaacagacatttcttaagtacctaatacatgccattccttgtttgaagggatgctaaggatacagtggtgaacaaggcgttgtggggttgtatagagggtattcattcctaaccttgaaccaaatatttctttctgttggataatgcattaaaaattgcaaacagtttacaaacttttggagcaatggtggccttgatcataaagtagggactgcttctaccgtatacatgcttggtggtgtatttgtgatatctggctaaagtttctacatggaaattgactgactttagttttgagacttctgggaaccagtcaggcaaaatagtgaaactgtgtatcctgtttccaagagttgtcttttaaggttatctgcttcattcatttggcctgacttgctaggcaaatgcctagggtaaatatgatttgattaactataacaacaacagcaacaacaacaactttattttttagagcagtttgaggttcacagcaaaattgagcagaatgtacagagattttccctatacccgcttcccctacgcatgtgcggcctcccctactatcaacatcccccaccagagtggtttgttacaattaatgaacctacattgacacatcattatcactcaaggtccgtagtttacattagagtccactcttggtgttgtgtatgggtttggtcgattttataatgacatttatccaccattatagtgtcatacatagtaattttgctaccctaaaaatccagtgtgctccacctgttcctccttccctcctccctcatccctggcaaccactgaactttttaacatctccatagttttgccttttccagaatgtcatatcattggaatcacacagtatgcagccttttcaaatgggcttctttccgttagtaataggcatttaagtttcatcctcatcttttcatggcttgatagctcatttctttccctccctcttttcttccctgtcttccttccttcctcttctttcctgtttcctctttcttcttccttttttaagagacaaggtgtctcactctgttgcccaggctggagtgcagtggcccaatcatagctcattgcagccttgaattcctgggctcaagtgatcctcctgcgttagcctcctgagtagctgggatcacaggctccagtcattttagtgctgaataatatttcattatctggatgtaccgcctattcattcacctactgaagaatatcttggttgcttctaagttttggcaattatgagtgaagttactataaacattgtatacaagttttatgtggatgtatgttgtcatctcccttgggcagataccaaggagtgccattgttggatcatatggtaaatatatctttagttttgtacagaattctaggttggtatttttttctctctcagtcctttattttatttggagacagtctcgctatgtcgcccaggctgccatacagtggtgccatctgggctcactgaaacctccacctcccaggttcaagcgattcttgtgccttggcctcccaagtagctgggattacaggagtgcgccaccacgcctgctaatttttgtatttttagtagagacagggttttgccatgttgcccaggctggtctcaaactcctgaccttaagtgattcacccacctcaatctcccaaaatcctgggattacaggcctgagctactgtgcctgatctctctcagtactttaaagaaatatttcattccacttttcttttttttcttctttttgagatggagtctcactctgtcgcctgggctggagtgcagtggcgcgatctcagctcactgccacctccgcctcctgggttcaagtgattctcctgcctcagcctcctgaatagctgagattacaggcgcccaccaccatgcccagctaattttttgcatttttagtagagacgggggttccaccatgttggccaggctggtctcgaactcctgacctcgtgattcgcacatctcggcctcccaaattgctgggattacaggtgtgagctaccacgcctggcccactcttcttgcttacatagtttctgaggagatgtcagatgtaatttttatttttgctcttctgtaggcaagttgagttttttccccctctagcttctctcaggatttttttctttatctttgattttcagtagtttgaaaattatatgcctagctgtcagggttttttgcttgtttgtttttgttttctcaggtgtgactccagaaaggttctaaagaggagctttacaatctcttctctggggtttatggagacttcctttacccttctgtgttagccccttaaagcactgcgtcaaccttaaaagggcacaggaaagggtgtctatgccatttttatgccatttatcctgcttggtgttttctgagctttcttcatctgcggtttaatgtctcacattaatttgtagaaattctctgtcattgtttcaaatttttcttcagttcttttctctgtttcttcttctggtgttcccattatgcttttgtggttgtcgtacagttattggatattttgttccaggcttttttttttccagtctttttttccttttgcttctcggttttgtaggtgtctgttgagatactctcaagtgcagatattctttcctcagctttgtctagtttactaataagcccattaaaggcagtcttcatttctgttacagtctttttgatcagtagcatttcttttttattctttcttaaaatttctgtctttctgcttacattgcccatctgttcttgcatggtttctactttgtccattagagttcttaggatatttatcataattatttcaaatttctggtgtaacaattccaacatccctgcaacatccaagtctagtttcgatgcttactgtgtctcttccagctgtgttttttcctatttaatatgtcttataattttttcttgatagccatacatgatgcattaggtaacagaaactgctgtgagtggacctttagtaatgtggtggtaaggtgtgcatggaggggaaacattttcagtctgttagtgaacttttgtcaacttcacatgtgcttctcaagtccatcctgtaagtgggagagtagggctagagaggactgaagttgggtatatattaaatactttctcctacaaagaagcctagaggggacgcattaggggattttttttcccccagtattcactgtgatgacccttattgagctcctggaggtaaaactcacaaaactgtggttctcccccctgcccatattactacatgtccctggagtttatatctttcagacttgtctgcactgagcttccaccaatttgtcaaatacagatcaggtttccctaccacccgtgcagttgaaaacccacatacaacttttgactcctccagagcttaactactcatagcctgctattgactggaagccttgccaataacataaacagttgattaatacatattttatatgttttctgtattatatattgtattcttacaataaagagaaaagaagatgttattaagaaaatcataaggaagataaaatatatttactgttcattaagtggttcccatgggtgctggttcccatggaggttgccccttgtgagtttttgctcagggaagttgtgattctctatatttgcctgttggtctcctaatttgggagtcatcagttttccctgtgacctcacttctcttacagagttaagaacagttgttggtttttcagtttgttcagtgttttacatgttgttagaacacagtggtacttctaagtttcttaacatgctagatcagaaacctgaagtctcacctaatttggctttttatattttttcttcttttttttcttccattgctaccaaagcatttttcatctgtgtctggggtgacattagagcagaatgtgatttctaggtaaacattattgggctccctagcagaaaaatttttgaaagtagtacatgaattctgtataattaaaattttcttttcatcttaataggtataggtaataggcacggcctattttttttttgctcaacagtctaaaatagtaatttaatcacctaatagccttagttatatagttgaaagaagagttggaaatctgattcatgggttggaaatcacctgtcacatatgagttttaggcactggtcactttattttgaaacagctttggggttttttcctttttcaactcataataggctttaacagcttttagttttgtttctgtttttttaacagcatgagttgccaaatttggttatagcttcttggtacaagatgggtaaatttgctttgtgttgtgtaattactttttattttaaatgctacctcttttatgaacactaactttacactaagattaggaaaatgagaattgcatgtctgcaacaaatagctatctgtagtattaaattgtgaaaatgtagactttggattggagctggcatctcttaatatgtaattgtaacatagagtaaataagtattttgtcccttgtagggtcaaacagtacagtgcatgggcagaattagagatgtaggcttttttttttttttttttttttactggcttagagaaccgtttgatcagctaatatggaattaagtccctagggctgcccaggcacaacattaactgctattaaaggaaaatttaaaagagtattagtgaaggttaaatactgaccatggacatctggcaaaattgatgttttttttcccctccaccattgtttatagtttattgttatttatcagagaattaatgtttattttcagaatctattaccataagaaatctgtttgaggacttcgtatgtgccaggaattctactaaataatgatataatgctgaacagaattagataggatcctcacttcgttaagcttacagtctagtggtatagatcaacattaatcaaagaataacacaaatagaaagcagagcagtggttcatgggattgactgtagagaagcatgagggaagttcccaggtgatggaaaatactttatttcttaatcgtggtggttacatgtgtgcatatgtttatgaaaatatattgtacatttaaagtggatacattttatcacatgtaaattatgactctataaagttaattaaaaagaataactcaggtaaggtggtgtgtgcgcctgtagtcccagctatttctgaggcaggaagatcacttgagcccaggagtttgagttcagcatgggcaacatgagacctgtgagactttgtctctaaaaaaatttaaataaataactaagataaatgtaaaattacagctgtagtaagttctacaaaggagagttacatgggctatgacgatgtaagatagcaagaactgacattggcagggaggaaatgatgatgagtagaagtaaataagtgaagtgtggggattgatgtcaaggggacagtataaaagaaataacagcatgcgccaaggccctaaaattggaaagtccttggcaaattaaaggagtttgaaaaaggccattgtgtgcaaagcagaaaataggtactacaaggtaaaagatggagctaagcggtaggtaaggctaaaccttgtcagccattgttaaatattgaattgtatcctaagcacaactcagtggaaagcagttaaagttctttaattgggggaggcaatgaaggggtaataaaattggttatagaaatactgctctggctctagtgttgagaatgaattggagtagccagagtagattcaagaagactttagtaagattattccaacaggccaggacctgttatagggtggtggcaatggagagagatggacagaatggagagtgtatttaggaggtaaaaatgacagaacttggtgatgcactgaatgtgaaatggggaaggtgtctaggaggactactaggtttatggtttgcgtattagggtggatgatagcagtttcatttactgagacagggagccctggcagagtacccagcttttagagtgggtagggggaaggggagagtgcatctggtgttgggcattttgaagtgatttacatacaacaaactgaaggtatctttaacactgagtccagcaggttagcatatttattcagcaagcattgcacctttttttgttgtttttggggtcttcaactcctggcctcgaatcctccctccttcccccgcctctcccagcctccgcctcccaaagtgctgggatttcaggagtgagccaccgcgcctggccagcatcgcgctgtttgtgcagtgtgccctgtgctaggtcttgcagtgggtaccagtagagacataaaagtacaaaagataattggacgtttagtagagtcctgaaagggggcgggataggaagatacctaaccataagaaaaaccagcaagagcggaaaaggagctagtcctccagatcaataagttaatcacttatgtttgtgattccctgcattttgggtgattctctgtcgaggtcctcttaagtccagacttttgatataatctgcagtttgcgccatttggattcctgaagcatctttacaagccacctacattccttatggagctgtggcacaacagcaagcccacgatgtctcaccggattaataaaaatataggcgctcacgcttttgtttaccgatatagtatctcctcctcccctcactccatcaacccccacgcgacacaactttccggaagtaagcaaaatccgttatcaaggtgaaactccggggaccaggctccacagctgccataaactggatggcacgttagaagccggtgggtgtaggtgaggcacgctggcgcccgcgggcccttctccagccgctacccagtgggaatccgcggggctgaagccccgaaaccaggctgagcgtcccagagcgcaacctccctttcccccagcagcgccggcgccgcagaagccgcgtgtccccaggcgcactcccccaaggtgaacccccgccccccacggaggcggctgggtcgcgggtctgggcggggcgctccggacgccctcccgccgctgcgcacccctcccgcgagctgccagctccctcggcctctccacccaaaactggcccaaccgccaatcgtctgcctctcacctcctacagcaggtgacccatggccaatcgccaggggtctctttgccaggagccgccagggccagccaatcggggcgacccctccgccggggaggggacgggaaaggggtggggggtgaagggggtgaagggggtgtcccgggggacgggctgaacctcagtcaggaccgcctgcaccgcagtccggggatcgggtcgaggggagaagaaaaaggggtgctcgggagcagcccccggctacctcccctggaggcacagagggcgggggccttggcgaatggctttcttgctggccacttgcggagtgagtagaccccgagggtctgggagaggggccggcccctacccctgagtccccggggtcccggccgccaggccggagcgcgaatgtcgtgctcaccctgcctccttcccgccgccccctgggctttttgatgacaagcttcaaaactgcaaagaagatgaacagagaaagaaaattgaaactctcaaagagacaacaaatagcatggtagaatcaattaaacactgcattgtgttgctgcagattgccaaagaccagagtaatgcggagaagcacgcagatggaatgataagtactattaatcccgtagatgcaatatatcaacctagtcctttggaacctgtgatcagcacaatgccttcccagactgtgttacctccagaacctgttcagttgtgtaagtcagagcagcgtccatcttccctaccagttggacctgtgttggctaccttgggacatcatcagactcctacaccaaatagtacaggcagtggccattcaccaccgagtagcagtctcacttctccaagccacgtgaacttgtctccaaatacagtcccagagttctcttactccagcagtgaagatgaattttatgatgctgatgaattccatcaaagtggctcatccccaaagcgcttaatagattcttctggatctgcctcagtcctgacacacagcagctcgggaaatagtctaaaacgcccagataccacagaatcacttaattcttccttgtccaatggaacaagtgatgctgacctgtttgattcacatgatgacagagatgatgatgcggaggcagggtctgtggaggagcacaagagcgttatcatgcatctcttgtcgcaggttagacttggaatggatcttactaaggtagttcttccaacgtttattcttgaaagaagatctcttttagaaatgtatgcagacttttttgcacatccggacctgtttgtgagcattagtgaccagaaggatcccaaggatcgaatggttcaggttgtgaaatggtacctctcagcctttcatgcgggaaggaaaggatcagttgccaaaaagccatacaatcccattttgggcgagatttttcagtgtcattggacattaccaaatgatactgaagagaacacagaactagtttcagaaggaccagttccctgggtttccaaaaacagtgtaacatttgtggctgagcaggtttcccatcatccacccatttcagccttttatgctgagtgttttaacaagaagatacaattcaatgctcatatctggaccaaatcaaaattccttgggatgtcaattggggtgcacaacatagggcagggctgtgtctcatgtctagactatgatgaacattacattctcacattccccaatggctatggaaggtctatcctcacagtgccctgggtggaattaggaggagaatgcaatattaattgttccaaaacaggctatagtgcaaatatcatcttccacactaaacccttctatgggggcaagaagcacagaattactgccgagattttttctccaaatgacaagaagtctttttgctcaattgaaggggaatggaatggtgtgatgtatgcaaaatatgcaacaggggaaaatacagtctttgtagataccaagaagttgcctataatcaagaagaaagtgaggaagttggaagatcagaacgagtatgaatcccgcagcctttggaaggatgtcactttcaacttaaaaatcagagacattgatgcagcaactgaagcaaagcacaggcttgaagaaagacaaagagcagaagcccgagaaaggaaggagaaggaaattcagtgggagacaaggttatttcatgaagatggagaatgctgggtttatgatgaaccattactgaaacgtcttggtgctgccaagcattaggttggaagatgcaaagtttatacctgatgatcagggcagtaggcataattcagcaacaaacaatcttcctttgggagaaacctgttcattccaatcttctaattacagtggttcctatctcagggatactggactttctgacgcagatgaacaattaaggggaaaagcttcccttttccctctgtggcagttacgattttgacttcagtcctgagaaaaacttcaggttttgaaaatcagatgatgtcttctccttttccaaacaccacacgttgaaagcatttataaatccaagtctgaaactctgcgctctagtactgctgttaagatacacaacttgtttcttagttcatataatctcgggatacacacacacacacacatatatatacacacacatacgtatacacacacatacatatatataaatatacctgatgccagatttttttcataaatattctgcctactgtaaatatgggttcctctgagttgttttagaaaattagcgcaatgtattaaaatcaagtgttaggaaatttcatggtcttacctacaataacttttattttggaattgaactattattaaattgtatctaatcctggaaaaaaaaaaaaaaaaaaaaaaaaaaaaaaaacaaaaaaaagaacaaaataaaaaaaaagaaaacaacaaaaaaaaaaacaacaaaaaacaaaagagagggaggaggcgcaacaagcacaacgaagcactaccccgggagggggcacgccgcacacagaacgccggagcggcacgcccggaccccactatctagaaacgacaaagcgtgtgcccacacaaaacaaaagtaaaaagagcgcagacttatcaatcagacacacgccaagcgacgagacgcggccgcagatcctcaacaaacacagcacactgaatagcaaggtggagagaaacacaacctggtggctgacgcagcgacacacatcctgcgaaggaaaagacgagacactcacactaccatgggagagtggaggagcaaaacaacacacaggcgagaagaacaacaaaaacccagccacaccagcaaacataaacacgccaccatgacaacggcgacaacacaacaacgaccacgtctcaagcccgagtcactaactgagcacagacaacaccgcacacacaactacaatcagccgcggaacaaaggacaactaactacgaacgacaaccgactgatcagagcagagacaaacactcaactccaaccgagggagcgatcaaagaacaaataaggan

SEQ ID NO: 735130 - DNA, 18612 bp, Homo sapiens
gtaagggtctttacatggtttccagatagttcattagttgttgctttctttttttgtctgttttctgttttttttttttaaataactgtggtatgatgtaataggaacttataatttctgagttgcttatttttcctttacagttatagtaaagttatactcatttattttctcctgctttctgcagagtaaaatactgatttttgtctagaaacaagacagtgcaagacaatgttgaaagtgaaattctatgttaaaatatgccagatttattttaagaatttaatatctgtagtcagttatcaatacaaccaaattacataattatgcatgataataggtaaatactgagaagttcacctcattttcttgttaaaggatttggctattaccgtatgtgtcagttagtactcttttgtatggtagtgaaagaaaactcaacccaaactgattcatgaagaagaaagtaaatctggttagatgtggtttgaattaggtaattcatgtcatgaggactcagatctcccatctctatttctacgttccacttttgcattggcttcattttcggttaggttctcccttggtggtggtaaggtggttgtagcaatgtcagcctcccatttttggaaccgagtccataggaggctattctttctagaccttaataggagtaacacaattattgctcatcaccctagctttggccatgtgtcaaatcctgaccagtcacaatttcacagtcatagattctaccctggagctgggatgttactggcctcactagaaacacattgctgatagggtagaaggtgtgttcatcctacccaacccgacccgcaccaaagtcagaatagggaaaaacagatgttgggtgacatgcaactaacgtctgccgtactacactgaagatatttttctatgtttattctccagtgaaagagcttatatttgtggtacataggggattttgttttaatttagaaaatttaattgtagaaaacatgttttataaccctttctctgtactttgttctatatcaggaattgacttgattagataaggtgacatagggtatcttaggccctacaagatagtaaaccccccatcacttgaaagtattcagtagaggcttaaaaaacattattaaaggatgtggttattaggggactttaagaaatgaatatgaaattgaagtaggaaatctttaagctactctgtgagttatgccttttaaaagcaatttgtaattcctgtagatttcttttaaatttaggcagtttcataaatgactatagcatcattttagcaaatttgtgatcctgtaagaggaggataagtgttttttgtttgtttgtttgttttttgtttttttgagacagagtctcactttgtaccccagaaagtaaatctagttagatgtggtttgtctcggctcactgcaacctccaccccgtgcgttctagcaattctcctgcctcagccaccacacctggcctaagaggggaggataagtgttttagtgatcatattagactgaatgtggcagatgagatttcccgcccccccattgttggttagactgacattcaacattcaacaagagccacctgcccttgtaggcatttctgccactatacccctacataaacctagagtgctattgcttacttgctttccttcaaatacattttttcatttgtggcctccacattcttgtgtgtgatgtcctttctctgtgaaatgtcttctaccctttttttcaaagcctagtttagaactgacctcttctatgaaccctctgccgactggcctttccttccccagtcccccaagttcaaaatgatctctttcctttgaatactatagtatttgcacaattcactatctccttatcatattcttcttgtttatttgttatcagctgatgttgacatcataagttcaggttcctaactagatccaatattggaatttttcagcttttgctaagaagagagcttgtatgtctttgggaataatgggcagaaaaagataactttgagaagtcttagacttctaatagctttgatatttaaaagtacatgtaatacaagaggtttttttcctacatttaatgcatggagaagataggacatttagaaatatggaattaatgttcatttgactggcaaaagattattttctcagatgtagtgaagtgtggtaaagaacttcactctagagccagaatgtctgtgtttgtatcccagagcccaccacttacatttaaccattaacattcaacttactgtctctgagtttcagtggcctcatctataaaatgaggataataagagtacctacttcatagagttgttttagtggttaaataaactaacgtaaacttgctagaacttgataaactaatattggatgagaactggttgaaataatgcctggctatagtaaaaacttggtaaatgttagttgccattacaatgcaactactgttcctaccattccctctgccagtgcctggtattcagtagcactcagtaaatgttagttaaatgaagaaataactgaaggaatgaatgaacaaatggttgatgtagagattgcttttccattgttgtttattgaatattttgagatgtataacatactgtctgttaggcactgtgggatgggcactcacggagctgtcttccaaaggggtataggagaggagacgcagtgatctcagcaacctacctttaaaacatatcctagtatctactgccatgttaggttctcttcttttgctttttttaaaaaaaaattctcacaaaactccccccacccacttcagtttatagatgaggaagctcctactacataatagtgcttcccagtctaattcttgacctcattgtatttatatgtcctttttttttttgacagagtctcactcattgcagtggcacaatcacagctcactgcaacctctgcctcccctgctcaagtgatcctcccacctcaacctcctgagtagctgggactacaggcatgcaccaccacgcctggctaatttttgtatttttttgtagagatgcggttttgccatgttggccaggctggtctcgaactcctgggctcaagccatctgcccactttggcctctgagagtgctgagattataggcatgagccaccattcccagccatgttttcctttttcattgaactttatctactttagccattaaactccactccattggtcttgtcattactaagagctgaaccacctgcaaaatattaagttaaaaagcgttttctttgacaacagttttcttttcttcatcttcctctatcactttacttctgaacttttattctctcattttgatctgacccctacttctctgtttttcctggccatttagtactttcttgttttgctcatcccatttcccagtggagaccttctggtctgctgctttatcactggttttgttagaagacatacaaatggcaaggaggtatatgaaaaggtgcctaacatcattgatcatcagagaaatgcagaccaaaactacaatgagatatcatttcaccccagttaaaatggctttttttttttttttccaaaagacaggcaataacaaagtactggtgaggatgtggagtaaagggaacccacatacactattagtaggaatgtaaattagtacagccactgtggagaacagtttgaaggttcctcaaaaaactaaaaatagagctaccatataatccagcaatcccactgctaggtatatatccaaaagaaaggcaatcaatatacggaagagatacctgcacacccaggtttattgcagcactattcacaatagccaagatttggaagcaacccaggtgtccaacagatgaatggataaagaaaacatggtatataaacacaatggaatactattcagctgtgaaaaagaatgaaatcctgtcatttgcaatcctgtcttgaatagaactggaggtcatgatgttaagtgaaataagacaggcacaaacttcacatgttctcacttatttgtgggagctaaaaattaaaacaatcgaactcatggagctagagaatagaattatggttaccagaggctggaagggtggttgggcgtataagtgtagggggagtggggatggttaatgggtacaaaaaaatgagaacgaataagatctacttgataacacaacagggtgactatagtcaacagtaattatacatttaaaaataactagaagagtataattagattgtaacacaaaagataaatgcttgaggtgatggatacctatttaccctgatgtgattattacttatttcatgcctatatcaaaatatttatactccaaaaatatatatacctactatgtacccacaaaaatttaaaaatttatatattgtttttgctatcacctttagaatttcttgtcattggatagttcgtctgtataccattctggtcttcattccccagggcccccgttgtctgatttttctgcttctagaactgttagaggtcacaaaagcaagatggttgtatctatcacaatttttgtctgactttaactgggtatctgttacgatttagtagtcatcttactgacttcttgttggtttccaattgaatcctcacagtagactgttttcattgtaatcagtatcgaattatagcctgttcccttcttcataaatgaaggctttcttcttcaacagttcttagtgacttcacctgtactttatttctctgctttgaatatttcgaagaaaacatattcttgctctttcccaaggttaacactacatacattaccttgaccacaggatgttttcttgcagattgtgacctaattccatcacccttcagcagcccccaccgttttcatggattcagctaaaccttctgtaagatgactctttttccccctaatctttatatctcttttgatatgtagctttagtctcactttttttccttttggattttgccagttagatgtctccctggaattccacttcagcatggctaagactaagcttgtcttctctttcctccccaaagcaaattgtaattaggatagactgaaggtgacagaagataactaagatcttcttcatcctttcggctcttatggaagctgaattccagtagtcattctaaatttgttgtatgtcagcttatggtatcttttcatgtctttacattcagccaaagaggaagttccttgaaggggagaccagagggcgtgctgtgcttcttaatcctctctttcttaaccagtaagaggcattcagtagatatctgatgatactgattaatagaggggaacttttcagattcttttttttttttaaccctagtaagctttagtacaaactaaatgctgagagattatcaagtaagggattgatcatcacaagaagactcaggatgttacatcctgtaggttttatagtttcctatattgtaaaaaatatgagttatagcagcttgtctggatgtcatacaggtataaaaatcagttttataaacttgagtaaattggggcccattttagaaaaaactcttgcaggctgtgaatgccaatatataagtaaagtattaagtataatgttatttaatgtgggcaaacataaagccaggtgtaaattttttaggtttaaaatcttatagaactatacatccaaaagaaaatttcaagttaaacataatacaaagcaatacaatctaaattaacattaatttaatgtgatgaatgatattgccttgctaaaagtgggtcactacttacaatgtgcaaatggtactcatcgttagggtatagattcttttaaactatgacatacgtacactaccatgtggaacgtgatgatgtgttctctgttctaactactgggaagacttccttggcatagcacatgccatggggtcagttggctttgacttcatatagatatgccatttacttggtcagtgtcacttctatgacaagtagtatgttgtgccagtttgattataagtacaaatatgggcaatgaagtaacttggttttaaggttgttactaagctgagtaacagtgtgtggctatacaaatttttataggctatcaggaatgaaaacacaggagattgttgtagattcaagtattttagattcaagtttgaagatgctcatgcagatgtttaactgagttgtatagacctttatgtttctttctttttctctttttttttttttgagacagagtcttgctctgtcacccaagctggagtgcaatggtgtgatctcggcttactgcaacctccgcctcccaggttcaagcaattctcctgcctcagcctcccaagtagctgggattacagatgtgcaccacgacgcccagctgattttttgtattttagtagaggcggggtctcaccatgttgtcaagatggtctcaatctcctgaccttgtgatccacccacctctgcctcccaaagtgctgtgattacaggcgtgagccaccgcgcctgactgacctttatgtttcttaactttatgctatacatcagttgatatttcaaaaatttaaatggtttctatgattattctttgggctaagaaattgggcattaattgtcctcatatgtatggtttttgtggctacttcatgtagattttatttttggtggttatcaaattggaatttttttttttttttttttttttgagacggagtctcattctgtttcccaggttggagtacagtggtgcaatctcagctcactgcagcctcgacctcccaggctcaagcagtcctctcacctcagccttctaagtagctgggactacaggcacgcaccaccacacctggctagttttttgtgtttttagtagagatggggttttaccctgttggccaggctggtcttgaactcctggcctcaagtgatccacctgcctcagcctcccaaagtgctgggattagaggcatgagccaccacacctggctgaaattggaatttcattggtactgcctgtaattttatgttaatttttttttttttttgtcgtcactagcttttatctaaagcccctagagagaaaggccatgataccttgtatacaaggttataagagtatacaagggaaagggagggctgaagggaacagggtgggctggtacaagcctcattagaaataccattgagtctgtgagtaaaacatcattatatgaaaaggagatgtggttttagggtggtccaattacttttgcaccagcctaataaaattacaagtcattatcaatagagacattgtaaaacctttttttttcccaaaagaagtatcaggtatgataattacatgtctgcccaactttcgttatagattaacataacttaattgtatttaaggtacaatttaggagagttgctgaaaaatgaatctttagtattgggatgccttgattctaccctcaatagctataatggattatgtgtctgagtagattaataaaaatcttttgagcatttttcttgaactacttcactgaagattagctttttgagcatccattttaatttctcagtatataaggatcggtttatcacaactgtattgttttccctggccttgttagattatattttcatatcatgtagaaaaataggtgtattcgttctcccttgaagtcctttgtctcccaaaggaaatggttgcaatacagatgtgtcacctcttccacaggtaaagtggaatggagaagtagccagttaaatagtgcatgctcaatttggaacatttagagcatacaggaaagttatttatttggtaaatattttttaagcatttactatgtttcatgcattgtactagttgtagaggatataattgaatacaactacatgtagcccttgactttatggaactagtctagtataaagatttaagattgcctggcatggtggctcacgccactaatcccagcactttgagaggccaaggcaggattgcttgaggccagaagtttaagagtagcttggtcaacataatgagactccatctctaaaataaatagatagatagatagatagatagatagatagatagatagatagaagtagttagacaacacaaagcagtttcactcatcttgtggcaaggagttatgtatttctaatcaaatttggcaactcaagcattttcaacaaaatctacatgttttttcagaataaagtgaccaacacagaatgttacctgtaaaaatcagagcaataattgctatctaaaataattttgaaaattaagtggtactgaaaggctcatatagcaaaaatatggcctcctgtcattgtactttcctacttcccagactcaccattttcaacattttttagtagtttattttgccattttatagcatagtacctgacattttatttattcaacagacatttcttaagtacctaatacatgccattccttgtttgaagggatgctaaggatacagtggtgaacaaggcgttgtggggttgtatagagggtattcattcctaaccttgaaccaaatatttctttctgttggataatgcattaaaaattgcaaacagtttacaaacttttggagcaatggtggccttgatcataaagtagggactgcttctaccgtatacatgcttggtggtgtatttgtgatatctggctaaagtttctacatggaaattgactgactttagttttgagacttctgggaaccagtcaggcaaaatagtgaaactgtgtatcctgtttccaagagttgtcttttaaggttatctgcttcattcatttggcctgacttgctaggcaaatgcctagggtaaatatgatttgattaactataacaacaacagcaacaacaacaactttattttttagagcagtttgaggttcacagcaaaattgagcagaatgtacagagattttccctatacccgcttcccctacgcatgtgcggcctcccctactatcaacatcccccaccagagtggtttgttacaattaatgaacctacattgacacatcattatcactcaaggtccgtagtttacattagagtccactcttggtgttgtgtatgggtttggtcgattttataatgacatttatccaccattatagtgtcatacatagtaattttgctaccctaaaaatccagtgtgctccacctgttcctccttccctcctccctcatccctggcaaccactgaactttttaacatctccatagttttgccttttccagaatgtcatatcattggaatcacacagtatgcagccttttcaaatgggcttctttccgttagtaataggcatttaagtttcatcctcatcttttcatggcttgatagctcatttctttccctccctcttttcttccctgtcttccttccttcctcttctttcctgtttcctctttcttcttccttttttaagagacaaggtgtctcactctgttgcccaggctggagtgcagtggcccaatcatagctcattgcagccttgaattcctgggctcaagtgatcctcctgcgttagcctcctgagtagctgggatcacaggctccagtcattttagtgctgaataatatttcattatctggatgtaccgcctattcattcacctactgaagaatatcttggttgcttctaagttttggcaattatgagtgaagttactataaacattgtatacaagttttatgtggatgtatgttgtcatctcccttgggcagataccaaggagtgccattgttggatcatatggtaaatatatctttagttttgtacagaattctaggttggtatttttttctctctcagtcctttattttatttggagacagtctcgctatgtcgcccaggctgccatacagtggtgccatctgggctcactgaaacctccacctcccaggttcaagcgattcttgtgccttggcctcccaagtagctgggattacaggagtgcgccaccacgcctgctaatttttgtatttttagtagagacagggttttgccatgttgcccaggctggtctcaaactcctgaccttaagtgattcacccacctcaatctcccaaaatcctgggattacaggcctgagctactgtgcctgatctctctcagtactttaaagaaatatttcattccacttttcttttttttcttctttttgagatggagtctcactctgtcgcctgggctggagtgcagtggcgcgatctcagctcactgccacctccgcctcctgggttcaagtgattctcctgcctcagcctcctgaatagctgagattacaggcgcccaccaccatgcccagctaattttttgcatttttagtagagacgggggttccaccatgttggccaggctggtctcgaactcctgacctcgtgattcgcacatctcggcctcccaaattgctgggattacaggtgtgagctaccacgcctggcccactcttcttgcttacatagtttctgaggagatgtcagatgtaatttttatttttgctcttctgtaggcaagttgagttttttccccctctagcttctctcaggatttttttctttatctttgattttcagtagtttgaaaattatatgcctagctgtcagggttttttgcttgtttgtttttgttttctcaggtgtgactccagaaaggttctaaagaggagctttacaatctcttctctggggtttatggagacttcctttacccttctgtgttagccccttaaagcactgcgtcaaccttaaaagggcacaggaaagggtgtctatgccatttttatgccatttatcctgcttggtgttttctgagctttcttcatctgcggtttaatgtctcacattaatttgtagaaattctctgtcattgtttcaaatttttcttcagttcttttctctgtttcttcttctggtgttcccattatgcttttgtggttgtcgtacagttattggatattttgttccaggcttttttttttccagtctttttttccttttgcttctcggttttgtaggtgtctgttgagatactctcaagtgcagatattctttcctcagctttgtctagtttactaataagcccattaaaggcagtcttcatttctgttacagtctttttgatcagtagcatttcttttttattctttcttaaaatttctgtctttctgcttacattgcccatctgttcttgcatggtttctactttgtccattagagttcttaggatatttatcataattatttcaaatttctggtgtaacaattccaacatccctgcaacatccaagtctagtttcgatgcttactgtgtctcttccagctgtgttttttcctatttaatatgtcttataattttttcttgatagccatacatgatgcattaggtaacagaaactgctgtgagtggacctttagtaatgtggtggtaaggtgtgcatggaggggaaacattttcagtctgttagtgaacttttgtcaacttcacatgtgcttctcaagtccatcctgtaagtgggagagtagggctagagaggactgaagttgggtatatattaaatactttctcctacaaagaagcctagaggggacgcattaggggattttttttcccccagtattcactgtgatgacccttattgagctcctggaggtaaaactcacaaaactgtggttctcccccctgcccatattactacatgtccctggagtttatatctttcagacttgtctgcactgagcttccaccaatttgtcaaatacagatcaggtttccctaccacccgtgcagttgaaaacccacatacaacttttgactcctccagagcttaactactcatagcctgctattgactggaagccttgccaataacataaacagttgattaatacatattttatatgttttctgtattatatattgtattcttacaataaagagaaaagaagatgttattaagaaaatcataaggaagataaaatatatttactgttcattaagtggttcccatgggtgctggttcccatggaggttgccccttgtgagtttttgctcagggaagttgtgattctctatatttgcctgttggtctcctaatttgggagtcatcagttttccctgtgacctcacttctcttacagagttaagaacagttgttggtttttcagtttgttcagtgttttacatgttgttagaacacagtggtacttctaagtttcttaacatgctagatcagaaacctgaagtctcacctaatttggctttttatattttttcttcttttttttcttccattgctaccaaagcatttttcatctgtgtctggggtgacattagagcagaatgtgatttctaggtaaacattattgggctccctagcagaaaaatttttgaaagtagtacatgaattctgtataattaaaattttcttttcatcttaataggtataggtaataggcacggcctattttttttttgctcaacagtctaaaatagtaatttaatcacctaatagccttagttatatagttgaaagaagagttggaaatctgattcatgggttggaaatcacctgtcacatatgagttttaggcactggtcactttattttgaaacagctttggggttttttcctttttcaactcataataggctttaacagcttttagttttgtttctgtttttttaacagcatgagttgccaaatttggttatagcttcttggtacaagatgggtaaatttgctttgtgttgtgtaattactttttattttaaatgctacctcttttatgaacactaactttacactaagattaggaaaatgagaattgcatgtctgcaacaaatagctatctgtagtattaaattgtgaaaatgtagactttggattggagctggcatctcttaatatgtaattgtaacatagagtaaataagtattttgtcccttgtagggtcaaacagtacagtgcatgggcagaattagagatgtaggcttttttttttttttttttttttactggcttagagaaccgtttgatcagctaatatggaattaagtccctagggctgcccaggcacaacattaactgctattaaaggaaaatttaaaagagtattagtgaaggttaaatactgaccatggacatctggcaaaattgatgttttttttcccctccaccattgtttatagtttattgttatttatcagagaattaatgtttattttcagaatctattaccataagaaatctgtttgaggacttcgtatgtgccaggaattctactaaataatgatataatgctgaacagaattagataggatcctcacttcgttaagcttacagtctagtggtatagatcaacattaatcaaagaataacacaaatagaaagcagagcagtggttcatgggattgactgtagagaagcatgagggaagttcccaggtgatggaaaatactttatttcttaatcgtggtggttacatgtgtgcatatgtttatgaaaatatattgtacatttaaagtggatacattttatcacatgtaaattatgactctataaagttaattaaaaagaataactcaggtaaggtggtgtgtgcgcctgtagtcccagctatttctgaggcaggaagatcacttgagcccaggagtttgagttcagcatgggcaacatgagacctgtgagactttgtctctaaaaaaatttaaataaataactaagataaatgtaaaattacagctgtagtaagttctacaaaggagagttacatgggctatgacgatgtaagatagcaagaactgacattggcagggaggaaatgatgatgagtagaagtaaataagtgaagtgtggggattgatgtcaaggggacagtataaaagaaataacagcatgcgccaaggccctaaaattggaaagtccttggcaaattaaaggagtttgaaaaaggccattgtgtgcaaagcagaaaataggtactacaaggtaaaagatggagctaagcggtaggtaaggctaaaccttgtcagccattgttaaatattgaattgtatcctaagcacaactcagtggaaagcagttaaagttctttaattgggggaggcaatgaaggggtaataaaattggttatagaaatactgctctggctctagtgttgagaatgaattggagtagccagagtagattcaagaagactttagtaagattattccaacaggccaggacctgttatagggtggtggcaatggagagagatggacagaatggagagtgtatttaggaggtaaaaatgacagaacttggtgatgcactgaatgtgaaatggggaaggtgtctaggaggactactaggtttatggtttgcgtattagggtggatgatagcagtttcatttactgagacagggagccctggcagagtacccagcttttagagtgggtagggggaaggggagagtgcatctggtgttgggcattttgaagtgatttacatacaacaaactgaaggtatctttaacactgagtccagcaggttagcatatttattcagcaagcattgcacctttttttgttgtttttggggtcttcaactcctggcctcgaatcctccctccttcccccgcctctcccagcctccgcctcccaaagtgctgggatttcaggagtgagccaccgcgcctggccagcatcgcgctgtttgtgcagtgtgccctgtgctaggtcttgcagtgggtaccagtagagacataaaagtacaaaagataattggacgtttagtagagtcctgaaagggggcgggataggaagatacctaaccataagaaaaaccagcaagagcggaaaaggagctagtcctccagatcaataagttaatcacttatgtttgtgattccctgcattttgggtgattctctgtcgaggtcctcttaagtccagacttttgatataatctgcagtttgcgccatttggattcctgaagcatctttacaagccacctacattccttatggagctgtggcacaacagcaagcccacgatgtctcaccggattaataaaaatataggcgctcacgcttttgtttaccgatatagtatctcctcctcccctcactccatcaacccccacgcgacacaactttccggaagtaagcaaaatccgttatcaaggtgaaactccggggaccaggctccacagctgccataaactggatggcacgttagaagccggtgggtgtaggtgaggcacgctggcgcccgcgggcccttctccagccgctacccagtgggaatccgcggggctgaagccccgaaaccaggctgagcgtcccagagcgcaacctccctttcccccagcagcgccggcgccgcagaagccgcgtgtccccaggcgcactcccccaaggtgaacccccgccccccacggaggcggctgggtcgcgggtctgggcggggcgctccggacgccctcccgccgctgcgcacccctcccgcgagctgccagctccctcggcctctccacccaaaactggcccaaccgccaatcgtctgcctctcacctcctacagcaggtgacccatggccaatcgccaggggtctctttgccaggagccgccagggccagccaatcggggcgacccctccgccggggaggggacgggaaaggggtggggggtgaagggggtgaagggggtgtcccgggggacgggctgaacctcagtcaggaccgcctgcaccgcagtccggggatcgggtcgaggggagaagaaaaaggggtgctcgggagcagcccccggctacctcccctggaggcacagagggcgggggccttggcgaatggctttcttgctggccacttgcggagtgagtagaccccgagggtctgggagaggggccggcccctacccctgagtccccggggtcccggccgccaggccggagcgcgaatgtcgtgctcaccctgcctccttcccgccgccccctgggctttttgatgacaagcttcaaaactgcaaagaagatgaacagagaaagaaaattgaaactctcaaagagacaacaaatagcatggtagaatcaattaaacactgcattgtgttgctgcagattgccaaagaccagagtaatgcggagaagcacgcagatggaatgataagtactattaatcccgtagatgcaatatatcaacctagtcctttggaacctgtgatcagcacaatgccttcccagactgtgttacctccagaacctgttcagttgtgtaagtcagagcagcgtccatcttccctaccagttggacctgtgttggctaccttgggacatcatcagactcctacaccaaatagtacaggcagtggccattcaccaccgagtagcagtctcacttctccaagccacgtgaacttgtctccaaatacagtcccagagttctcttactccagcagtgaagatgaattttatgatgctgatgaattccatcaaagtggctcatccccaaagcgcttaatagattcttctggatctgcctcagtcctgacacacagcagctcgggaaatagtctaaaacgcccagataccacagaatcacttaattcttccttgtccaatggaacaagtgatgctgacctgtttgattcacatgatgacagagatgatgatgcggaggcagggtctgtggaggagcacaagagcgttatcatgcatctcttgtcgcaggttagacttggaatggatcttactaaggtagttcttccaacgtttattcttgaaagaagatctcttttagaaatgtatgcagacttttttgcacatccggacctgtttgtgagcattagtgaccagaaggatcccaaggatcgaatggttcaggttgtgaaatggtacctctcagcctttcatgcgggaaggaaaggatcagttgccaaaaagccatacaatcccattttgggcgagatttttcagtgtcattggacattaccaaatgatactgaagagaacacagaactagtttcagaaggaccagttccctgggtttccaaaaacagtgtaacatttgtggctgagcaggtttcccatcatccacccatttcagccttttatgctgagtgttttaacaagaagatacaattcaatgctcatatctggaccaaatcaaaattccttgggatgtcaattggggtgcacaacatagggcagggctgtgtctcatgtctagactatgatgaacattacattctcacattccccaatggctatggaaggtctatcctcacagtgccctgggtggaattaggaggagaatgcaatattaattgttccaaaacaggctatagtgcaaatatcatcttccacactaaacccttctatgggggcaagaagcacagaattactgccgagattttttctccaaatgacaagaagtctttttgctcaattgaaggggaatggaatggtgtgatgtatgcaaaatatgcaacaggggaaaatacagtctttgtagataccaagaagttgcctataatcaagaagaaagtgaggaagttggaagatcagaacgagtatgaatcccgcagcctttggaaggatgtcactttcaacttaaaaatcagagacattgatgcagcaactgaagcaaagcacaggcttgaagaaagacaaagagcagaagcccgagaaaggaaggagaaggaaattcagtgggagacaaggttatttcatgaagatggagaatgctgggtttatgatgaaccattactgaaacgtcttggtgctgccaagcattaggttggaagatgcaaagtttatacctgatgatcagggcagtaggcataattcagcaacaaacaatcttcctttgggagaaacctgttcattccaatcttctaattacagtggttcctatctcagggatactggactttctgacgcagatgaacaattaaggggaaaagcttcccttttccctctgtggcagttacgattttgacttcagtcctgagaaaaacttcaggttttgaaaatcagatgatgtcttctccttttccaaacaccacacgttgaaagcatttataaatccaagtctgaaactctgcgctctagtactgctgttaagatacacaacttgtttcttagttcatataatctcgggatacacacacacacacacatatatatacacacacatacgtatacacacacatacatatatataaatatacctgatgccagatttttttcataaatattctgcctactgtaaatatgggttcctctgagttgttttagaaaattagcgcaatgtattaaaatcaagtgttaggaaatttcatggtcttacctacaataacttttattttggaattgaactattattaaattgtatctaatcctggaaaaaaaacaaaaatgctagtaaaatgataatgtaccgaaattggagaaatattcaattgtaactcacttttaaaaataataaaaccttagggggggtcccggtacaaatttccccttatagagggcggttttaaatttaattggcggcttttaacaacgtt

SEQ ID NO: 735131 - DNA, 18402 bp, Homo sapiens
  misc_feature (18326)..(18326): n is a, c, g, or t
  misc_feature (18337)..(18337): n is a, c, g, or t
  misc_feature (18342)..(18342): n is a, c, g, or t
  misc_feature (18345)..(18345): n is a, c, g, or t
  misc_feature (18347)..(18347): n is a, c, g, or t
gtaagggtctttacatggtttccagatagttcattagttgttgctttctttttttgtctgttttctgttttttttttttaaataactgtggtatgatgtaataggaacttataatttctgagttgcttatttttcctttacagttatagtaaagttatactcatttattttctcctgctttctgcagagtaaaatactgatttttgtctagaaacaagacagtgcaagacaatgttgaaagtgaaattctatgttaaaatatgccagatttattttaagaatttaatatctgtagtcagttatcaatacaaccaaattacataattatgcatgataataggtaaatactgagaagttcacctcattttcttgttaaaggatttggctattaccgtatgtgtcagttagtactcttttgtatggtagtgaaagaaaactcaacccaaactgattcatgaagaagaaagtaaatctggttagatgtggtttgaattaggtaattcatgtcatgaggactcagatctcccatctctatttctacgttccacttttgcattggcttcattttcggttaggttctcccttggtggtggtaaggtggttgtagcaatgtcagcctcccatttttggaaccgagtccataggaggctattctttctagaccttaataggagtaacacaattattgctcatcaccctagctttggccatgtgtcaaatcctgaccagtcacaatttcacagtcatagattctaccctggagctgggatgttactggcctcactagaaacacattgctgatagggtagaaggtgtgttcatcctacccaacccgacccgcaccaaagtcagaatagggaaaaacagatgttgggtgacatgcaactaacgtctgccgtactacactgaagatatttttctatgtttattctccagtgaaagagcttatatttgtggtacataggggattttgttttaatttagaaaatttaattgtagaaaacatgttttataaccctttctctgtactttgttctatatcaggaattgacttgattagataaggtgacatagggtatcttaggccctacaagatagtaaaccccccatcacttgaaagtattcagtagaggcttaaaaaacattattaaaggatgtggttattaggggactttaagaaatgaatatgaaattgaagtaggaaatctttaagctactctgtgagttatgccttttaaaagcaatttgtaattcctgtagatttcttttaaatttaggcagtttcataaatgactatagcatcattttagcaaatttgtgatcctgtaagaggaggataagtgttttttgtttgtttgtttgttttttgtttttttgagacagagtctcactttgtaccccagaaagtaaatctagttagatgtggtttgtctcggctcactgcaacctccaccccgtgcgttctagcaattctcctgcctcagccaccacacctggcctaagaggggaggataagtgttttagtgatcatattagactgaatgtggcagatgagatttcccgcccccccattgttggttagactgacattcaacattcaacaagagccacctgcccttgtaggcatttctgccactatacccctacataaacctagagtgctattgcttacttgctttccttcaaatacattttttcatttgtggcctccacattcttgtgtgtgatgtcctttctctgtgaaatgtcttctaccctttttttcaaagcctagtttagaactgacctcttctatgaaccctctgccgactggcctttccttccccagtcccccaagttcaaaatgatctctttcctttgaatactatagtatttgcacaattcactatctccttatcatattcttcttgtttatttgttatcagctgatgttgacatcataagttcaggttcctaactagatccaatattggaatttttcagcttttgctaagaagagagcttgtatgtctttgggaataatgggcagaaaaagataactttgagaagtcttagacttctaatagctttgatatttaaaagtacatgtaatacaagaggtttttttcctacatttaatgcatggagaagataggacatttagaaatatggaattaatgttcatttgactggcaaaagattattttctcagatgtagtgaagtgtggtaaagaacttcactctagagccagaatgtctgtgtttgtatcccagagcccaccacttacatttaaccattaacattcaacttactgtctctgagtttcagtggcctcatctataaaatgaggataataagagtacctacttcatagagttgttttagtggttaaataaactaacgtaaacttgctagaacttgataaactaatattggatgagaactggttgaaataatgcctggctatagtaaaaacttggtaaatgttagttgccattacaatgcaactactgttcctaccattccctctgccagtgcctggtattcagtagcactcagtaaatgttagttaaatgaagaaataactgaaggaatgaatgaacaaatggttgatgtagagattgcttttccattgttgtttattgaatattttgagatgtataacatactgtctgttaggcactgtgggatgggcactcacggagctgtcttccaaaggggtataggagaggagacgcagtgatctcagcaacctacctttaaaacatatcctagtatctactgccatgttaggttctcttcttttgctttttttaaaaaaaaattctcacaaaactccccccacccacttcagtttatagatgaggaagctcctactacataatagtgcttcccagtctaattcttgacctcattgtatttatatgtcctttttttttttgacagagtctcactcattgcagtggcacaatcacagctcactgcaacctctgcctcccctgctcaagtgatcctcccacctcaacctcctgagtagctgggactacaggcatgcaccaccacgcctggctaatttttgtatttttttgtagagatgcggttttgccatgttggccaggctggtctcgaactcctgggctcaagccatctgcccactttggcctctgagagtgctgagattataggcatgagccaccattcccagccatgttttcctttttcattgaactttatctactttagccattaaactccactccattggtcttgtcattactaagagctgaaccacctgcaaaatattaagttaaaaagcgttttctttgacaacagttttcttttcttcatcttcctctatcactttacttctgaacttttattctctcattttgatctgacccctacttctctgtttttcctggccatttagtactttcttgttttgctcatcccatttcccagtggagaccttctggtctgctgctttatcactggttttgttagaagacatacaaatggcaaggaggtatatgaaaaggtgcctaacatcattgatcatcagagaaatgcagaccaaaactacaatgagatatcatttcaccccagttaaaatggctttttttttttttttccaaaagacaggcaataacaaagtactggtgaggatgtggagtaaagggaacccacatacactattagtaggaatgtaaattagtacagccactgtggagaacagtttgaaggttcctcaaaaaactaaaaatagagctaccatataatccagcaatcccactgctaggtatatatccaaaagaaaggcaatcaatatacggaagagatacctgcacacccaggtttattgcagcactattcacaatagccaagatttggaagcaacccaggtgtccaacagatgaatggataaagaaaacatggtatataaacacaatggaatactattcagctgtgaaaaagaatgaaatcctgtcatttgcaatcctgtcttgaatagaactggaggtcatgatgttaagtgaaataagacaggcacaaacttcacatgttctcacttatttgtgggagctaaaaattaaaacaatcgaactcatggagctagagaatagaattatggttaccagaggctggaagggtggttgggcgtataagtgtagggggagtggggatggttaatgggtacaaaaaaatgagaacgaataagatctacttgataacacaacagggtgactatagtcaacagtaattatacatttaaaaataactagaagagtataattagattgtaacacaaaagataaatgcttgaggtgatggatacctatttaccctgatgtgattattacttatttcatgcctatatcaaaatatttatactccaaaaatatatatacctactatgtacccacaaaaatttaaaaatttatatattgtttttgctatcacctttagaatttcttgtcattggatagttcgtctgtataccattctggtcttcattccccagggcccccgttgtctgatttttctgcttctagaactgttagaggtcacaaaagcaagatggttgtatctatcacaatttttgtctgactttaactgggtatctgttacgatttagtagtcatcttactgacttcttgttggtttccaattgaatcctcacagtagactgttttcattgtaatcagtatcgaattatagcctgttcccttcttcataaatgaaggctttcttcttcaacagttcttagtgacttcacctgtactttatttctctgctttgaatatttcgaagaaaacatattcttgctctttcccaaggttaacactacatacattaccttgaccacaggatgttttcttgcagattgtgacctaattccatcacccttcagcagcccccaccgttttcatggattcagctaaaccttctgtaagatgactctttttccccctaatctttatatctcttttgatatgtagctttagtctcactttttttccttttggattttgccagttagatgtctccctggaattccacttcagcatggctaagactaagcttgtcttctctttcctccccaaagcaaattgtaattaggatagactgaaggtgacagaagataactaagatcttcttcatcctttcggctcttatggaagctgaattccagtagtcattctaaatttgttgtatgtcagcttatggtatcttttcatgtctttacattcagccaaagaggaagttccttgaaggggagaccagagggcgtgctgtgcttcttaatcctctctttcttaaccagtaagaggcattcagtagatatctgatgatactgattaatagaggggaacttttcagattcttttttttttttaaccctagtaagctttagtacaaactaaatgctgagagattatcaagtaagggattgatcatcacaagaagactcaggatgttacatcctgtaggttttatagtttcctatattgtaaaaaatatgagttatagcagcttgtctggatgtcatacaggtataaaaatcagttttataaacttgagtaaattggggcccattttagaaaaaactcttgcaggctgtgaatgccaatatataagtaaagtattaagtataatgttatttaatgtgggcaaacataaagccaggtgtaaattttttaggtttaaaatcttatagaactatacatccaaaagaaaatttcaagttaaacataatacaaagcaatacaatctaaattaacattaatttaatgtgatgaatgatattgccttgctaaaagtgggtcactacttacaatgtgcaaatggtactcatcgttagggtatagattcttttaaactatgacatacgtacactaccatgtggaacgtgatgatgtgttctctgttctaactactgggaagacttccttggcatagcacatgccatggggtcagttggctttgacttcatatagatatgccatttacttggtcagtgtcacttctatgacaagtagtatgttgtgccagtttgattataagtacaaatatgggcaatgaagtaacttggttttaaggttgttactaagctgagtaacagtgtgtggctatacaaatttttataggctatcaggaatgaaaacacaggagattgttgtagattcaagtattttagattcaagtttgaagatgctcatgcagatgtttaactgagttgtatagacctttatgtttctttctttttctctttttttttttttgagacagagtcttgctctgtcacccaagctggagtgcaatggtgtgatctcggcttactgcaacctccgcctcccaggttcaagcaattctcctgcctcagcctcccaagtagctgggattacagatgtgcaccacgacgcccagctgattttttgtattttagtagaggcggggtctcaccatgttgtcaagatggtctcaatctcctgaccttgtgatccacccacctctgcctcccaaagtgctgtgattacaggcgtgagccaccgcgcctgactgacctttatgtttcttaactttatgctatacatcagttgatatttcaaaaatttaaatggtttctatgattattctttgggctaagaaattgggcattaattgtcctcatatgtatggtttttgtggctacttcatgtagattttatttttggtggttatcaaattggaatttttttttttttttttttttttgagacggagtctcattctgtttcccaggttggagtacagtggtgcaatctcagctcactgcagcctcgacctcccaggctcaagcagtcctctcacctcagccttctaagtagctgggactacaggcacgcaccaccacacctggctagttttttgtgtttttagtagagatggggttttaccctgttggccaggctggtcttgaactcctggcctcaagtgatccacctgcctcagcctcccaaagtgctgggattagaggcatgagccaccacacctggctgaaattggaatttcattggtactgcctgtaattttatgttaatttttttttttttttgtcgtcactagcttttatctaaagcccctagagagaaaggccatgataccttgtatacaaggttataagagtatacaagggaaagggagggctgaagggaacagggtgggctggtacaagcctcattagaaataccattgagtctgtgagtaaaacatcattatatgaaaaggagatgtggttttagggtggtccaattacttttgcaccagcctaataaaattacaagtcattatcaatagagacattgtaaaacctttttttttcccaaaagaagtatcaggtatgataattacatgtctgcccaactttcgttatagattaacataacttaattgtatttaaggtacaatttaggagagttgctgaaaaatgaatctttagtattgggatgccttgattctaccctcaatagctataatggattatgtgtctgagtagattaataaaaatcttttgagcatttttcttgaactacttcactgaagattagctttttgagcatccattttaatttctcagtatataaggatcggtttatcacaactgtattgttttccctggccttgttagattatattttcatatcatgtagaaaaataggtgtattcgttctcccttgaagtcctttgtctcccaaaggaaatggttgcaatacagatgtgtcacctcttccacaggtaaagtggaatggagaagtagccagttaaatagtgcatgctcaatttggaacatttagagcatacaggaaagttatttatttggtaaatattttttaagcatttactatgtttcatgcattgtactagttgtagaggatataattgaatacaactacatgtagcccttgactttatggaactagtctagtataaagatttaagattgcctggcatggtggctcacgccactaatcccagcactttgagaggccaaggcaggattgcttgaggccagaagtttaagagtagcttggtcaacataatgagactccatctctaaaataaatagatagatagatagatagatagatagatagatagatagatagaagtagttagacaacacaaagcagtttcactcatcttgtggcaaggagttatgtatttctaatcaaatttggcaactcaagcattttcaacaaaatctacatgttttttcagaataaagtgaccaacacagaatgttacctgtaaaaatcagagcaataattgctatctaaaataattttgaaaattaagtggtactgaaaggctcatatagcaaaaatatggcctcctgtcattgtactttcctacttcccagactcaccattttcaacattttttagtagtttattttgccattttatagcatagtacctgacattttatttattcaacagacatttcttaagtacctaatacatgccattccttgtttgaagggatgctaaggatacagtggtgaacaaggcgttgtggggttgtatagagggtattcattcctaaccttgaaccaaatatttctttctgttggataatgcattaaaaattgcaaacagtttacaaacttttggagcaatggtggccttgatcataaagtagggactgcttctaccgtatacatgcttggtggtgtatttgtgatatctggctaaagtttctacatggaaattgactgactttagttttgagacttctgggaaccagtcaggcaaaatagtgaaactgtgtatcctgtttccaagagttgtcttttaaggttatctgcttcattcatttggcctgacttgctaggcaaatgcctagggtaaatatgatttgattaactataacaacaacagcaacaacaacaactttattttttagagcagtttgaggttcacagcaaaattgagcagaatgtacagagattttccctatacccgcttcccctacgcatgtgcggcctcccctactatcaacatcccccaccagagtggtttgttacaattaatgaacctacattgacacatcattatcactcaaggtccgtagtttacattagagtccactcttggtgttgtgtatgggtttggtcgattttataatgacatttatccaccattatagtgtcatacatagtaattttgctaccctaaaaatccagtgtgctccacctgttcctccttccctcctccctcatccctggcaaccactgaactttttaacatctccatagttttgccttttccagaatgtcatatcattggaatcacacagtatgcagccttttcaaatgggcttctttccgttagtaataggcatttaagtttcatcctcatcttttcatggcttgatagctcatttctttccctccctcttttcttccctgtcttccttccttcctcttctttcctgtttcctctttcttcttccttttttaagagacaaggtgtctcactctgttgcccaggctggagtgcagtggcccaatcatagctcattgcagccttgaattcctgggctcaagtgatcctcctgcgttagcctcctgagtagctgggatcacaggctccagtcattttagtgctgaataatatttcattatctggatgtaccgcctattcattcacctactgaagaatatcttggttgcttctaagttttggcaattatgagtgaagttactataaacattgtatacaagttttatgtggatgtatgttgtcatctcccttgggcagataccaaggagtgccattgttggatcatatggtaaatatatctttagttttgtacagaattctaggttggtatttttttctctctcagtcctttattttatttggagacagtctcgctatgtcgcccaggctgccatacagtggtgccatctgggctcactgaaacctccacctcccaggttcaagcgattcttgtgccttggcctcccaagtagctgggattacaggagtgcgccaccacgcctgctaatttttgtatttttagtagagacagggttttgccatgttgcccaggctggtctcaaactcctgaccttaagtgattcacccacctcaatctcccaaaatcctgggattacaggcctgagctactgtgcctgatctctctcagtactttaaagaaatatttcattccacttttcttttttttcttctttttgagatggagtctcactctgtcgcctgggctggagtgcagtggcgcgatctcagctcactgccacctccgcctcctgggttcaagtgattctcctgcctcagcctcctgaatagctgagattacaggcgcccaccaccatgcccagctaattttttgcatttttagtagagacgggggttccaccatgttggccaggctggtctcgaactcctgacctcgtgattcgcacatctcggcctcccaaattgctgggattacaggtgtgagctaccacgcctggcccactcttcttgcttacatagtttctgaggagatgtcagatgtaatttttatttttgctcttctgtaggcaagttgagttttttccccctctagcttctctcaggatttttttctttatctttgattttcagtagtttgaaaattatatgcctagctgtcagggttttttgcttgtttgtttttgttttctcaggtgtgactccagaaaggttctaaagaggagctttacaatctcttctctggggtttatggagacttcctttacccttctgtgttagccccttaaagcactgcgtcaaccttaaaagggcacaggaaagggtgtctatgccatttttatgccatttatcctgcttggtgttttctgagctttcttcatctgcggtttaatgtctcacattaatttgtagaaattctctgtcattgtttcaaatttttcttcagttcttttctctgtttcttcttctggtgttcccattatgcttttgtggttgtcgtacagttattggatattttgttccaggcttttttttttccagtctttttttccttttgcttctcggttttgtaggtgtctgttgagatactctcaagtgcagatattctttcctcagctttgtctagtttactaataagcccattaaaggcagtcttcatttctgttacagtctttttgatcagtagcatttcttttttattctttcttaaaatttctgtctttctgcttacattgcccatctgttcttgcatggtttctactttgtccattagagttcttaggatatttatcataattatttcaaatttctggtgtaacaattccaacatccctgcaacatccaagtctagtttcgatgcttactgtgtctcttccagctgtgttttttcctatttaatatgtcttataattttttcttgatagccatacatgatgcattaggtaacagaaactgctgtgagtggacctttagtaatgtggtggtaaggtgtgcatggaggggaaacattttcagtctgttagtgaacttttgtcaacttcacatgtgcttctcaagtccatcctgtaagtgggagagtagggctagagaggactgaagttgggtatatattaaatactttctcctacaaagaagcctagaggggacgcattaggggattttttttcccccagtattcactgtgatgacccttattgagctcctggaggtaaaactcacaaaactgtggttctcccccctgcccatattactacatgtccctggagtttatatctttcagacttgtctgcactgagcttccaccaatttgtcaaatacagatcaggtttccctaccacccgtgcagttgaaaacccacatacaacttttgactcctccagagcttaactactcatagcctgctattgactggaagccttgccaataacataaacagttgattaatacatattttatatgttttctgtattatatattgtattcttacaataaagagaaaagaagatgttattaagaaaatcataaggaagataaaatatatttactgttcattaagtggttcccatgggtgctggttcccatggaggttgccccttgtgagtttttgctcagggaagttgtgattctctatatttgcctgttggtctcctaatttgggagtcatcagttttccctgtgacctcacttctcttacagagttaagaacagttgttggtttttcagtttgttcagtgttttacatgttgttagaacacagtggtacttctaagtttcttaacatgctagatcagaaacctgaagtctcacctaatttggctttttatattttttcttcttttttttcttccattgctaccaaagcatttttcatctgtgtctggggtgacattagagcagaatgtgatttctaggtaaacattattgggctccctagcagaaaaatttttgaaagtagtacatgaattctgtataattaaaattttcttttcatcttaataggtataggtaataggcacggcctattttttttttgctcaacagtctaaaatagtaatttaatcacctaatagccttagttatatagttgaaagaagagttggaaatctgattcatgggttggaaatcacctgtcacatatgagttttaggcactggtcactttattttgaaacagctttggggttttttcctttttcaactcataataggctttaacagcttttagttttgtttctgtttttttaacagcatgagttgccaaatttggttatagcttcttggtacaagatgggtaaatttgctttgtgttgtgtaattactttttattttaaatgctacctcttttatgaacactaactttacactaagattaggaaaatgagaattgcatgtctgcaacaaatagctatctgtagtattaaattgtgaaaatgtagactttggattggagctggcatctcttaatatgtaattgtaacatagagtaaataagtattttgtcccttgtagggtcaaacagtacagtgcatgggcagaattagagatgtaggcttttttttttttttttttttttactggcttagagaaccgtttgatcagctaatatggaattaagtccctagggctgcccaggcacaacattaactgctattaaaggaaaatttaaaagagtattagtgaaggttaaatactgaccatggacatctggcaaaattgatgttttttttcccctccaccattgtttatagtttattgttatttatcagagaattaatgtttattttcagaatctattaccataagaaatctgtttgaggacttcgtatgtgccaggaattctactaaataatgatataatgctgaacagaattagataggatcctcacttcgttaagcttacagtctagtggtatagatcaacattaatcaaagaataacacaaatagaaagcagagcagtggttcatgggattgactgtagagaagcatgagggaagttcccaggtgatggaaaatactttatttcttaatcgtggtggttacatgtgtgcatatgtttatgaaaatatattgtacatttaaagtggatacattttatcacatgtaaattatgactctataaagttaattaaaaagaataactcaggtaaggtggtgtgtgcgcctgtagtcccagctatttctgaggcaggaagatcacttgagcccaggagtttgagttcagcatgggcaacatgagacctgtgagactttgtctctaaaaaaatttaaataaataactaagataaatgtaaaattacagctgtagtaagttctacaaaggagagttacatgggctatgacgatgtaagatagcaagaactgacattggcagggaggaaatgatgatgagtagaagtaaataagtgaagtgtggggattgatgtcaaggggacagtataaaagaaataacagcatgcgccaaggccctaaaattggaaagtccttggcaaattaaaggagtttgaaaaaggccattgtgtgcaaagcagaaaataggtactacaaggtaaaagatggagctaagcggtaggtaaggctaaaccttgtcagccattgttaaatattgaattgtatcctaagcacaactcagtggaaagcagttaaagttctttaattgggggaggcaatgaaggggtaataaaattggttatagaaatactgctctggctctagtgttgagaatgaattggagtagccagagtagattcaagaagactttagtaagattattccaacaggccaggacctgttatagggtggtggcaatggagagagatggacagaatggagagtgtatttaggaggtaaaaatgacagaacttggtgatgcactgaatgtgaaatggggaaggtgtctaggaggactactaggtttatggtttgcgtattagggtggatgatagcagtttcatttactgagacagggagccctggcagagtacccagcttttagagtgggtagggggaaggggagagtgcatctggtgttgggcattttgaagtgatttacatacaacaaactgaaggtatctttaacactgagtccagcaggttagcatatttattcagcaagcattgcacctttttttgttgtttttggggtcttcaactcctggcctcgaatcctccctccttcccccgcctctcccagcctccgcctcccaaagtgctgggatttcaggagtgagccaccgcgcctggccagcatcgcgctgtttgtgcagtgtgccctgtgctaggtcttgcagtgggtaccagtagagacataaaagtacaaaagataattggacgtttagtagagtcctgaaagggggcgggataggaagatacctaaccataagaaaaaccagcaagagcggaaaaggagctagtcctccagatcaataagttaatcacttatgtttgtgattccctgcattttgggtgattctctgtcgaggtcctcttaagtccagacttttgatataatctgcagtttgcgccatttggattcctgaagcatctttacaagccacctacattccttatggagctgtggcacaacagcaagcccacgatgtctcaccggattaataaaaatataggcgctcacgcttttgtttaccgatatagtatctcctcctcccctcactccatcaacccccacgcgacacaactttccggaagtaagcaaaatccgttatcaaggtgaaactccggggaccaggctccacagctgccataaactggatggcacgttagaagccggtgggtgtaggtgaggcacgctggcgcccgcgggcccttctccagccgctacccagtgggaatccgcggggctgaagccccgaaaccaggctgagcgtcccagagcgcaacctccctttcccccagcagcgccggcgccgcagaagccgcgtgtccccaggcgcactcccccaaggtgaacccccgccccccacggaggcggctgggtcgcgggtctgggcggggcgctccggacgccctcccgccgctgcgcacccctcccgcgagctgccagctccctcggcctctccacccaaaactggcccaaccgccaatcgtctgcctctcacctcctacagcaggtgacccatggccaatcgccaggggtctctttgccaggagccgccagggccagccaatcggggcgacccctccgccggggaggggacgggaaaggggtggggggtgaagggggtgaagggggtgtcccgggggacgggctgaacctcagtcaggaccgcctgcaccgcagtccggggatcgggtcgaggggagaagaaaaaggggtgctcgggagcagcccccggctacctcccctggaggcacagagggcgggggccttggcgaatggctttcttgctggccacttgcggagtgagtagaccccgagggtctgggagaggggccggcccctacccctgagtccccggggtcccggccgccaggccggagcgcgaatgtcgtgctcaccctgcctccttcccgccgccccctgggctttttgatgacaagcttcaaaactgcaaagaagatgaacagagaaagaaaattgaaactctcaaagagacaacaaatagcatggtagaatcaattaaacactgcattgtgttgctgcagattgccaaagaccagagtaatgcggagaagcacgcagatggaatgataagtactattaatcccgtagatgcaatatatcaacctagtcctttggaacctgtgatcagcacaatgccttcccagactgtgttacctccagaacctgttcagttgtgtaagtcagagcagcgtccatcttccctaccagttggacctgtgttggctaccttgggacatcatcagactcctacaccaaatagtacaggcagtggccattcaccaccgagtagcagtctcacttctccaagccacgtgaacttgtctccaaatacagtcccagagttctcttactccagcagtgaagatgaattttatgatgctgatgaattccatcaaagtggctcatccccaaagcgcttaatagattcttctggatctgcctcagtcctgacacacagcagctcgggaaatagtctaaaacgcccagataccacagaatcacttaattcttccttgtccaatggaacaagtgatgctgacctgtttgattcacatgatgacagagatgatgatgcggaggcagggtctgtggaggagcacaagagcgttatcatgcatctcttgtcgcaggttagacttggaatggatcttactaaggtagttcttccaacgtttattcttgaaagaagatctcttttagaaatgtatgcagacttttttgcacatccggacctgtttgtgagcattagtgaccagaaggatcccaaggatcgaatggttcaggttgtgaaatggtacctctcagcctttcatgcgggaaggaaaggatcagttgccaaaaagccatacaatcccattttgggcgagatttttcagtgtcattggacattaccaaatgatactgaagagaacacagaactagtttcagaaggaccagttccctgggtttccaaaaacagtgtaacatttgtggctgagcaggtttcccatcatccacccatttcagccttttatgctgagtgttttaacaagaagatacaattcaatgctcatatctggaccaaatcaaaattccttgggatgtcaattggggtgcacaacatagggcagggctgtgtctcatgtctagactatgatgaacattacattctcacattccccaatggctatggaaggtctatcctcacagtgccctgggtggaattaggaggagaatgcaatattaattgttccaaaacaggctatagtgcaaatatcatcttccacactaaacccttctatgggggcaagaagcacagaattactgccgagattttttctccaaatgacaagaagtctttttgctcaattgaaggggaatggaatggtgtgatgtatgcaaaatatgcaacaggggaaaatacagtctttgtagataccaagaagttgcctataatcaagaagaaagtgaggaagttggaagatcagaacgagtatgaatcccgcagcctttggaaggatgtcactttcaacttaaaaatcagagacattgatgcagcaactgaagcaaagcacaggcttgaagaaagacaaagagcagaagcccgagaaaggaaggagaaggaaattcagtgggagacaaggttatttcatgaagatggagaatgctgggtttatgatgaaccattactgaaacgtcttggtgctgccaagcattaggttggaagatgcaaagtttatacctgatgatcagggcagtaggcataattcagcaacaaacaatcttcctttgggagaaacctgttcattccaatcttctaattacagtggttcctatctcagggatactggactttctgacgcagatgaacaattaaggggaaaagcttcccttttccctctgtggcagttacgattttgacttcagtcctgagaaaaacttcaggttttgaaaatcagatgatgtcttctccttttccaaacaccacacgttgaaagcatttataaatccaagtctgaaactctgcgctctagtactgctgttaagatacacaacttgtttcttagttcatataatctcgggatacacacacacacacacatatatatacacacacatacgtatacacacacatacatatatataaatatacctgatgccagatttttttcataaatattctgcctactgtaaatatggggnccccgggtggntaaanatngngccggtttaacccggggggaattcggggtaccacacaaaaccattgggaggcaca

SEQ ID NO: 735132 - DNA, 17221 bp, Homo sapiens
gtaagggtctttacatggtttccagatagttcattagttgttgctttctttttttgtctgttttctgttttttttttttaaataactgtggtatgatgtaataggaacttataatttctgagttgcttatttttcctttacagttatagtaaagttatactcatttattttctcctgctttctgcagagtaaaatactgatttttgtctagaaacaagacagtgcaagacaatgttgaaagtgaaattctatgttaaaatatgccagatttattttaagaatttaatatctgtagtcagttatcaatacaaccaaattacataattatgcatgataataggtaaatactgagaagttcacctcattttcttgttaaaggatttggctattaccgtatgtgtcagttagtactcttttgtatggtagtgaaagaaaactcaacccaaactgattcatgaagaagaaagtaaatctggttagatgtggtttgaattaggtaattcatgtcatgaggactcagatctcccatctctatttctacgttccacttttgcattggcttcattttcggttaggttctcccttggtggtggtaaggtggttgtagcaatgtcagcctcccatttttggaaccgagtccataggaggctattctttctagaccttaataggagtaacacaattattgctcatcaccctagctttggccatgtgtcaaatcctgaccagtcacaatttcacagtcatagattctaccctggagctgggatgttactggcctcactagaaacacattgctgatagggtagaaggtgtgttcatcctacccaacccgacccgcaccaaagtcagaatagggaaaaacagatgttgggtgacatgcaactaacgtctgccgtactacactgaagatatttttctatgtttattctccagtgaaagagcttatatttgtggtacataggggattttgttttaatttagaaaatttaattgtagaaaacatgttttataaccctttctctgtactttgttctatatcaggaattgacttgattagataaggtgacatagggtatcttaggccctacaagatagtaaaccccccatcacttgaaagtattcagtagaggcttaaaaaacattattaaaggatgtggttattaggggactttaagaaatgaatatgaaattgaagtaggaaatctttaagctactctgtgagttatgccttttaaaagcaatttgtaattcctgtagatttcttttaaatttaggcagtttcataaatgactatagcatcattttagcaaatttgtgatcctgtaagaggaggataagtgttttttgtttgtttgtttgttttttgtttttttgagacagagtctcactttgtaccccagaaagtaaatctagttagatgtggtttgtctcggctcactgcaacctccaccccgtgcgttctagcaattctcctgcctcagccaccacacctggcctaagaggggaggataagtgttttagtgatcatattagactgaatgtggcagatgagatttcccgcccccccattgttggttagactgacattcaacattcaacaagagccacctgcccttgtaggcatttctgccactatacccctacataaacctagagtgctattgcttacttgctttccttcaaatacattttttcatttgtggcctccacattcttgtgtgtgatgtcctttctctgtgaaatgtcttctaccctttttttcaaagcctagtttagaactgacctcttctatgaaccctctgccgactggcctttccttccccagtcccccaagttcaaaatgatctctttcctttgaatactatagtatttgcacaattcactatctccttatcatattcttcttgtttatttgttatcagctgatgttgacatcataagttcaggttcctaactagatccaatattggaatttttcagcttttgctaagaagagagcttgtatgtctttgggaataatgggcagaaaaagataactttgagaagtcttagacttctaatagctttgatatttaaaagtacatgtaatacaagaggtttttttcctacatttaatgcatggagaagataggacatttagaaatatggaattaatgttcatttgactggcaaaagattattttctcagatgtagtgaagtgtggtaaagaacttcactctagagccagaatgtctgtgtttgtatcccagagcccaccacttacatttaaccattaacattcaacttactgtctctgagtttcagtggcctcatctataaaatgaggataataagagtacctacttcatagagttgttttagtggttaaataaactaacgtaaacttgctagaacttgataaactaatattggatgagaactggttgaaataatgcctggctatagtaaaaacttggtaaatgttagttgccattacaatgcaactactgttcctaccattccctctgccagtgcctggtattcagtagcactcagtaaatgttagttaaatgaagaaataactgaaggaatgaatgaacaaatggttgatgtagagattgcttttccattgttgtttattgaatattttgagatgtataacatactgtctgttaggcactgtgggatgggcactcacggagctgtcttccaaaggggtataggagaggagacgcagtgatctcagcaacctacctttaaaacatatcctagtatctactgccatgttaggttctcttcttttgctttttttaaaaaaaaattctcacaaaactccccccacccacttcagtttatagatgaggaagctcctactacataatagtgcttcccagtctaattcttgacctcattgtatttatatgtcctttttttttttgacagagtctcactcattgcagtggcacaatcacagctcactgcaacctctgcctcccctgctcaagtgatcctcccacctcaacctcctgagtagctgggactacaggcatgcaccaccacgcctggctaatttttgtatttttttgtagagatgcggttttgccatgttggccaggctggtctcgaactcctgggctcaagccatctgcccactttggcctctgagagtgctgagattataggcatgagccaccattcccagccatgttttcctttttcattgaactttatctactttagccattaaactccactccattggtcttgtcattactaagagctgaaccacctgcaaaatattaagttaaaaagcgttttctttgacaacagttttcttttcttcatcttcctctatcactttacttctgaacttttattctctcattttgatctgacccctacttctctgtttttcctggccatttagtactttcttgttttgctcatcccatttcccagtggagaccttctggtctgctgctttatcactggttttgttagaagacatacaaatggcaaggaggtatatgaaaaggtgcctaacatcattgatcatcagagaaatgcagaccaaaactacaatgagatatcatttcaccccagttaaaatggctttttttttttttttccaaaagacaggcaataacaaagtactggtgaggatgtggagtaaagggaacccacatacactattagtaggaatgtaaattagtacagccactgtggagaacagtttgaaggttcctcaaaaaactaaaaatagagctaccatataatccagcaatcccactgctaggtatatatccaaaagaaaggcaatcaatatacggaagagatacctgcacacccaggtttattgcagcactattcacaatagccaagatttggaagcaacccaggtgtccaacagatgaatggataaagaaaacatggtatataaacacaatggaatactattcagctgtgaaaaagaatgaaatcctgtcatttgcaatcctgtcttgaatagaactggaggtcatgatgttaagtgaaataagacaggcacaaacttcacatgttctcacttatttgtgggagctaaaaattaaaacaatcgaactcatggagctagagaatagaattatggttaccagaggctggaagggtggttgggcgtataagtgtagggggagtggggatggttaatgggtacaaaaaaatgagaacgaataagatctacttgataacacaacagggtgactatagtcaacagtaattatacatttaaaaataactagaagagtataattagattgtaacacaaaagataaatgcttgaggtgatggatacctatttaccctgatgtgattattacttatttcatgcctatatcaaaatatttatactccaaaaatatatatacctactatgtacccacaaaaatttaaaaatttatatattgtttttgctatcacctttagaatttcttgtcattggatagttcgtctgtataccattctggtcttcattccccagggcccccgttgtctgatttttctgcttctagaactgttagaggtcacaaaagcaagatggttgtatctatcacaatttttgtctgactttaactgggtatctgttacgatttagtagtcatcttactgacttcttgttggtttccaattgaatcctcacagtagactgttttcattgtaatcagtatcgaattatagcctgttcccttcttcataaatgaaggctttcttcttcaacagttcttagtgacttcacctgtactttatttctctgctttgaatatttcgaagaaaacatattcttgctctttcccaaggttaacactacatacattaccttgaccacaggatgttttcttgcagattgtgacctaattccatcacccttcagcagcccccaccgttttcatggattcagctaaaccttctgtaagatgactctttttccccctaatctttatatctcttttgatatgtagctttagtctcactttttttccttttggattttgccagttagatgtctccctggaattccacttcagcatggctaagactaagcttgtcttctctttcctccccaaagcaaattgtaattaggatagactgaaggtgacagaagataactaagatcttcttcatcctttcggctcttatggaagctgaattccagtagtcattctaaatttgttgtatgtcagcttatggtatcttttcatgtctttacattcagccaaagaggaagttccttgaaggggagaccagagggcgtgctgtgcttcttaatcctctctttcttaaccagtaagaggcattcagtagatatctgatgatactgattaatagaggggaacttttcagattcttttttttttttaaccctagtaagctttagtacaaactaaatgctgagagattatcaagtaagggattgatcatcacaagaagactcaggatgttacatcctgtaggttttatagtttcctatattgtaaaaaatatgagttatagcagcttgtctggatgtcatacaggtataaaaatcagttttataaacttgagtaaattggggcccattttagaaaaaactcttgcaggctgtgaatgccaatatataagtaaagtattaagtataatgttatttaatgtgggcaaacataaagccaggtgtaaattttttaggtttaaaatcttatagaactatacatccaaaagaaaatttcaagttaaacataatacaaagcaatacaatctaaattaacattaatttaatgtgatgaatgatattgccttgctaaaagtgggtcactacttacaatgtgcaaatggtactcatcgttagggtatagattcttttaaactatgacatacgtacactaccatgtggaacgtgatgatgtgttctctgttctaactactgggaagacttccttggcatagcacatgccatggggtcagttggctttgacttcatatagatatgccatttacttggtcagtgtcacttctatgacaagtagtatgttgtgccagtttgattataagtacaaatatgggcaatgaagtaacttggttttaaggttgttactaagctgagtaacagtgtgtggctatacaaatttttataggctatcaggaatgaaaacacaggagattgttgtagattcaagtattttagattcaagtttgaagatgctcatgcagatgtttaactgagttgtatagacctttatgtttctttctttttctctttttttttttttgagacagagtcttgctctgtcacccaagctggagtgcaatggtgtgatctcggcttactgcaacctccgcctcccaggttcaagcaattctcctgcctcagcctcccaagtagctgggattacagatgtgcaccacgacgcccagctgattttttgtattttagtagaggcggggtctcaccatgttgtcaagatggtctcaatctcctgaccttgtgatccacccacctctgcctcccaaagtgctgtgattacaggcgtgagccaccgcgcctgactgacctttatgtttcttaactttatgctatacatcagttgatatttcaaaaatttaaatggtttctatgattattctttgggctaagaaattgggcattaattgtcctcatatgtatggtttttgtggctacttcatgtagattttatttttggtggttatcaaattggaatttttttttttttttttttttttgagacggagtctcattctgtttcccaggttggagtacagtggtgcaatctcagctcactgcagcctcgacctcccaggctcaagcagtcctctcacctcagccttctaagtagctgggactacaggcacgcaccaccacacctggctagttttttgtgtttttagtagagatggggttttaccctgttggccaggctggtcttgaactcctggcctcaagtgatccacctgcctcagcctcccaaagtgctgggattagaggcatgagccaccacacctggctgaaattggaatttcattggtactgcctgtaattttatgttaatttttttttttttttgtcgtcactagcttttatctaaagcccctagagagaaaggccatgataccttgtatacaaggttataagagtatacaagggaaagggagggctgaagggaacagggtgggctggtacaagcctcattagaaataccattgagtctgtgagtaaaacatcattatatgaaaaggagatgtggttttagggtggtccaattacttttgcaccagcctaataaaattacaagtcattatcaatagagacattgtaaaacctttttttttcccaaaagaagtatcaggtatgataattacatgtctgcccaactttcgttatagattaacataacttaattgtatttaaggtacaatttaggagagttgctgaaaaatgaatctttagtattgggatgccttgattctaccctcaatagctataatggattatgtgtctgagtagattaataaaaatcttttgagcatttttcttgaactacttcactgaagattagctttttgagcatccattttaatttctcagtatataaggatcggtttatcacaactgtattgttttccctggccttgttagattatattttcatatcatgtagaaaaataggtgtattcgttctcccttgaagtcctttgtctcccaaaggaaatggttgcaatacagatgtgtcacctcttccacaggtaaagtggaatggagaagtagccagttaaatagtgcatgctcaatttggaacatttagagcatacaggaaagttatttatttggtaaatattttttaagcatttactatgtttcatgcattgtactagttgtagaggatataattgaatacaactacatgtagcccttgactttatggaactagtctagtataaagatttaagattgcctggcatggtggctcacgccactaatcccagcactttgagaggccaaggcaggattgcttgaggccagaagtttaagagtagcttggtcaacataatgagactccatctctaaaataaatagatagatagatagatagatagatagatagatagatagatagaagtagttagacaacacaaagcagtttcactcatcttgtggcaaggagttatgtatttctaatcaaatttggcaactcaagcattttcaacaaaatctacatgttttttcagaataaagtgaccaacacagaatgttacctgtaaaaatcagagcaataattgctatctaaaataattttgaaaattaagtggtactgaaaggctcatatagcaaaaatatggcctcctgtcattgtactttcctacttcccagactcaccattttcaacattttttagtagtttattttgccattttatagcatagtacctgacattttatttattcaacagacatttcttaagtacctaatacatgccattccttgtttgaagggatgctaaggatacagtggtgaacaaggcgttgtggggttgtatagagggtattcattcctaaccttgaaccaaatatttctttctgttggataatgcattaaaaattgcaaacagtttacaaacttttggagcaatggtggccttgatcataaagtagggactgcttctaccgtatacatgcttggtggtgtatttgtgatatctggctaaagtttctacatggaaattgactgactttagttttgagacttctgggaaccagtcaggcaaaatagtgaaactgtgtatcctgtttccaagagttgtcttttaaggttatctgcttcattcatttggcctgacttgctaggcaaatgcctagggtaaatatgatttgattaactataacaacaacagcaacaacaacaactttattttttagagcagtttgaggttcacagcaaaattgagcagaatgtacagagattttccctatacccgcttcccctacgcatgtgcggcctcccctactatcaacatcccccaccagagtggtttgttacaattaatgaacctacattgacacatcattatcactcaaggtccgtagtttacattagagtccactcttggtgttgtgtatgggtttggtcgattttataatgacatttatccaccattatagtgtcatacatagtaattttgctaccctaaaaatccagtgtgctccacctgttcctccttccctcctccctcatccctggcaaccactgaactttttaacatctccatagttttgccttttccagaatgtcatatcattggaatcacacagtatgcagccttttcaaatgggcttctttccgttagtaataggcatttaagtttcatcctcatcttttcatggcttgatagctcatttctttccctccctcttttcttccctgtcttccttccttcctcttctttcctgtttcctctttcttcttccttttttaagagacaaggtgtctcactctgttgcccaggctggagtgcagtggcccaatcatagctcattgcagccttgaattcctgggctcaagtgatcctcctgcgttagcctcctgagtagctgggatcacaggctccagtcattttagtgctgaataatatttcattatctggatgtaccgcctattcattcacctactgaagaatatcttggttgcttctaagttttggcaattatgagtgaagttactataaacattgtatacaagttttatgtggatgtatgttgtcatctcccttgggcagataccaaggagtgccattgttggatcatatggtaaatatatctttagttttgtacagaattctaggttggtatttttttctctctcagtcctttattttatttggagacagtctcgctatgtcgcccaggctgccatacagtggtgccatctgggctcactgaaacctccacctcccaggttcaagcgattcttgtgccttggcctcccaagtagctgggattacaggagtgcgccaccacgcctgctaatttttgtatttttagtagagacagggttttgccatgttgcccaggctggtctcaaactcctgaccttaagtgattcacccacctcaatctcccaaaatcctgggattacaggcctgagctactgtgcctgatctctctcagtactttaaagaaatatttcattccacttttcttttttttcttctttttgagatggagtctcactctgtcgcctgggctggagtgcagtggcgcgatctcagctcactgccacctccgcctcctgggttcaagtgattctcctgcctcagcctcctgaatagctgagattacaggcgcccaccaccatgcccagctaattttttgcatttttagtagagacgggggttccaccatgttggccaggctggtctcgaactcctgacctcgtgattcgcacatctcggcctcccaaattgctgggattacaggtgtgagctaccacgcctggcccactcttcttgcttacatagtttctgaggagatgtcagatgtaatttttatttttgctcttctgtaggcaagttgagttttttccccctctagcttctctcaggatttttttctttatctttgattttcagtagtttgaaaattatatgcctagctgtcagggttttttgcttgtttgtttttgttttctcaggtgtgactccagaaaggttctaaagaggagctttacaatctcttctctggggtttatggagacttcctttacccttctgtgttagccccttaaagcactgcgtcaaccttaaaagggcacaggaaagggtgtctatgccatttttatgccatttatcctgcttggtgttttctgagctttcttcatctgcggtttaatgtctcacattaatttgtagaaattctctgtcattgtttcaaatttttcttcagttcttttctctgtttcttcttctggtgttcccattatgcttttgtggttgtcgtacagttattggatattttgttccaggcttttttttttccagtctttttttccttttgcttctcggttttgtaggtgtctgttgagatactctcaagtgcagatattctttcctcagctttgtctagtttactaataagcccattaaaggcagtcttcatttctgttacagtctttttgatcagtagcatttcttttttattctttcttaaaatttctgtctttctgcttacattgcccatctgttcttgcatggtttctactttgtccattagagttcttaggatatttatcataattatttcaaatttctggtgtaacaattccaacatccctgcaacatccaagtctagtttcgatgcttactgtgtctcttccagctgtgttttttcctatttaatatgtcttataattttttcttgatagccatacatgatgcattaggtaacagaaactgctgtgagtggacctttagtaatgtggtggtaaggtgtgcatggaggggaaacattttcagtctgttagtgaacttttgtcaacttcacatgtgcttctcaagtccatcctgtaagtgggagagtagggctagagaggactgaagttgggtatatattaaatactttctcctacaaagaagcctagaggggacgcattaggggattttttttcccccagtattcactgtgatgacccttattgagctcctggaggtaaaactcacaaaactgtggttctcccccctgcccatattactacatgtccctggagtttatatctttcagacttgtctgcactgagcttccaccaatttgtcaaatacagatcaggtttccctaccacccgtgcagttgaaaacccacatacaacttttgactcctccagagcttaactactcatagcctgctattgactggaagccttgccaataacataaacagttgattaatacatattttatatgttttctgtattatatattgtattcttacaataaagagaaaagaagatgttattaagaaaatcataaggaagataaaatatatttactgttcattaagtggttcccatgggtgctggttcccatggaggttgccccttgtgagtttttgctcagggaagttgtgattctctatatttgcctgttggtctcctaatttgggagtcatcagttttccctgtgacctcacttctcttacagagttaagaacagttgttggtttttcagtttgttcagtgttttacatgttgttagaacacagtggtacttctaagtttcttaacatgctagatcagaaacctgaagtctcacctaatttggctttttatattttttcttcttttttttcttccattgctaccaaagcatttttcatctgtgtctggggtgacattagagcagaatgtgatttctaggtaaacattattgggctccctagcagaaaaatttttgaaagtagtacatgaattctgtataattaaaattttcttttcatcttaataggtataggtaataggcacggcctattttttttttgctcaacagtctaaaatagtaatttaatcacctaatagccttagttatatagttgaaagaagagttggaaatctgattcatgggttggaaatcacctgtcacatatgagttttaggcactggtcactttattttgaaacagctttggggttttttcctttttcaactcataataggctttaacagcttttagttttgtttctgtttttttaacagcatgagttgccaaatttggttatagcttcttggtacaagatgggtaaatttgctttgtgttgtgtaattactttttattttaaatgctacctcttttatgaacactaactttacactaagattaggaaaatgagaattgcatgtctgcaacaaatagctatctgtagtattaaattgtgaaaatgtagactttggattggagctggcatctcttaatatgtaattgtaacatagagtaaataagtattttgtcccttgtagggtcaaacagtacagtgcatgggcagaattagagatgtaggcttttttttttttttttttttttactggcttagagaaccgtttgatcagctaatatggaattaagtccctagggctgcccaggcacaacattaactgctattaaaggaaaatttaaaagagtattagtgaaggttaaatactgaccatggacatctggcaaaattgatgttttttttcccctccaccattgtttatagtttattgttatttatcagagaattaatgtttattttcagaatctattaccataagaaatctgtttgaggacttcgtatgtgccaggaattctactaaataatgatataatgctgaacagaattagataggatcctcacttcgttaagcttacagtctagtggtatagatcaacattaatcaaagaataacacaaatagaaagcagagcagtggttcatgggattgactgtagagaagcatgagggaagttcccaggtgatggaaaatactttatttcttaatcgtggtggttacatgtgtgcatatgtttatgaaaatatattgtacatttaaagtggatacattttatcacatgtaaattatgactctataaagttaattaaaaagaataactcaggtaaggtggtgtgtgcgcctgtagtcccagctatttctgaggcaggaagatcacttgagcccaggagtttgagttcagcatgggcaacatgagacctgtgagactttgtctctaaaaaaatttaaataaataactaagataaatgtaaaattacagctgtagtaagttctacaaaggagagttacatgggctatgacgatgtaagatagcaagaactgacattggcagggaggaaatgatgatgagtagaagtaaataagtgaagtgtggggattgatgtcaaggggacagtataaaagaaataacagcatgcgccaaggccctaaaattggaaagtccttggcaaattaaaggagtttgaaaaaggccattgtgtgcaaagcagaaaataggtactacaaggtaaaagatggagctaagcggtaggtaaggctaaaccttgtcagccattgttaaatattgaattgtatcctaagcacaactcagtggaaagcagttaaagttctttaattgggggaggcaatgaaggggtaataaaattggttatagaaatactgctctggctctagtgttgagaatgaattggagtagccagagtagattcaagaagactttagtaagattattccaacaggccaggacctgttatagggtggtggcaatggagagagatggacagaatggagagtgtatttaggaggtaaaaatgacagaacttggtgatgcactgaatgtgaaatggggaaggtgtctaggaggactactaggtttatggtttgcgtattagggtggatgatagcagtttcatttactgagacagggagccctggcagagtacccagcttttagagtgggtagggggaaggggagagtgcatctggtgttgggcattttgaagtgatttacatacaacaaactgaaggtatctttaacactgagtccagcaggttagcatatttattcagcaagcattgcacctttttttgttgtttttggggtcttcaactcctggcctcgaatcctccctccttcccccgcctctcccagcctccgcctcccaaagtgctgggatttcaggagtgagccaccgcgcctggccagcatcgcgctgtttgtgcagtgtgccctgtgctaggtcttgcagtgggtaccagtagagacataaaagtacaaaagataattggacgtttagtagagtcctgaaagggggcgggataggaagatacctaaccataagaaaaaccagcaagagcggaaaaggagctagtcctccagatcaataagttaatcacttatgtttgtgattccctgcattttgggtgattctctgtcgaggtcctcttaagtccagacttttgatataatctgcagtttgcgccatttggattcctgaagcatctttacaagccacctacattccttatggagctgtggcacaacagcaagcccacgatgtctcaccggattaataaaaatataggcgctcacgcttttgtttaccgatatagtatctcctcctcccctcactccatcaacccccacgcgacacaactttccggaagtaagcaaaatccgttatcaaggtgaaactccggggaccaggctccacagctgccataaactggatggcacgttagaagccggtgggtgtaggtgaggcacgctggcgcccgcgggcccttctccagccgctacccagtgggaatccgcggggctgaagccccgaaaccaggctgagcgtcccagagcgcaacctccctttcccccagcagcgccggcgccgcagaagccgcgtgtccccaggcgcactcccccaaggtgaacccccgccccccacggaggcggctgggtcgcgggtctgggcggggcgctccggacgccctcccgccgctgcgcacccctcccgcgagctgccagctccctcggcctctccacccaaaactggcccaaccgccaatcgtctgcctctcacctcctacagcaggtgacccatggccaatcgccaggggtctctttgccaggagccgccagggccagccaatcggggcgacccctccgccggggaggggacgggaaaggggtggggggtgaagggggtgaagggggtgtcccgggggacgggctgaacctcagtcaggaccgcctgcaccgcagtccggggatcgggtcgaggggagaagaaaaaggggtgctcgggagcagcccccggctacctcccctggaggcacagagggcgggggccttggcgaatggctttcttgctggccacttgcggagtgagtagaccccgagggtctgggagaggggccggcccctacccctgagtccccggggtcccggccgccaggccggagcgcgaatgtcgtgctcaccctgcctccttcccgccgccccctgggctttttgatgacaagcttcaaaactgcaaagaagatgaacagagaaagaaaattgaaactctcaaagagacaacaaatagcatggtagaatcaattaaacactgcattgtgttgctgcagattgccaaagaccagagtaatgcggagaagcacgcagatggaatgataagtactattaatcccgtagatgcaatatatcaacctagtcctttggaacctgtgatcagcacaatgccttcccagactgtgttacctccagaacctgttcagttgtgtaagtcagagcagcgtccatcttccctaccagttggacctgtgttggctaccttgggacatcatcagactcctacaccaaatagtacaggcagtggccattcaccaccgagtagcagtctcacttctccaagccacgtgaacttgtctccaaatacagtcccagagttctcttactccagcagtgaagatgaattttatgatgctgatgaattccatcaaagtggctcatccccaaagcgcttaatagattcttctggatctgcctcagtcctgacacacagcagctcgggaaatagtctaaaacgcccagataccacagaatcacttaattcttccttgtccaatggaacaagtgatgctgacctgtttgattcacatgatgacagagatgatgatgcggaggcagggtctgtggaggagcacaagagcgttatcatgcatctcttgtcgcaggttagacttggaatggatcttactaaggtagttcttccaacgtttattcttgaaagaagatctcttttagaaatgtatgcagacttttttgcacatccggacctgtttgtgagcattagtgaccagaaggatcccaaggatcgaatggttcaggttgtgaaatggtacctctcagcctttcatgcgggaaggaaaggatcagttgccaaaaagccatacaatcccattttgggcgagatttttcagtgtcattggacattaccaaatgatactgaagagaacacagaactagtttcagaaggaccagttccctgggtttccaaaaacagtgtaacatttggtccagatatgagcattgaattgtatcttcttgttaaaacactcagcataaaaggctgaaatgggtggatgatgggaaacctgctcagccacaaatgttagtcgagc

SEQ ID NO: 735133 - DNA, 16757 bp, Homo sapiens
gtaagggtctttacatggtttccagatagttcattagttgttgctttctttttttgtctgttttctgttttttttttttaaataactgtggtatgatgtaataggaacttataatttctgagttgcttatttttcctttacagttatagtaaagttatactcatttattttctcctgctttctgcagagtaaaatactgatttttgtctagaaacaagacagtgcaagacaatgttgaaagtgaaattctatgttaaaatatgccagatttattttaagaatttaatatctgtagtcagttatcaatacaaccaaattacataattatgcatgataataggtaaatactgagaagttcacctcattttcttgttaaaggatttggctattaccgtatgtgtcagttagtactcttttgtatggtagtgaaagaaaactcaacccaaactgattcatgaagaagaaagtaaatctggttagatgtggtttgaattaggtaattcatgtcatgaggactcagatctcccatctctatttctacgttccacttttgcattggcttcattttcggttaggttctcccttggtggtggtaaggtggttgtagcaatgtcagcctcccatttttggaaccgagtccataggaggctattctttctagaccttaataggagtaacacaattattgctcatcaccctagctttggccatgtgtcaaatcctgaccagtcacaatttcacagtcatagattctaccctggagctgggatgttactggcctcactagaaacacattgctgatagggtagaaggtgtgttcatcctacccaacccgacccgcaccaaagtcagaatagggaaaaacagatgttgggtgacatgcaactaacgtctgccgtactacactgaagatatttttctatgtttattctccagtgaaagagcttatatttgtggtacataggggattttgttttaatttagaaaatttaattgtagaaaacatgttttataaccctttctctgtactttgttctatatcaggaattgacttgattagataaggtgacatagggtatcttaggccctacaagatagtaaaccccccatcacttgaaagtattcagtagaggcttaaaaaacattattaaaggatgtggttattaggggactttaagaaatgaatatgaaattgaagtaggaaatctttaagctactctgtgagttatgccttttaaaagcaatttgtaattcctgtagatttcttttaaatttaggcagtttcataaatgactatagcatcattttagcaaatttgtgatcctgtaagaggaggataagtgttttttgtttgtttgtttgttttttgtttttttgagacagagtctcactttgtaccccagaaagtaaatctagttagatgtggtttgtctcggctcactgcaacctccaccccgtgcgttctagcaattctcctgcctcagccaccacacctggcctaagaggggaggataagtgttttagtgatcatattagactgaatgtggcagatgagatttcccgcccccccattgttggttagactgacattcaacattcaacaagagccacctgcccttgtaggcatttctgccactatacccctacataaacctagagtgctattgcttacttgctttccttcaaatacattttttcatttgtggcctccacattcttgtgtgtgatgtcctttctctgtgaaatgtcttctaccctttttttcaaagcctagtttagaactgacctcttctatgaaccctctgccgactggcctttccttccccagtcccccaagttcaaaatgatctctttcctttgaatactatagtatttgcacaattcactatctccttatcatattcttcttgtttatttgttatcagctgatgttgacatcataagttcaggttcctaactagatccaatattggaatttttcagcttttgctaagaagagagcttgtatgtctttgggaataatgggcagaaaaagataactttgagaagtcttagacttctaatagctttgatatttaaaagtacatgtaatacaagaggtttttttcctacatttaatgcatggagaagataggacatttagaaatatggaattaatgttcatttgactggcaaaagattattttctcagatgtagtgaagtgtggtaaagaacttcactctagagccagaatgtctgtgtttgtatcccagagcccaccacttacatttaaccattaacattcaacttactgtctctgagtttcagtggcctcatctataaaatgaggataataagagtacctacttcatagagttgttttagtggttaaataaactaacgtaaacttgctagaacttgataaactaatattggatgagaactggttgaaataatgcctggctatagtaaaaacttggtaaatgttagttgccattacaatgcaactactgttcctaccattccctctgccagtgcctggtattcagtagcactcagtaaatgttagttaaatgaagaaataactgaaggaatgaatgaacaaatggttgatgtagagattgcttttccattgttgtttattgaatattttgagatgtataacatactgtctgttaggcactgtgggatgggcactcacggagctgtcttccaaaggggtataggagaggagacgcagtgatctcagcaacctacctttaaaacatatcctagtatctactgccatgttaggttctcttcttttgctttttttaaaaaaaaattctcacaaaactccccccacccacttcagtttatagatgaggaagctcctactacataatagtgcttcccagtctaattcttgacctcattgtatttatatgtcctttttttttttgacagagtctcactcattgcagtggcacaatcacagctcactgcaacctctgcctcccctgctcaagtgatcctcccacctcaacctcctgagtagctgggactacaggcatgcaccaccacgcctggctaatttttgtatttttttgtagagatgcggttttgccatgttggccaggctggtctcgaactcctgggctcaagccatctgcccactttggcctctgagagtgctgagattataggcatgagccaccattcccagccatgttttcctttttcattgaactttatctactttagccattaaactccactccattggtcttgtcattactaagagctgaaccacctgcaaaatattaagttaaaaagcgttttctttgacaacagttttcttttcttcatcttcctctatcactttacttctgaacttttattctctcattttgatctgacccctacttctctgtttttcctggccatttagtactttcttgttttgctcatcccatttcccagtggagaccttctggtctgctgctttatcactggttttgttagaagacatacaaatggcaaggaggtatatgaaaaggtgcctaacatcattgatcatcagagaaatgcagaccaaaactacaatgagatatcatttcaccccagttaaaatggctttttttttttttttccaaaagacaggcaataacaaagtactggtgaggatgtggagtaaagggaacccacatacactattagtaggaatgtaaattagtacagccactgtggagaacagtttgaaggttcctcaaaaaactaaaaatagagctaccatataatccagcaatcccactgctaggtatatatccaaaagaaaggcaatcaatatacggaagagatacctgcacacccaggtttattgcagcactattcacaatagccaagatttggaagcaacccaggtgtccaacagatgaatggataaagaaaacatggtatataaacacaatggaatactattcagctgtgaaaaagaatgaaatcctgtcatttgcaatcctgtcttgaatagaactggaggtcatgatgttaagtgaaataagacaggcacaaacttcacatgttctcacttatttgtgggagctaaaaattaaaacaatcgaactcatggagctagagaatagaattatggttaccagaggctggaagggtggttgggcgtataagtgtagggggagtggggatggttaatgggtacaaaaaaatgagaacgaataagatctacttgataacacaacagggtgactatagtcaacagtaattatacatttaaaaataactagaagagtataattagattgtaacacaaaagataaatgcttgaggtgatggatacctatttaccctgatgtgattattacttatttcatgcctatatcaaaatatttatactccaaaaatatatatacctactatgtacccacaaaaatttaaaaatttatatattgtttttgctatcacctttagaatttcttgtcattggatagttcgtctgtataccattctggtcttcattccccagggcccccgttgtctgatttttctgcttctagaactgttagaggtcacaaaagcaagatggttgtatctatcacaatttttgtctgactttaactgggtatctgttacgatttagtagtcatcttactgacttcttgttggtttccaattgaatcctcacagtagactgttttcattgtaatcagtatcgaattatagcctgttcccttcttcataaatgaaggctttcttcttcaacagttcttagtgacttcacctgtactttatttctctgctttgaatatttcgaagaaaacatattcttgctctttcccaaggttaacactacatacattaccttgaccacaggatgttttcttgcagattgtgacctaattccatcacccttcagcagcccccaccgttttcatggattcagctaaaccttctgtaagatgactctttttccccctaatctttatatctcttttgatatgtagctttagtctcactttttttccttttggattttgccagttagatgtctccctggaattccacttcagcatggctaagactaagcttgtcttctctttcctccccaaagcaaattgtaattaggatagactgaaggtgacagaagataactaagatcttcttcatcctttcggctcttatggaagctgaattccagtagtcattctaaatttgttgtatgtcagcttatggtatcttttcatgtctttacattcagccaaagaggaagttccttgaaggggagaccagagggcgtgctgtgcttcttaatcctctctttcttaaccagtaagaggcattcagtagatatctgatgatactgattaatagaggggaacttttcagattcttttttttttttaaccctagtaagctttagtacaaactaaatgctgagagattatcaagtaagggattgatcatcacaagaagactcaggatgttacatcctgtaggttttatagtttcctatattgtaaaaaatatgagttatagcagcttgtctggatgtcatacaggtataaaaatcagttttataaacttgagtaaattggggcccattttagaaaaaactcttgcaggctgtgaatgccaatatataagtaaagtattaagtataatgttatttaatgtgggcaaacataaagccaggtgtaaattttttaggtttaaaatcttatagaactatacatccaaaagaaaatttcaagttaaacataatacaaagcaatacaatctaaattaacattaatttaatgtgatgaatgatattgccttgctaaaagtgggtcactacttacaatgtgcaaatggtactcatcgttagggtatagattcttttaaactatgacatacgtacactaccatgtggaacgtgatgatgtgttctctgttctaactactgggaagacttccttggcatagcacatgccatggggtcagttggctttgacttcatatagatatgccatttacttggtcagtgtcacttctatgacaagtagtatgttgtgccagtttgattataagtacaaatatgggcaatgaagtaacttggttttaaggttgttactaagctgagtaacagtgtgtggctatacaaatttttataggctatcaggaatgaaaacacaggagattgttgtagattcaagtattttagattcaagtttgaagatgctcatgcagatgtttaactgagttgtatagacctttatgtttctttctttttctctttttttttttttgagacagagtcttgctctgtcacccaagctggagtgcaatggtgtgatctcggcttactgcaacctccgcctcccaggttcaagcaattctcctgcctcagcctcccaagtagctgggattacagatgtgcaccacgacgcccagctgattttttgtattttagtagaggcggggtctcaccatgttgtcaagatggtctcaatctcctgaccttgtgatccacccacctctgcctcccaaagtgctgtgattacaggcgtgagccaccgcgcctgactgacctttatgtttcttaactttatgctatacatcagttgatatttcaaaaatttaaatggtttctatgattattctttgggctaagaaattgggcattaattgtcctcatatgtatggtttttgtggctacttcatgtagattttatttttggtggttatcaaattggaatttttttttttttttttttttttgagacggagtctcattctgtttcccaggttggagtacagtggtgcaatctcagctcactgcagcctcgacctcccaggctcaagcagtcctctcacctcagccttctaagtagctgggactacaggcacgcaccaccacacctggctagttttttgtgtttttagtagagatggggttttaccctgttggccaggctggtcttgaactcctggcctcaagtgatccacctgcctcagcctcccaaagtgctgggattagaggcatgagccaccacacctggctgaaattggaatttcattggtactgcctgtaattttatgttaatttttttttttttttgtcgtcactagcttttatctaaagcccctagagagaaaggccatgataccttgtatacaaggttataagagtatacaagggaaagggagggctgaagggaacagggtgggctggtacaagcctcattagaaataccattgagtctgtgagtaaaacatcattatatgaaaaggagatgtggttttagggtggtccaattacttttgcaccagcctaataaaattacaagtcattatcaatagagacattgtaaaacctttttttttcccaaaagaagtatcaggtatgataattacatgtctgcccaactttcgttatagattaacataacttaattgtatttaaggtacaatttaggagagttgctgaaaaatgaatctttagtattgggatgccttgattctaccctcaatagctataatggattatgtgtctgagtagattaataaaaatcttttgagcatttttcttgaactacttcactgaagattagctttttgagcatccattttaatttctcagtatataaggatcggtttatcacaactgtattgttttccctggccttgttagattatattttcatatcatgtagaaaaataggtgtattcgttctcccttgaagtcctttgtctcccaaaggaaatggttgcaatacagatgtgtcacctcttccacaggtaaagtggaatggagaagtagccagttaaatagtgcatgctcaatttggaacatttagagcatacaggaaagttatttatttggtaaatattttttaagcatttactatgtttcatgcattgtactagttgtagaggatataattgaatacaactacatgtagcccttgactttatggaactagtctagtataaagatttaagattgcctggcatggtggctcacgccactaatcccagcactttgagaggccaaggcaggattgcttgaggccagaagtttaagagtagcttggtcaacataatgagactccatctctaaaataaatagatagatagatagatagatagatagatagatagatagatagaagtagttagacaacacaaagcagtttcactcatcttgtggcaaggagttatgtatttctaatcaaatttggcaactcaagcattttcaacaaaatctacatgttttttcagaataaagtgaccaacacagaatgttacctgtaaaaatcagagcaataattgctatctaaaataattttgaaaattaagtggtactgaaaggctcatatagcaaaaatatggcctcctgtcattgtactttcctacttcccagactcaccattttcaacattttttagtagtttattttgccattttatagcatagtacctgacattttatttattcaacagacatttcttaagtacctaatacatgccattccttgtttgaagggatgctaaggatacagtggtgaacaaggcgttgtggggttgtatagagggtattcattcctaaccttgaaccaaatatttctttctgttggataatgcattaaaaattgcaaacagtttacaaacttttggagcaatggtggccttgatcataaagtagggactgcttctaccgtatacatgcttggtggtgtatttgtgatatctggctaaagtttctacatggaaattgactgactttagttttgagacttctgggaaccagtcaggcaaaatagtgaaactgtgtatcctgtttccaagagttgtcttttaaggttatctgcttcattcatttggcctgacttgctaggcaaatgcctagggtaaatatgatttgattaactataacaacaacagcaacaacaacaactttattttttagagcagtttgaggttcacagcaaaattgagcagaatgtacagagattttccctatacccgcttcccctacgcatgtgcggcctcccctactatcaacatcccccaccagagtggtttgttacaattaatgaacctacattgacacatcattatcactcaaggtccgtagtttacattagagtccactcttggtgttgtgtatgggtttggtcgattttataatgacatttatccaccattatagtgtcatacatagtaattttgctaccctaaaaatccagtgtgctccacctgttcctccttccctcctccctcatccctggcaaccactgaactttttaacatctccatagttttgccttttccagaatgtcatatcattggaatcacacagtatgcagccttttcaaatgggcttctttccgttagtaataggcatttaagtttcatcctcatcttttcatggcttgatagctcatttctttccctccctcttttcttccctgtcttccttccttcctcttctttcctgtttcctctttcttcttccttttttaagagacaaggtgtctcactctgttgcccaggctggagtgcagtggcccaatcatagctcattgcagccttgaattcctgggctcaagtgatcctcctgcgttagcctcctgagtagctgggatcacaggctccagtcattttagtgctgaataatatttcattatctggatgtaccgcctattcattcacctactgaagaatatcttggttgcttctaagttttggcaattatgagtgaagttactataaacattgtatacaagttttatgtggatgtatgttgtcatctcccttgggcagataccaaggagtgccattgttggatcatatggtaaatatatctttagttttgtacagaattctaggttggtatttttttctctctcagtcctttattttatttggagacagtctcgctatgtcgcccaggctgccatacagtggtgccatctgggctcactgaaacctccacctcccaggttcaagcgattcttgtgccttggcctcccaagtagctgggattacaggagtgcgccaccacgcctgctaatttttgtatttttagtagagacagggttttgccatgttgcccaggctggtctcaaactcctgaccttaagtgattcacccacctcaatctcccaaaatcctgggattacaggcctgagctactgtgcctgatctctctcagtactttaaagaaatatttcattccacttttcttttttttcttctttttgagatggagtctcactctgtcgcctgggctggagtgcagtggcgcgatctcagctcactgccacctccgcctcctgggttcaagtgattctcctgcctcagcctcctgaatagctgagattacaggcgcccaccaccatgcccagctaattttttgcatttttagtagagacgggggttccaccatgttggccaggctggtctcgaactcctgacctcgtgattcgcacatctcggcctcccaaattgctgggattacaggtgtgagctaccacgcctggcccactcttcttgcttacatagtttctgaggagatgtcagatgtaatttttatttttgctcttctgtaggcaagttgagttttttccccctctagcttctctcaggatttttttctttatctttgattttcagtagtttgaaaattatatgcctagctgtcagggttttttgcttgtttgtttttgttttctcaggtgtgactccagaaaggttctaaagaggagctttacaatctcttctctggggtttatggagacttcctttacccttctgtgttagccccttaaagcactgcgtcaaccttaaaagggcacaggaaagggtgtctatgccatttttatgccatttatcctgcttggtgttttctgagctttcttcatctgcggtttaatgtctcacattaatttgtagaaattctctgtcattgtttcaaatttttcttcagttcttttctctgtttcttcttctggtgttcccattatgcttttgtggttgtcgtacagttattggatattttgttccaggcttttttttttccagtctttttttccttttgcttctcggttttgtaggtgtctgttgagatactctcaagtgcagatattctttcctcagctttgtctagtttactaataagcccattaaaggcagtcttcatttctgttacagtctttttgatcagtagcatttcttttttattctttcttaaaatttctgtctttctgcttacattgcccatctgttcttgcatggtttctactttgtccattagagttcttaggatatttatcataattatttcaaatttctggtgtaacaattccaacatccctgcaacatccaagtctagtttcgatgcttactgtgtctcttccagctgtgttttttcctatttaatatgtcttataattttttcttgatagccatacatgatgcattaggtaacagaaactgctgtgagtggacctttagtaatgtggtggtaaggtgtgcatggaggggaaacattttcagtctgttagtgaacttttgtcaacttcacatgtgcttctcaagtccatcctgtaagtgggagagtagggctagagaggactgaagttgggtatatattaaatactttctcctacaaagaagcctagaggggacgcattaggggattttttttcccccagtattcactgtgatgacccttattgagctcctggaggtaaaactcacaaaactgtggttctcccccctgcccatattactacatgtccctggagtttatatctttcagacttgtctgcactgagcttccaccaatttgtcaaatacagatcaggtttccctaccacccgtgcagttgaaaacccacatacaacttttgactcctccagagcttaactactcatagcctgctattgactggaagccttgccaataacataaacagttgattaatacatattttatatgttttctgtattatatattgtattcttacaataaagagaaaagaagatgttattaagaaaatcataaggaagataaaatatatttactgttcattaagtggttcccatgggtgctggttcccatggaggttgccccttgtgagtttttgctcagggaagttgtgattctctatatttgcctgttggtctcctaatttgggagtcatcagttttccctgtgacctcacttctcttacagagttaagaacagttgttggtttttcagtttgttcagtgttttacatgttgttagaacacagtggtacttctaagtttcttaacatgctagatcagaaacctgaagtctcacctaatttggctttttatattttttcttcttttttttcttccattgctaccaaagcatttttcatctgtgtctggggtgacattagagcagaatgtgatttctaggtaaacattattgggctccctagcagaaaaatttttgaaagtagtacatgaattctgtataattaaaattttcttttcatcttaataggtataggtaataggcacggcctattttttttttgctcaacagtctaaaatagtaatttaatcacctaatagccttagttatatagttgaaagaagagttggaaatctgattcatgggttggaaatcacctgtcacatatgagttttaggcactggtcactttattttgaaacagctttggggttttttcctttttcaactcataataggctttaacagcttttagttttgtttctgtttttttaacagcatgagttgccaaatttggttatagcttcttggtacaagatgggtaaatttgctttgtgttgtgtaattactttttattttaaatgctacctcttttatgaacactaactttacactaagattaggaaaatgagaattgcatgtctgcaacaaatagctatctgtagtattaaattgtgaaaatgtagactttggattggagctggcatctcttaatatgtaattgtaacatagagtaaataagtattttgtcccttgtagggtcaaacagtacagtgcatgggcagaattagagatgtaggcttttttttttttttttttttttactggcttagagaaccgtttgatcagctaatatggaattaagtccctagggctgcccaggcacaacattaactgctattaaaggaaaatttaaaagagtattagtgaaggttaaatactgaccatggacatctggcaaaattgatgttttttttcccctccaccattgtttatagtttattgttatttatcagagaattaatgtttattttcagaatctattaccataagaaatctgtttgaggacttcgtatgtgccaggaattctactaaataatgatataatgctgaacagaattagataggatcctcacttcgttaagcttacagtctagtggtatagatcaacattaatcaaagaataacacaaatagaaagcagagcagtggttcatgggattgactgtagagaagcatgagggaagttcccaggtgatggaaaatactttatttcttaatcgtggtggttacatgtgtgcatatgtttatgaaaatatattgtacatttaaagtggatacattttatcacatgtaaattatgactctataaagttaattaaaaagaataactcaggtaaggtggtgtgtgcgcctgtagtcccagctatttctgaggcaggaagatcacttgagcccaggagtttgagttcagcatgggcaacatgagacctgtgagactttgtctctaaaaaaatttaaataaataactaagataaatgtaaaattacagctgtagtaagttctacaaaggagagttacatgggctatgacgatgtaagatagcaagaactgacattggcagggaggaaatgatgatgagtagaagtaaataagtgaagtgtggggattgatgtcaaggggacagtataaaagaaataacagcatgcgccaaggccctaaaattggaaagtccttggcaaattaaaggagtttgaaaaaggccattgtgtgcaaagcagaaaataggtactacaaggtaaaagatggagctaagcggtaggtaaggctaaaccttgtcagccattgttaaatattgaattgtatcctaagcacaactcagtggaaagcagttaaagttctttaattgggggaggcaatgaaggggtaataaaattggttatagaaatactgctctggctctagtgttgagaatgaattggagtagccagagtagattcaagaagactttagtaagattattccaacaggccaggacctgttatagggtggtggcaatggagagagatggacagaatggagagtgtatttaggaggtaaaaatgacagaacttggtgatgcactgaatgtgaaatggggaaggtgtctaggaggactactaggtttatggtttgcgtattagggtggatgatagcagtttcatttactgagacagggagccctggcagagtacccagcttttagagtgggtagggggaaggggagagtgcatctggtgttgggcattttgaagtgatttacatacaacaaactgaaggtatctttaacactgagtccagcaggttagcatatttattcagcaagcattgcacctttttttgttgtttttggggtcttcaactcctggcctcgaatcctccctccttcccccgcctctcccagcctccgcctcccaaagtgctgggatttcaggagtgagccaccgcgcctggccagcatcgcgctgtttgtgcagtgtgccctgtgctaggtcttgcagtgggtaccagtagagacataaaagtacaaaagataattggacgtttagtagagtcctgaaagggggcgggataggaagatacctaaccataagaaaaaccagcaagagcggaaaaggagctagtcctccagatcaataagttaatcacttatgtttgtgattccctgcattttgggtgattctctgtcgaggtcctcttaagtccagacttttgatataatctgcagtttgcgccatttggattcctgaagcatctttacaagccacctacattccttatggagctgtggcacaacagcaagcccacgatgtctcaccggattaataaaaatataggcgctcacgcttttgtttaccgatatagtatctcctcctcccctcactccatcaacccccacgcgacacaactttccggaagtaagcaaaatccgttatcaaggtgaaactccggggaccaggctccacagctgccataaactggatggcacgttagaagccggtgggtgtaggtgaggcacgctggcgcccgcgggcccttctccagccgctacccagtgggaatccgcggggctgaagccccgaaaccaggctgagcgtcccagagcgcaacctccctttcccccagcagcgccggcgccgcagaagccgcgtgtccccaggcgcactcccccaaggtgaacccccgccccccacggaggcggctgggtcgcgggtctgggcggggcgctccggacgccctcccgccgctgcgcacccctcccgcgagctgccagctccctcggcctctccacccaaaactggcccaaccgccaatcgtctgcctctcacctcctacagcaggtgacccatggccaatcgccaggggtctctttgccaggagccgccagggccagccaatcggggcgacccctccgccggggaggggacgggaaaggggtggggggtgaagggggtgaagggggtgtcccgggggacgggctgaacctcagtcaggaccgcctgcaccgcagtccggggatcgggtcgaggggagaagaaaaaggggtgctcgggagcagcccccggctacctcccctggaggcacagagggcgggggccttggcgaatggctttcttgctggccacttgcggagtgagtagaccccgagggtctgggagaggggccggcccctacccctgagtccccggggtcccggccgccaggccggagcgcgaatgtcgtgctcaccctgcctccttcccgccgccccctgggctttttgatgacaagcttcaaaactgcaaagaagatgaacagagaaagaaaattgaaactctcaaagagacaacaaatagcatggtagaatcaattaaacactgcattgtgttgctgcagattgccaaagaccagagtaatgcggagaagcacgcagatggaatgataagtactattaatcccgtagatgcaatatatcaacctagtcctttggaacctgtgatcagcacaatgccttcccagactgtgttacctccagaacctgttcagttgtgtaagtcagagcagcgtccatcttccctaccagttggacctgtgttggctaccttgggacatcatcagactcctacaccaaatagtacaggcagtggccattcaccaccgagtagcagtctcacttctccaagccacgtgaacttgtctccaaatacagtcccagagttctcttactccagcagtgaagatgaattttatgatgctgatgaattccatcaaagtggctcatccccaaagcgcttaatagattcttctggatctgcctcagtcctgacacacagcagctcgggaaatagtctaaaacgcccagataccacagaatcacttaattcttccttgtccaatggaacaagtgatgctgacctgtttgattcacatgatgacagagatgatgatgcggaggcagggtctgcttcagtttcgtcgacgcggccgc

SEQ ID NO: 735134 - DNA, 18760 bp, Homo sapiens
gtaagggtctttacatggtttccagatagttcattagttgttgctttctttttttgtctgttttctgttttttttttttaaataactgtggtatgatgtaataggaacttataatttctgagttgcttatttttcctttacagttatagtaaagttatactcatttattttctcctgctttctgcagagtaaaatactgatttttgtctagaaacaagacagtgcaagacaatgttgaaagtgaaattctatgttaaaatatgccagatttattttaagaatttaatatctgtagtcagttatcaatacaaccaaattacataattatgcatgataataggtaaatactgagaagttcacctcattttcttgttaaaggatttggctattaccgtatgtgtcagttagtactcttttgtatggtagtgaaagaaaactcaacccaaactgattcatgaagaagaaagtaaatctggttagatgtggtttgaattaggtaattcatgtcatgaggactcagatctcccatctctatttctacgttccacttttgcattggcttcattttcggttaggttctcccttggtggtggtaaggtggttgtagcaatgtcagcctcccatttttggaaccgagtccataggaggctattctttctagaccttaataggagtaacacaattattgctcatcaccctagctttggccatgtgtcaaatcctgaccagtcacaatttcacagtcatagattctaccctggagctgggatgttactggcctcactagaaacacattgctgatagggtagaaggtgtgttcatcctacccaacccgacccgcaccaaagtcagaatagggaaaaacagatgttgggtgacatgcaactaacgtctgccgtactacactgaagatatttttctatgtttattctccagtgaaagagcttatatttgtggtacataggggattttgttttaatttagaaaatttaattgtagaaaacatgttttataaccctttctctgtactttgttctatatcaggaattgacttgattagataaggtgacatagggtatcttaggccctacaagatagtaaaccccccatcacttgaaagtattcagtagaggcttaaaaaacattattaaaggatgtggttattaggggactttaagaaatgaatatgaaattgaagtaggaaatctttaagctactctgtgagttatgccttttaaaagcaatttgtaattcctgtagatttcttttaaatttaggcagtttcataaatgactatagcatcattttagcaaatttgtgatcctgtaagaggaggataagtgttttttgtttgtttgtttgttttttgtttttttgagacagagtctcactttgtaccccagaaagtaaatctagttagatgtggtttgtctcggctcactgcaacctccaccccgtgcgttctagcaattctcctgcctcagccaccacacctggcctaagaggggaggataagtgttttagtgatcatattagactgaatgtggcagatgagatttcccgcccccccattgttggttagactgacattcaacattcaacaagagccacctgcccttgtaggcatttctgccactatacccctacataaacctagagtgctattgcttacttgctttccttcaaatacattttttcatttgtggcctccacattcttgtgtgtgatgtcctttctctgtgaaatgtcttctaccctttttttcaaagcctagtttagaactgacctcttctatgaaccctctgccgactggcctttccttccccagtcccccaagttcaaaatgatctctttcctttgaatactatagtatttgcacaattcactatctccttatcatattcttcttgtttatttgttatcagctgatgttgacatcataagttcaggttcctaactagatccaatattggaatttttcagcttttgctaagaagagagcttgtatgtctttgggaataatgggcagaaaaagataactttgagaagtcttagacttctaatagctttgatatttaaaagtacatgtaatacaagaggtttttttcctacatttaatgcatggagaagataggacatttagaaatatggaattaatgttcatttgactggcaaaagattattttctcagatgtagtgaagtgtggtaaagaacttcactctagagccagaatgtctgtgtttgtatcccagagcccaccacttacatttaaccattaacattcaacttactgtctctgagtttcagtggcctcatctataaaatgaggataataagagtacctacttcatagagttgttttagtggttaaataaactaacgtaaacttgctagaacttgataaactaatattggatgagaactggttgaaataatgcctggctatagtaaaaacttggtaaatgttagttgccattacaatgcaactactgttcctaccattccctctgccagtgcctggtattcagtagcactcagtaaatgttagttaaatgaagaaataactgaaggaatgaatgaacaaatggttgatgtagagattgcttttccattgttgtttattgaatattttgagatgtataacatactgtctgttaggcactgtgggatgggcactcacggagctgtcttccaaaggggtataggagaggagacgcagtgatctcagcaacctacctttaaaacatatcctagtatctactgccatgttaggttctcttcttttgctttttttaaaaaaaaattctcacaaaactccccccacccacttcagtttatagatgaggaagctcctactacataatagtgcttcccagtctaattcttgacctcattgtatttatatgtcctttttttttttgacagagtctcactcattgcagtggcacaatcacagctcactgcaacctctgcctcccctgctcaagtgatcctcccacctcaacctcctgagtagctgggactacaggcatgcaccaccacgcctggctaatttttgtatttttttgtagagatgcggttttgccatgttggccaggctggtctcgaactcctgggctcaagccatctgcccactttggcctctgagagtgctgagattataggcatgagccaccattcccagccatgttttcctttttcattgaactttatctactttagccattaaactccactccattggtcttgtcattactaagagctgaaccacctgcaaaatattaagttaaaaagcgttttctttgacaacagttttcttttcttcatcttcctctatcactttacttctgaacttttattctctcattttgatctgacccctacttctctgtttttcctggccatttagtactttcttgttttgctcatcccatttcccagtggagaccttctggtctgctgctttatcactggttttgttagaagacatacaaatggcaaggaggtatatgaaaaggtgcctaacatcattgatcatcagagaaatgcagaccaaaactacaatgagatatcatttcaccccagttaaaatggctttttttttttttttccaaaagacaggcaataacaaagtactggtgaggatgtggagtaaagggaacccacatacactattagtaggaatgtaaattagtacagccactgtggagaacagtttgaaggttcctcaaaaaactaaaaatagagctaccatataatccagcaatcccactgctaggtatatatccaaaagaaaggcaatcaatatacggaagagatacctgcacacccaggtttattgcagcactattcacaatagccaagatttggaagcaacccaggtgtccaacagatgaatggataaagaaaacatggtatataaacacaatggaatactattcagctgtgaaaaagaatgaaatcctgtcatttgcaatcctgtcttgaatagaactggaggtcatgatgttaagtgaaataagacaggcacaaacttcacatgttctcacttatttgtgggagctaaaaattaaaacaatcgaactcatggagctagagaatagaattatggttaccagaggctggaagggtggttgggcgtataagtgtagggggagtggggatggttaatgggtacaaaaaaatgagaacgaataagatctacttgataacacaacagggtgactatagtcaacagtaattatacatttaaaaataactagaagagtataattagattgtaacacaaaagataaatgcttgaggtgatggatacctatttaccctgatgtgattattacttatttcatgcctatatcaaaatatttatactccaaaaatatatatacctactatgtacccacaaaaatttaaaaatttatatattgtttttgctatcacctttagaatttcttgtcattggatagttcgtctgtataccattctggtcttcattccccagggcccccgttgtctgatttttctgcttctagaactgttagaggtcacaaaagcaagatggttgtatctatcacaatttttgtctgactttaactgggtatctgttacgatttagtagtcatcttactgacttcttgttggtttccaattgaatcctcacagtagactgttttcattgtaatcagtatcgaattatagcctgttcccttcttcataaatgaaggctttcttcttcaacagttcttagtgacttcacctgtactttatttctctgctttgaatatttcgaagaaaacatattcttgctctttcccaaggttaacactacatacattaccttgaccacaggatgttttcttgcagattgtgacctaattccatcacccttcagcagcccccaccgttttcatggattcagctaaaccttctgtaagatgactctttttccccctaatctttatatctcttttgatatgtagctttagtctcactttttttccttttggattttgccagttagatgtctccctggaattccacttcagcatggctaagactaagcttgtcttctctttcctccccaaagcaaattgtaattaggatagactgaaggtgacagaagataactaagatcttcttcatcctttcggctcttatggaagctgaattccagtagtcattctaaatttgttgtatgtcagcttatggtatcttttcatgtctttacattcagccaaagaggaagttccttgaaggggagaccagagggcgtgctgtgcttcttaatcctctctttcttaaccagtaagaggcattcagtagatatctgatgatactgattaatagaggggaacttttcagattcttttttttttttaaccctagtaagctttagtacaaactaaatgctgagagattatcaagtaagggattgatcatcacaagaagactcaggatgttacatcctgtaggttttatagtttcctatattgtaaaaaatatgagttatagcagcttgtctggatgtcatacaggtataaaaatcagttttataaacttgagtaaattggggcccattttagaaaaaactcttgcaggctgtgaatgccaatatataagtaaagtattaagtataatgttatttaatgtgggcaaacataaagccaggtgtaaattttttaggtttaaaatcttatagaactatacatccaaaagaaaatttcaagttaaacataatacaaagcaatacaatctaaattaacattaatttaatgtgatgaatgatattgccttgctaaaagtgggtcactacttacaatgtgcaaatggtactcatcgttagggtatagattcttttaaactatgacatacgtacactaccatgtggaacgtgatgatgtgttctctgttctaactactgggaagacttccttggcatagcacatgccatggggtcagttggctttgacttcatatagatatgccatttacttggtcagtgtcacttctatgacaagtagtatgttgtgccagtttgattataagtacaaatatgggcaatgaagtaacttggttttaaggttgttactaagctgagtaacagtgtgtggctatacaaatttttataggctatcaggaatgaaaacacaggagattgttgtagattcaagtattttagattcaagtttgaagatgctcatgcagatgtttaactgagttgtatagacctttatgtttctttctttttctctttttttttttttgagacagagtcttgctctgtcacccaagctggagtgcaatggtgtgatctcggcttactgcaacctccgcctcccaggttcaagcaattctcctgcctcagcctcccaagtagctgggattacagatgtgcaccacgacgcccagctgattttttgtattttagtagaggcggggtctcaccatgttgtcaagatggtctcaatctcctgaccttgtgatccacccacctctgcctcccaaagtgctgtgattacaggcgtgagccaccgcgcctgactgacctttatgtttcttaactttatgctatacatcagttgatatttcaaaaatttaaatggtttctatgattattctttgggctaagaaattgggcattaattgtcctcatatgtatggtttttgtggctacttcatgtagattttatttttggtggttatcaaattggaatttttttttttttttttttttttgagacggagtctcattctgtttcccaggttggagtacagtggtgcaatctcagctcactgcagcctcgacctcccaggctcaagcagtcctctcacctcagccttctaagtagctgggactacaggcacgcaccaccacacctggctagttttttgtgtttttagtagagatggggttttaccctgttggccaggctggtcttgaactcctggcctcaagtgatccacctgcctcagcctcccaaagtgctgggattagaggcatgagccaccacacctggctgaaattggaatttcattggtactgcctgtaattttatgttaatttttttttttttttgtcgtcactagcttttatctaaagcccctagagagaaaggccatgataccttgtatacaaggttataagagtatacaagggaaagggagggctgaagggaacagggtgggctggtacaagcctcattagaaataccattgagtctgtgagtaaaacatcattatatgaaaaggagatgtggttttagggtggtccaattacttttgcaccagcctaataaaattacaagtcattatcaatagagacattgtaaaacctttttttttcccaaaagaagtatcaggtatgataattacatgtctgcccaactttcgttatagattaacataacttaattgtatttaaggtacaatttaggagagttgctgaaaaatgaatctttagtattgggatgccttgattctaccctcaatagctataatggattatgtgtctgagtagattaataaaaatcttttgagcatttttcttgaactacttcactgaagattagctttttgagcatccattttaatttctcagtatataaggatcggtttatcacaactgtattgttttccctggccttgttagattatattttcatatcatgtagaaaaataggtgtattcgttctcccttgaagtcctttgtctcccaaaggaaatggttgcaatacagatgtgtcacctcttccacaggtaaagtggaatggagaagtagccagttaaatagtgcatgctcaatttggaacatttagagcatacaggaaagttatttatttggtaaatattttttaagcatttactatgtttcatgcattgtactagttgtagaggatataattgaatacaactacatgtagcccttgactttatggaactagtctagtataaagatttaagattgcctggcatggtggctcacgccactaatcccagcactttgagaggccaaggcaggattgcttgaggccagaagtttaagagtagcttggtcaacataatgagactccatctctaaaataaatagatagatagatagatagatagatagatagatagatagatagaagtagttagacaacacaaagcagtttcactcatcttgtggcaaggagttatgtatttctaatcaaatttggcaactcaagcattttcaacaaaatctacatgttttttcagaataaagtgaccaacacagaatgttacctgtaaaaatcagagcaataattgctatctaaaataattttgaaaattaagtggtactgaaaggctcatatagcaaaaatatggcctcctgtcattgtactttcctacttcccagactcaccattttcaacattttttagtagtttattttgccattttatagcatagtacctgacattttatttattcaacagacatttcttaagtacctaatacatgccattccttgtttgaagggatgctaaggatacagtggtgaacaaggcgttgtggggttgtatagagggtattcattcctaaccttgaaccaaatatttctttctgttggataatgcattaaaaattgcaaacagtttacaaacttttggagcaatggtggccttgatcataaagtagggactgcttctaccgtatacatgcttggtggtgtatttgtgatatctggctaaagtttctacatggaaattgactgactttagttttgagacttctgggaaccagtcaggcaaaatagtgaaactgtgtatcctgtttccaagagttgtcttttaaggttatctgcttcattcatttggcctgacttgctaggcaaatgcctagggtaaatatgatttgattaactataacaacaacagcaacaacaacaactttattttttagagcagtttgaggttcacagcaaaattgagcagaatgtacagagattttccctatacccgcttcccctacgcatgtgcggcctcccctactatcaacatcccccaccagagtggtttgttacaattaatgaacctacattgacacatcattatcactcaaggtccgtagtttacattagagtccactcttggtgttgtgtatgggtttggtcgattttataatgacatttatccaccattatagtgtcatacatagtaattttgctaccctaaaaatccagtgtgctccacctgttcctccttccctcctccctcatccctggcaaccactgaactttttaacatctccatagttttgccttttccagaatgtcatatcattggaatcacacagtatgcagccttttcaaatgggcttctttccgttagtaataggcatttaagtttcatcctcatcttttcatggcttgatagctcatttctttccctccctcttttcttccctgtcttccttccttcctcttctttcctgtttcctctttcttcttccttttttaagagacaaggtgtctcactctgttgcccaggctggagtgcagtggcccaatcatagctcattgcagccttgaattcctgggctcaagtgatcctcctgcgttagcctcctgagtagctgggatcacaggctccagtcattttagtgctgaataatatttcattatctggatgtaccgcctattcattcacctactgaagaatatcttggttgcttctaagttttggcaattatgagtgaagttactataaacattgtatacaagttttatgtggatgtatgttgtcatctcccttgggcagataccaaggagtgccattgttggatcatatggtaaatatatctttagttttgtacagaattctaggttggtatttttttctctctcagtcctttattttatttggagacagtctcgctatgtcgcccaggctgccatacagtggtgccatctgggctcactgaaacctccacctcccaggttcaagcgattcttgtgccttggcctcccaagtagctgggattacaggagtgcgccaccacgcctgctaatttttgtatttttagtagagacagggttttgccatgttgcccaggctggtctcaaactcctgaccttaagtgattcacccacctcaatctcccaaaatcctgggattacaggcctgagctactgtgcctgatctctctcagtactttaaagaaatatttcattccacttttcttttttttcttctttttgagatggagtctcactctgtcgcctgggctggagtgcagtggcgcgatctcagctcactgccacctccgcctcctgggttcaagtgattctcctgcctcagcctcctgaatagctgagattacaggcgcccaccaccatgcccagctaattttttgcatttttagtagagacgggggttccaccatgttggccaggctggtctcgaactcctgacctcgtgattcgcacatctcggcctcccaaattgctgggattacaggtgtgagctaccacgcctggcccactcttcttgcttacatagtttctgaggagatgtcagatgtaatttttatttttgctcttctgtaggcaagttgagttttttccccctctagcttctctcaggatttttttctttatctttgattttcagtagtttgaaaattatatgcctagctgtcagggttttttgcttgtttgtttttgttttctcaggtgtgactccagaaaggttctaaagaggagctttacaatctcttctctggggtttatggagacttcctttacccttctgtgttagccccttaaagcactgcgtcaaccttaaaagggcacaggaaagggtgtctatgccatttttatgccatttatcctgcttggtgttttctgagctttcttcatctgcggtttaatgtctcacattaatttgtagaaattctctgtcattgtttcaaatttttcttcagttcttttctctgtttcttcttctggtgttcccattatgcttttgtggttgtcgtacagttattggatattttgttccaggcttttttttttccagtctttttttccttttgcttctcggttttgtaggtgtctgttgagatactctcaagtgcagatattctttcctcagctttgtctagtttactaataagcccattaaaggcagtcttcatttctgttacagtctttttgatcagtagcatttcttttttattctttcttaaaatttctgtctttctgcttacattgcccatctgttcttgcatggtttctactttgtccattagagttcttaggatatttatcataattatttcaaatttctggtgtaacaattccaacatccctgcaacatccaagtctagtttcgatgcttactgtgtctcttccagctgtgttttttcctatttaatatgtcttataattttttcttgatagccatacatgatgcattaggtaacagaaactgctgtgagtggacctttagtaatgtggtggtaaggtgtgcatggaggggaaacattttcagtctgttagtgaacttttgtcaacttcacatgtgcttctcaagtccatcctgtaagtgggagagtagggctagagaggactgaagttgggtatatattaaatactttctcctacaaagaagcctagaggggacgcattaggggattttttttcccccagtattcactgtgatgacccttattgagctcctggaggtaaaactcacaaaactgtggttctcccccctgcccatattactacatgtccctggagtttatatctttcagacttgtctgcactgagcttccaccaatttgtcaaatacagatcaggtttccctaccacccgtgcagttgaaaacccacatacaacttttgactcctccagagcttaactactcatagcctgctattgactggaagccttgccaataacataaacagttgattaatacatattttatatgttttctgtattatatattgtattcttacaataaagagaaaagaagatgttattaagaaaatcataaggaagataaaatatatttactgttcattaagtggttcccatgggtgctggttcccatggaggttgccccttgtgagtttttgctcagggaagttgtgattctctatatttgcctgttggtctcctaatttgggagtcatcagttttccctgtgacctcacttctcttacagagttaagaacagttgttggtttttcagtttgttcagtgttttacatgttgttagaacacagtggtacttctaagtttcttaacatgctagatcagaaacctgaagtctcacctaatttggctttttatattttttcttcttttttttcttccattgctaccaaagcatttttcatctgtgtctggggtgacattagagcagaatgtgatttctaggtaaacattattgggctccctagcagaaaaatttttgaaagtagtacatgaattctgtataattaaaattttcttttcatcttaataggtataggtaataggcacggcctattttttttttgctcaacagtctaaaatagtaatttaatcacctaatagccttagttatatagttgaaagaagagttggaaatctgattcatgggttggaaatcacctgtcacatatgagttttaggcactggtcactttattttgaaacagctttggggttttttcctttttcaactcataataggctttaacagcttttagttttgtttctgtttttttaacagcatgagttgccaaatttggttatagcttcttggtacaagatgggtaaatttgctttgtgttgtgtaattactttttattttaaatgctacctcttttatgaacactaactttacactaagattaggaaaatgagaattgcatgtctgcaacaaatagctatctgtagtattaaattgtgaaaatgtagactttggattggagctggcatctcttaatatgtaattgtaacatagagtaaataagtattttgtcccttgtagggtcaaacagtacagtgcatgggcagaattagagatgtaggcttttttttttttttttttttttactggcttagagaaccgtttgatcagctaatatggaattaagtccctagggctgcccaggcacaacattaactgctattaaaggaaaatttaaaagagtattagtgaaggttaaatactgaccatggacatctggcaaaattgatgttttttttcccctccaccattgtttatagtttattgttatttatcagagaattaatgtttattttcagaatctattaccataagaaatctgtttgaggacttcgtatgtgccaggaattctactaaataatgatataatgctgaacagaattagataggatcctcacttcgttaagcttacagtctagtggtatagatcaacattaatcaaagaataacacaaatagaaagcagagcagtggttcatgggattgactgtagagaagcatgagggaagttcccaggtgatggaaaatactttatttcttaatcgtggtggttacatgtgtgcatatgtttatgaaaatatattgtacatttaaagtggatacattttatcacatgtaaattatgactctataaagttaattaaaaagaataactcaggtaaggtggtgtgtgcgcctgtagtcccagctatttctgaggcaggaagatcacttgagcccaggagtttgagttcagcatgggcaacatgagacctgtgagactttgtctctaaaaaaatttaaataaataactaagataaatgtaaaattacagctgtagtaagttctacaaaggagagttacatgggctatgacgatgtaagatagcaagaactgacattggcagggaggaaatgatgatgagtagaagtaaataagtgaagtgtggggattgatgtcaaggggacagtataaaagaaataacagcatgcgccaaggccctaaaattggaaagtccttggcaaattaaaggagtttgaaaaaggccattgtgtgcaaagcagaaaataggtactacaaggtaaaagatggagctaagcggtaggtaaggctaaaccttgtcagccattgttaaatattgaattgtatcctaagcacaactcagtggaaagcagttaaagttctttaattgggggaggcaatgaaggggtaataaaattggttatagaaatactgctctggctctagtgttgagaatgaattggagtagccagagtagattcaagaagactttagtaagattattccaacaggccaggacctgttatagggtggtggcaatggagagagatggacagaatggagagtgtatttaggaggtaaaaatgacagaacttggtgatgcactgaatgtgaaatggggaaggtgtctaggaggactactaggtttatggtttgcgtattagggtggatgatagcagtttcatttactgagacagggagccctggcagagtacccagcttttagagtgggtagggggaaggggagagtgcatctggtgttgggcattttgaagtgatttacatacaacaaactgaaggtatctttaacactgagtccagcaggttagcatatttattcagcaagcattgcacctttttttgttgtttttggggtcttcaactcctggcctcgaatcctccctccttcccccgcctctcccagcctccgcctcccaaagtgctgggatttcaggagtgagccaccgcgcctggccagcatcgcgctgtttgtgcagtgtgccctgtgctaggtcttgcagtgggtaccagtagagacataaaagtacaaaagataattggacgtttagtagagtcctgaaagggggcgggataggaagatacctaaccataagaaaaaccagcaagagcggaaaaggagctagtcctccagatcaataagttaatcacttatgtttgtgattccctgcattttgggtgattctctgtcgaggtcctcttaagtccagacttttgatataatctgcagtttgcgccatttggattcctgaagcatctttacaagccacctacattccttatggagctgtggcacaacagcaagcccacgatgtctcaccggattaataaaaatataggcgctcacgcttttgtttaccgatatagtatctcctcctcccctcactccatcaacccccacgcgacacaactttccggaagtaagcaaaatccgttatcaaggtgaaactccggggaccaggctccacagctgccataaactggatggcacgttagaagccggtgggtgtaggtgaggcacgctggcgcccgcgggcccttctccagccgctacccagtgggaatccgcggggctgaagccccgaaaccaggctgagcgtcccagagcgcaacctccctttcccccagcagcgccggcgccgcagaagccgcgtgtccccaggcgcactcccccaaggtgaacccccgccccccacggaggcggctgggtcgcgggtctgggcggggcgctccggacgccctcccgccgctgcgcacccctcccgcgagctgccagctccctcggcctctccacccaaaactggcccaaccgccaatcgtctgcctctcacctcctacagcaggtgacccatggccaatcgccaggggtctctttgccaggagccgccagggccagccaatcggggcgacccctccgccggggaggggacgggaaaggggtggggggtgaagggggtgaagggggtgtcccgggggacgggctgaacctcagtcaggaccgcctgcaccgcagtccggggatcgggtcgaggggagaagaaaaaggggtgctcgggagcagcccccggctacctcccctggaggcacagagggcgggggccttggcgaatggctttcttgctggccacttgcggagtgagtagaccccgagggtctgggagaggggccggcccctacccctgagtccccggggtcccggccgccaggccggagcgcgaatgtcgtgctcaccctgcctccttcccgccgccccctgggctttttgatgacaagcttcaaaactgcaaagaagatgaacagagaaagaaaattgaaactctcaaagagacaacaaatagcatggtagaatcaattaaacactgcattgtgttgctgcagattgccaaaagtactattaatcccgtagatgcaatatatcaacctagtcctttggaacctgtgatcagcacaatgccttcccagactgtgttacctccagaacctgttcagttgtgtaagtcagagcagcgtccatcttccctaccagttggacctgtgttggctaccttgggacatcatcagactcctacaccaaatagtacaggcagtggccattcaccaccgagtagcagtctcacttctccaagccacgtgaacttgtctccaaatacagtcccagagttctcttactccagcagtgaagatgaattttatgatgctgatgaattccatcaaagtggctcatccccaaagcgcttaatagattcttctggatctgcctcagtcctgacacacagcagctcgggaaatagtctaaaacgcccagataccacagaatcacttaattcttccttgtccaatggaacaagtgatgctgacctgtttgattcacatgatgacagagatgatgatgcggaggcagggtctgtggaggagcacaagagcgttatcatgcatctcttgtcgcaggttagacttggaatggatcttactaaggtagttcttccaacgtttattcttgaaagaagatctcttttagaaatgtatgcagacttttttgcacatccggacctgtttgtgagcattagtgaccagaaggatcccaaggatcgaatggttcaggttgtgaaatggtacctctcagcctttcatgcgggaaggaaaggatcagttgccaaaaagccatacaatcccattttgggcgagatttttcagtgtcattggacattaccaaatgatactgaagagaacacagaactagtttcagaaggaccagttccctgggtttccaaaaacagtgtaacatttgtggctgagcaggtttcccatcatccacccatttcagccttttatgctgagtgttttaacaagaagatacaattcaatgctcatatctggaccaaatcaaaattccttgggatgtcaattggggtgcacaacatagggcagggctgtgtctcatgtctagactatgatgaacattacattctcacattccccaatggctatggaaggcaagtgtgtccatttcctctgatcagcagtagactctgctgttccttgagacatgccccttccccctcttcctcttaactgtcaaccttacctaaaaacttttgattttgcaggtctatcctcacagtgccctgggtggaattaggaggagaatgcaatattaattgttccaaaacaggctatagtgcaaatatcatcttccacactaaacccttctatgggggcaagaagcacagaattactgccgagattttgtaggtattttttctgccttagagctcttatgcttttctgaaataactgccttttgtcttgaactacagcttctggattaggagtgtgaaagaatggttctgtctttgtaagcgtgtttcacattttatgtgtcatgtcttttgctgaagtcccatatcagaagaagacctaaaacatatattcagagcagtcagaggtcattgataggtttccttcctaaaaacctgacttgcaatgttgaactaaaagaggccttcctaggttgcctagctaaaccagattatggatccctaatttattcttgccagattgaatgatgagctggtccttacagcagactttgtgacccctgcagcactgcctcctggtcctcacagctatccctttttctgtgcctttgctggggaaaaacagtaaccatcacattttgcacgcatctggcttgcttccacttgacactcttgggtcacgtgcagatgactgtgccagtcagtggaaagtctatagtgatggcaccatgactctctctgcctctggaacccttaactgggggggaaggggacagtgggaaagaaagtttcaggcgttgatagcagctctcctccctctgccctggtcatgtctcccttttctggcctctttcaatcctgtttatgccttgcccttcctaaccaggcctttgctgtgttgcttatcttctcacattccatagttgtgtgtccaagtagaggtctgttacggcttttgcagaatggatccttgctcagggaaagtattcacaccatctggcacagaggtccctttcaacctgaggatgaaagcctgcattatattcttaagcaaagccttccctgacccccagtgcccatgtaagctcaccacagcacttaccacctagaatttcaatggtggttacgtctctctccactacgctgtgaacagcttgaggatagggaatttgccaactctgttatggtccttgcacccagaataggacgttcttgcccaaacccaccattcttgggatctcaagttcataagcgtcctgttgaaggccctcattcttatagttagccctggggagtccagttctgttaagatgctttcatcaaaaacttcacagttgctcttctgtgctctactctgtagttgggccacactgagcagattctttggtagaattttcaacttgagactaacacaagtatttccttttctgttcag

SEQ ID NO: 735135 - DNA, 19156 bp, Homo sapiens
gtaagggtctttacatggtttccagatagttcattagttgttgctttctttttttgtctgttttctgttttttttttttaaataactgtggtatgatgtaataggaacttataatttctgagttgcttatttttcctttacagttatagtaaagttatactcatttattttctcctgctttctgcagagtaaaatactgatttttgtctagaaacaagacagtgcaagacaatgttgaaagtgaaattctatgttaaaatatgccagatttattttaagaatttaatatctgtagtcagttatcaatacaaccaaattacataattatgcatgataataggtaaatactgagaagttcacctcattttcttgttaaaggatttggctattaccgtatgtgtcagttagtactcttttgtatggtagtgaaagaaaactcaacccaaactgattcatgaagaagaaagtaaatctggttagatgtggtttgaattaggtaattcatgtcatgaggactcagatctcccatctctatttctacgttccacttttgcattggcttcattttcggttaggttctcccttggtggtggtaaggtggttgtagcaatgtcagcctcccatttttggaaccgagtccataggaggctattctttctagaccttaataggagtaacacaattattgctcatcaccctagctttggccatgtgtcaaatcctgaccagtcacaatttcacagtcatagattctaccctggagctgggatgttactggcctcactagaaacacattgctgatagggtagaaggtgtgttcatcctacccaacccgacccgcaccaaagtcagaatagggaaaaacagatgttgggtgacatgcaactaacgtctgccgtactacactgaagatatttttctatgtttattctccagtgaaagagcttatatttgtggtacataggggattttgttttaatttagaaaatttaattgtagaaaacatgttttataaccctttctctgtactttgttctatatcaggaattgacttgattagataaggtgacatagggtatcttaggccctacaagatagtaaaccccccatcacttgaaagtattcagtagaggcttaaaaaacattattaaaggatgtggttattaggggactttaagaaatgaatatgaaattgaagtaggaaatctttaagctactctgtgagttatgccttttaaaagcaatttgtaattcctgtagatttcttttaaatttaggcagtttcataaatgactatagcatcattttagcaaatttgtgatcctgtaagaggaggataagtgttttttgtttgtttgtttgttttttgtttttttgagacagagtctcactttgtaccccagaaagtaaatctagttagatgtggtttgtctcggctcactgcaacctccaccccgtgcgttctagcaattctcctgcctcagccaccacacctggcctaagaggggaggataagtgttttagtgatcatattagactgaatgtggcagatgagatttcccgcccccccattgttggttagactgacattcaacattcaacaagagccacctgcccttgtaggcatttctgccactatacccctacataaacctagagtgctattgcttacttgctttccttcaaatacattttttcatttgtggcctccacattcttgtgtgtgatgtcctttctctgtgaaatgtcttctaccctttttttcaaagcctagtttagaactgacctcttctatgaaccctctgccgactggcctttccttccccagtcccccaagttcaaaatgatctctttcctttgaatactatagtatttgcacaattcactatctccttatcatattcttcttgtttatttgttatcagctgatgttgacatcataagttcaggttcctaactagatccaatattggaatttttcagcttttgctaagaagagagcttgtatgtctttgggaataatgggcagaaaaagataactttgagaagtcttagacttctaatagctttgatatttaaaagtacatgtaatacaagaggtttttttcctacatttaatgcatggagaagataggacatttagaaatatggaattaatgttcatttgactggcaaaagattattttctcagatgtagtgaagtgtggtaaagaacttcactctagagccagaatgtctgtgtttgtatcccagagcccaccacttacatttaaccattaacattcaacttactgtctctgagtttcagtggcctcatctataaaatgaggataataagagtacctacttcatagagttgttttagtggttaaataaactaacgtaaacttgctagaacttgataaactaatattggatgagaactggttgaaataatgcctggctatagtaaaaacttggtaaatgttagttgccattacaatgcaactactgttcctaccattccctctgccagtgcctggtattcagtagcactcagtaaatgttagttaaatgaagaaataactgaaggaatgaatgaacaaatggttgatgtagagattgcttttccattgttgtttattgaatattttgagatgtataacatactgtctgttaggcactgtgggatgggcactcacggagctgtcttccaaaggggtataggagaggagacgcagtgatctcagcaacctacctttaaaacatatcctagtatctactgccatgttaggttctcttcttttgctttttttaaaaaaaaattctcacaaaactccccccacccacttcagtttatagatgaggaagctcctactacataatagtgcttcccagtctaattcttgacctcattgtatttatatgtcctttttttttttgacagagtctcactcattgcagtggcacaatcacagctcactgcaacctctgcctcccctgctcaagtgatcctcccacctcaacctcctgagtagctgggactacaggcatgcaccaccacgcctggctaatttttgtatttttttgtagagatgcggttttgccatgttggccaggctggtctcgaactcctgggctcaagccatctgcccactttggcctctgagagtgctgagattataggcatgagccaccattcccagccatgttttcctttttcattgaactttatctactttagccattaaactccactccattggtcttgtcattactaagagctgaaccacctgcaaaatattaagttaaaaagcgttttctttgacaacagttttcttttcttcatcttcctctatcactttacttctgaacttttattctctcattttgatctgacccctacttctctgtttttcctggccatttagtactttcttgttttgctcatcccatttcccagtggagaccttctggtctgctgctttatcactggttttgttagaagacatacaaatggcaaggaggtatatgaaaaggtgcctaacatcattgatcatcagagaaatgcagaccaaaactacaatgagatatcatttcaccccagttaaaatggctttttttttttttttccaaaagacaggcaataacaaagtactggtgaggatgtggagtaaagggaacccacatacactattagtaggaatgtaaattagtacagccactgtggagaacagtttgaaggttcctcaaaaaactaaaaatagagctaccatataatccagcaatcccactgctaggtatatatccaaaagaaaggcaatcaatatacggaagagatacctgcacacccaggtttattgcagcactattcacaatagccaagatttggaagcaacccaggtgtccaacagatgaatggataaagaaaacatggtatataaacacaatggaatactattcagctgtgaaaaagaatgaaatcctgtcatttgcaatcctgtcttgaatagaactggaggtcatgatgttaagtgaaataagacaggcacaaacttcacatgttctcacttatttgtgggagctaaaaattaaaacaatcgaactcatggagctagagaatagaattatggttaccagaggctggaagggtggttgggcgtataagtgtagggggagtggggatggttaatgggtacaaaaaaatgagaacgaataagatctacttgataacacaacagggtgactatagtcaacagtaattatacatttaaaaataactagaagagtataattagattgtaacacaaaagataaatgcttgaggtgatggatacctatttaccctgatgtgattattacttatttcatgcctatatcaaaatatttatactccaaaaatatatatacctactatgtacccacaaaaatttaaaaatttatatattgtttttgctatcacctttagaatttcttgtcattggatagttcgtctgtataccattctggtcttcattccccagggcccccgttgtctgatttttctgcttctagaactgttagaggtcacaaaagcaagatggttgtatctatcacaatttttgtctgactttaactgggtatctgttacgatttagtagtcatcttactgacttcttgttggtttccaattgaatcctcacagtagactgttttcattgtaatcagtatcgaattatagcctgttcccttcttcataaatgaaggctttcttcttcaacagttcttagtgacttcacctgtactttatttctctgctttgaatatttcgaagaaaacatattcttgctctttcccaaggttaacactacatacattaccttgaccacaggatgttttcttgcagattgtgacctaattccatcacccttcagcagcccccaccgttttcatggattcagctaaaccttctgtaagatgactctttttccccctaatctttatatctcttttgatatgtagctttagtctcactttttttccttttggattttgccagttagatgtctccctggaattccacttcagcatggctaagactaagcttgtcttctctttcctccccaaagcaaattgtaattaggatagactgaaggtgacagaagataactaagatcttcttcatcctttcggctcttatggaagctgaattccagtagtcattctaaatttgttgtatgtcagcttatggtatcttttcatgtctttacattcagccaaagaggaagttccttgaaggggagaccagagggcgtgctgtgcttcttaatcctctctttcttaaccagtaagaggcattcagtagatatctgatgatactgattaatagaggggaacttttcagattcttttttttttttaaccctagtaagctttagtacaaactaaatgctgagagattatcaagtaagggattgatcatcacaagaagactcaggatgttacatcctgtaggttttatagtttcctatattgtaaaaaatatgagttatagcagcttgtctggatgtcatacaggtataaaaatcagttttataaacttgagtaaattggggcccattttagaaaaaactcttgcaggctgtgaatgccaatatataagtaaagtattaagtataatgttatttaatgtgggcaaacataaagccaggtgtaaattttttaggtttaaaatcttatagaactatacatccaaaagaaaatttcaagttaaacataatacaaagcaatacaatctaaattaacattaatttaatgtgatgaatgatattgccttgctaaaagtgggtcactacttacaatgtgcaaatggtactcatcgttagggtatagattcttttaaactatgacatacgtacactaccatgtggaacgtgatgatgtgttctctgttctaactactgggaagacttccttggcatagcacatgccatggggtcagttggctttgacttcatatagatatgccatttacttggtcagtgtcacttctatgacaagtagtatgttgtgccagtttgattataagtacaaatatgggcaatgaagtaacttggttttaaggttgttactaagctgagtaacagtgtgtggctatacaaatttttataggctatcaggaatgaaaacacaggagattgttgtagattcaagtattttagattcaagtttgaagatgctcatgcagatgtttaactgagttgtatagacctttatgtttctttctttttctctttttttttttttgagacagagtcttgctctgtcacccaagctggagtgcaatggtgtgatctcggcttactgcaacctccgcctcccaggttcaagcaattctcctgcctcagcctcccaagtagctgggattacagatgtgcaccacgacgcccagctgattttttgtattttagtagaggcggggtctcaccatgttgtcaagatggtctcaatctcctgaccttgtgatccacccacctctgcctcccaaagtgctgtgattacaggcgtgagccaccgcgcctgactgacctttatgtttcttaactttatgctatacatcagttgatatttcaaaaatttaaatggtttctatgattattctttgggctaagaaattgggcattaattgtcctcatatgtatggtttttgtggctacttcatgtagattttatttttggtggttatcaaattggaatttttttttttttttttttttttgagacggagtctcattctgtttcccaggttggagtacagtggtgcaatctcagctcactgcagcctcgacctcccaggctcaagcagtcctctcacctcagccttctaagtagctgggactacaggcacgcaccaccacacctggctagttttttgtgtttttagtagagatggggttttaccctgttggccaggctggtcttgaactcctggcctcaagtgatccacctgcctcagcctcccaaagtgctgggattagaggcatgagccaccacacctggctgaaattggaatttcattggtactgcctgtaattttatgttaatttttttttttttttgtcgtcactagcttttatctaaagcccctagagagaaaggccatgataccttgtatacaaggttataagagtatacaagggaaagggagggctgaagggaacagggtgggctggtacaagcctcattagaaataccattgagtctgtgagtaaaacatcattatatgaaaaggagatgtggttttagggtggtccaattacttttgcaccagcctaataaaattacaagtcattatcaatagagacattgtaaaacctttttttttcccaaaagaagtatcaggtatgataattacatgtctgcccaactttcgttatagattaacataacttaattgtatttaaggtacaatttaggagagttgctgaaaaatgaatctttagtattgggatgccttgattctaccctcaatagctataatggattatgtgtctgagtagattaataaaaatcttttgagcatttttcttgaactacttcactgaagattagctttttgagcatccattttaatttctcagtatataaggatcggtttatcacaactgtattgttttccctggccttgttagattatattttcatatcatgtagaaaaataggtgtattcgttctcccttgaagtcctttgtctcccaaaggaaatggttgcaatacagatgtgtcacctcttccacaggtaaagtggaatggagaagtagccagttaaatagtgcatgctcaatttggaacatttagagcatacaggaaagttatttatttggtaaatattttttaagcatttactatgtttcatgcattgtactagttgtagaggatataattgaatacaactacatgtagcccttgactttatggaactagtctagtataaagatttaagattgcctggcatggtggctcacgccactaatcccagcactttgagaggccaaggcaggattgcttgaggccagaagtttaagagtagcttggtcaacataatgagactccatctctaaaataaatagatagatagatagatagatagatagatagatagatagatagaagtagttagacaacacaaagcagtttcactcatcttgtggcaaggagttatgtatttctaatcaaatttggcaactcaagcattttcaacaaaatctacatgttttttcagaataaagtgaccaacacagaatgttacctgtaaaaatcagagcaataattgctatctaaaataattttgaaaattaagtggtactgaaaggctcatatagcaaaaatatggcctcctgtcattgtactttcctacttcccagactcaccattttcaacattttttagtagtttattttgccattttatagcatagtacctgacattttatttattcaacagacatttcttaagtacctaatacatgccattccttgtttgaagggatgctaaggatacagtggtgaacaaggcgttgtggggttgtatagagggtattcattcctaaccttgaaccaaatatttctttctgttggataatgcattaaaaattgcaaacagtttacaaacttttggagcaatggtggccttgatcataaagtagggactgcttctaccgtatacatgcttggtggtgtatttgtgatatctggctaaagtttctacatggaaattgactgactttagttttgagacttctgggaaccagtcaggcaaaatagtgaaactgtgtatcctgtttccaagagttgtcttttaaggttatctgcttcattcatttggcctgacttgctaggcaaatgcctagggtaaatatgatttgattaactataacaacaacagcaacaacaacaactttattttttagagcagtttgaggttcacagcaaaattgagcagaatgtacagagattttccctatacccgcttcccctacgcatgtgcggcctcccctactatcaacatcccccaccagagtggtttgttacaattaatgaacctacattgacacatcattatcactcaaggtccgtagtttacattagagtccactcttggtgttgtgtatgggtttggtcgattttataatgacatttatccaccattatagtgtcatacatagtaattttgctaccctaaaaatccagtgtgctccacctgttcctccttccctcctccctcatccctggcaaccactgaactttttaacatctccatagttttgccttttccagaatgtcatatcattggaatcacacagtatgcagccttttcaaatgggcttctttccgttagtaataggcatttaagtttcatcctcatcttttcatggcttgatagctcatttctttccctccctcttttcttccctgtcttccttccttcctcttctttcctgtttcctctttcttcttccttttttaagagacaaggtgtctcactctgttgcccaggctggagtgcagtggcccaatcatagctcattgcagccttgaattcctgggctcaagtgatcctcctgcgttagcctcctgagtagctgggatcacaggctccagtcattttagtgctgaataatatttcattatctggatgtaccgcctattcattcacctactgaagaatatcttggttgcttctaagttttggcaattatgagtgaagttactataaacattgtatacaagttttatgtggatgtatgttgtcatctcccttgggcagataccaaggagtgccattgttggatcatatggtaaatatatctttagttttgtacagaattctaggttggtatttttttctctctcagtcctttattttatttggagacagtctcgctatgtcgcccaggctgccatacagtggtgccatctgggctcactgaaacctccacctcccaggttcaagcgattcttgtgccttggcctcccaagtagctgggattacaggagtgcgccaccacgcctgctaatttttgtatttttagtagagacagggttttgccatgttgcccaggctggtctcaaactcctgaccttaagtgattcacccacctcaatctcccaaaatcctgggattacaggcctgagctactgtgcctgatctctctcagtactttaaagaaatatttcattccacttttcttttttttcttctttttgagatggagtctcactctgtcgcctgggctggagtgcagtggcgcgatctcagctcactgccacctccgcctcctgggttcaagtgattctcctgcctcagcctcctgaatagctgagattacaggcgcccaccaccatgcccagctaattttttgcatttttagtagagacgggggttccaccatgttggccaggctggtctcgaactcctgacctcgtgattcgcacatctcggcctcccaaattgctgggattacaggtgtgagctaccacgcctggcccactcttcttgcttacatagtttctgaggagatgtcagatgtaatttttatttttgctcttctgtaggcaagttgagttttttccccctctagcttctctcaggatttttttctttatctttgattttcagtagtttgaaaattatatgcctagctgtcagggttttttgcttgtttgtttttgttttctcaggtgtgactccagaaaggttctaaagaggagctttacaatctcttctctggggtttatggagacttcctttacccttctgtgttagccccttaaagcactgcgtcaaccttaaaagggcacaggaaagggtgtctatgccatttttatgccatttatcctgcttggtgttttctgagctttcttcatctgcggtttaatgtctcacattaatttgtagaaattctctgtcattgtttcaaatttttcttcagttcttttctctgtttcttcttctggtgttcccattatgcttttgtggttgtcgtacagttattggatattttgttccaggcttttttttttccagtctttttttccttttgcttctcggttttgtaggtgtctgttgagatactctcaagtgcagatattctttcctcagctttgtctagtttactaataagcccattaaaggcagtcttcatttctgttacagtctttttgatcagtagcatttcttttttattctttcttaaaatttctgtctttctgcttacattgcccatctgttcttgcatggtttctactttgtccattagagttcttaggatatttatcataattatttcaaatttctggtgtaacaattccaacatccctgcaacatccaagtctagtttcgatgcttactgtgtctcttccagctgtgttttttcctatttaatatgtcttataattttttcttgatagccatacatgatgcattaggtaacagaaactgctgtgagtggacctttagtaatgtggtggtaaggtgtgcatggaggggaaacattttcagtctgttagtgaacttttgtcaacttcacatgtgcttctcaagtccatcctgtaagtgggagagtagggctagagaggactgaagttgggtatatattaaatactttctcctacaaagaagcctagaggggacgcattaggggattttttttcccccagtattcactgtgatgacccttattgagctcctggaggtaaaactcacaaaactgtggttctcccccctgcccatattactacatgtccctggagtttatatctttcagacttgtctgcactgagcttccaccaatttgtcaaatacagatcaggtttccctaccacccgtgcagttgaaaacccacatacaacttttgactcctccagagcttaactactcatagcctgctattgactggaagccttgccaataacataaacagttgattaatacatattttatatgttttctgtattatatattgtattcttacaataaagagaaaagaagatgttattaagaaaatcataaggaagataaaatatatttactgttcattaagtggttcccatgggtgctggttcccatggaggttgccccttgtgagtttttgctcagggaagttgtgattctctatatttgcctgttggtctcctaatttgggagtcatcagttttccctgtgacctcacttctcttacagagttaagaacagttgttggtttttcagtttgttcagtgttttacatgttgttagaacacagtggtacttctaagtttcttaacatgctagatcagaaacctgaagtctcacctaatttggctttttatattttttcttcttttttttcttccattgctaccaaagcatttttcatctgtgtctggggtgacattagagcagaatgtgatttctaggtaaacattattgggctccctagcagaaaaatttttgaaagtagtacatgaattctgtataattaaaattttcttttcatcttaataggtataggtaataggcacggcctattttttttttgctcaacagtctaaaatagtaatttaatcacctaatagccttagttatatagttgaaagaagagttggaaatctgattcatgggttggaaatcacctgtcacatatgagttttaggcactggtcactttattttgaaacagctttggggttttttcctttttcaactcataataggctttaacagcttttagttttgtttctgtttttttaacagcatgagttgccaaatttggttatagcttcttggtacaagatgggtaaatttgctttgtgttgtgtaattactttttattttaaatgctacctcttttatgaacactaactttacactaagattaggaaaatgagaattgcatgtctgcaacaaatagctatctgtagtattaaattgtgaaaatgtagactttggattggagctggcatctcttaatatgtaattgtaacatagagtaaataagtattttgtcccttgtagggtcaaacagtacagtgcatgggcagaattagagatgtaggcttttttttttttttttttttttactggcttagagaaccgtttgatcagctaatatggaattaagtccctagggctgcccaggcacaacattaactgctattaaaggaaaatttaaaagagtattagtgaaggttaaatactgaccatggacatctggcaaaattgatgttttttttcccctccaccattgtttatagtttattgttatttatcagagaattaatgtttattttcagaatctattaccataagaaatctgtttgaggacttcgtatgtgccaggaattctactaaataatgatataatgctgaacagaattagataggatcctcacttcgttaagcttacagtctagtggtatagatcaacattaatcaaagaataacacaaatagaaagcagagcagtggttcatgggattgactgtagagaagcatgagggaagttcccaggtgatggaaaatactttatttcttaatcgtggtggttacatgtgtgcatatgtttatgaaaatatattgtacatttaaagtggatacattttatcacatgtaaattatgactctataaagttaattaaaaagaataactcaggtaaggtggtgtgtgcgcctgtagtcccagctatttctgaggcaggaagatcacttgagcccaggagtttgagttcagcatgggcaacatgagacctgtgagactttgtctctaaaaaaatttaaataaataactaagataaatgtaaaattacagctgtagtaagttctacaaaggagagttacatgggctatgacgatgtaagatagcaagaactgacattggcagggaggaaatgatgatgagtagaagtaaataagtgaagtgtggggattgatgtcaaggggacagtataaaagaaataacagcatgcgccaaggccctaaaattggaaagtccttggcaaattaaaggagtttgaaaaaggccattgtgtgcaaagcagaaaataggtactacaaggtaaaagatggagctaagcggtaggtaaggctaaaccttgtcagccattgttaaatattgaattgtatcctaagcacaactcagtggaaagcagttaaagttctttaattgggggaggcaatgaaggggtaataaaattggttatagaaatactgctctggctctagtgttgagaatgaattggagtagccagagtagattcaagaagactttagtaagattattccaacaggccaggacctgttatagggtggtggcaatggagagagatggacagaatggagagtgtatttaggaggtaaaaatgacagaacttggtgatgcactgaatgtgaaatggggaaggtgtctaggaggactactaggtttatggtttgcgtattagggtggatgatagcagtttcatttactgagacagggagccctggcagagtacccagcttttagagtgggtagggggaaggggagagtgcatctggtgttgggcattttgaagtgatttacatacaacaaactgaaggtatctttaacactgagtccagcaggttagcatatttattcagcaagcattgcacctttttttgttgtttttggggtcttcaactcctggcctcgaatcctccctccttcccccgcctctcccagcctccgcctcccaaagtgctgggatttcaggagtgagccaccgcgcctggccagcatcgcgctgtttgtgcagtgtgccctgtgctaggtcttgcagtgggtaccagtagagacataaaagtacaaaagataattggacgtttagtagagtcctgaaagggggcgggataggaagatacctaaccataagaaaaaccagcaagagcggaaaaggagctagtcctccagatcaataagttaatcacttatgtttgtgattccctgcattttgggtgattctctgtcgaggtcctcttaagtccagacttttgatataatctgcagtttgcgccatttggattcctgaagcatctttacaagccacctacattccttatggagctgtggcacaacagcaagcccacgatgtctcaccggattaataaaaatataggcgctcacgcttttgtttaccgatatagtatctcctcctcccctcactccatcaacccccacgcgacacaactttccggaagtaagcaaaatccgttatcaaggtgaaactccggggaccaggctccacagctgccataaactggatggcacgttagaagccggtgggtgtaggtgaggcacgctggcgcccgcgggcccttctccagccgctacccagtgggaatccgcggggctgaagccccgaaaccaggctgagcgtcccagagcgcaacctccctttcccccagcagcgccggcgccgcagaagccgcgtgtccccaggcgcactcccccaaggtgaacccccgccccccacggaggcggctgggtcgcgggtctgggcggggcgctccggacgccctcccgccgctgcgcacccctcccgcgagctgccagctccctcggcctctccacccaaaactggcccaaccgccaatcgtctgcctctcacctcctacagcaggtgacccatggccaatcgccaggggtctctttgccaggagccgccagggccagccaatcggggcgacccctccgccggggaggggacgggaaaggggtggggggtgaagggggtgaagggggtgtcccgggggacgggctgaacctcagtcaggaccgcctgcaccgcagtccggggatcgggtcgaggggagaagaaaaaggggtgctcgggagcagcccccggctacctcccctggaggcacagagggcgggggccttggcgaatggctttcttgctggccacttgcggagtgagtagaccccgagggtctgggagaggggccggcccctacccctgagtccccggggtcccggccgccaggccggagcgcgaatgtcgtgctcaccctgcctccttcccgccgccccctgggctttttgatgacaagcttcaaaactgcaaagaagatgaacagagaaagaaaattgaaactctcaaagagacaacaaatagcatggtagaatcaattaaacactgcattgtgttgctgcagattgccaaaagtactattaatcccgtagatgcaatatatcaacctagtcctttggaacctgtgatcagcacaatgccttcccagactgtgttacctccagaacctgttcagttgtgtaagtcagagcagcgtccatcttccctaccagttggacctgtgttggctaccttgggacatcatcagactcctacaccaaatagtacaggcagtggccattcaccaccgagtagcagtctcacttctccaagccacgtgaacttgtctccaaatacagtcccagagttctcttactccagcagtgaagatgaattttatgatgctgatgaattccatcaaagtggctcatccccaaagcgcttaatagattcttctggatctgcctcagtcctgacacacagcagctcgggaaatagtctaaaacgcccagataccacagaatcacttaattcttccttgtccaatggaacaagtgatgctgacctgtttgattcacatgatgacagagatgatgatgcggaggcagggtctgtggaggagcacaagagcgttatcatgcatctcttgtcgcaggttagacttggaatggatcttactaaggtagttcttccaacgtttattcttgaaagaagatctcttttagaaatgtatgcagacttttttgcacatccggacctgtttgtgagcattagtgaccagaaggatcccaaggatcgaatggttcaggttgtgaaatggtacctctcagcctttcatgcgggaaggaaaggatcagttgccaaaaagccatacaatcccattttgggcgagatttttcagtgtcattggacattaccaaatgatactgaagagaacacagaactagtttcagaaggaccagttccctgggtttccaaaaacagtgtaacatttgtggctgagcaggtttcccatcatccacccatttcagccttttatgctgagtgttttaacaagaagatacaattcaatgctcatatctggaccaaatcaaaattccttgggatgtcaattggggtgcacaacatagggcagggctgtgtctcatgtctagactatgatgaacattacattctcacattccccaatggctatggaaggcaagtgtgtccatttcctctgatcagcagtagactctgctgttccttgagacatgccccttccccctcttcctcttaactgtcaaccttacctaaaaacttttgattttgcaggtctatcctcacagtgccctgggtggaattaggaggagaatgcaatattaattgttccaaaacaggctatagtgcaaatatcatcttccacactaaacccttctatgggggcaagaagcacagaattactgccgagattttttctccaaatgacaagaagtctttttgctcaattgaaggggaatggaatggtgtgatgtatgcaaaatatgcaacaggggaaaatacagtctttgtagataccaagaagttgcctataatcaagaagaaagtgaggaagttggaagatcagaacgagtatgaatcccgcagcctttggaaggatgtcactttcaacttaaaaatcagagacattgatgcagcaactgaagcaaagcacaggcttgaagaaagacaaagagcagaagcccgagaaaggaaggagaaggaaattcagtgggagacaaggttatttcatgaagatggagaatgctgggtttatgatgaaccattactgaaacgtcttggtgctgccaagcattaggttggaagatgcaaagtttatacctgatgatcagggcagtaggcataattcagcaacaaacaatcttcctttgggagaaacctgttcattccaatcttctaattacagtggttcctatctcagggatactggactttctgacgcagatgaacaattaaggggaaaagcttcccttttccctctgtggcagttacgattttgacttcagtcctgagaaaaacttcaggttttgaaaatcagatgatgtcttctccttttccaaacaccacacgttgaaagcatttataaatccaagtctgaaactctgcgctctagtactgctgttaagatacacaacttgtttcttagttcatataatctcgggatacacacacacacacacatatatatacacacacatacgtatacacacacatacatatatataaatatacctgatgccagatttttttcataaatattctgcctactgtaaatatgggttcctctgagttgttttagaaaattagcgcaatgtattaaaatcaagtgttaggaaatttcatggtcttacctacaataacttttattttggaattgaactattattaaattgtatctaatcctggattacagtttaattaattattcttagtgcttaaggcttcataaagtaatttttccaacctttttttaaaaagagcatcttttattatcttttatggttaaacttggaagccaattatttggcaaccttgaatacaagagctagcttttcaaagaaagacacttgaaataatggaggatccattcttttcctctgtcagattgtatgttctgtctttagcccctgccaggcaattccccagaatcttcacttaactcatattgcacatgtagggctgcctaccaacattttatccaaaaatgttttattgccttagagggtttgggaagagtgtgtatttatagatccccaccccacagtgaacaaaaatagatagatagatagaataaaatgaatgccacagcagcagatggctcattctgaagggaaatacagaactatatctatctatctatctatcatcttttttatttaaaaatacattaaaaaaacaggtattagtacctagcatttagttagttattcaatatactggttacgtaaggcctttcaagaagtagattctcagtctgagaggacacaggccagggcttctcaaagtgctgctgcaggctttctggtctcgcttggcc

SEQ ID NO: 735136 - DNA, 19198 bp, Homo sapiens
  misc_feature (19198)..(19198): n is a, c, g, or t
gtaagggtctttacatggtttccagatagttcattagttgttgctttctttttttgtctgttttctgttttttttttttaaataactgtggtatgatgtaataggaacttataatttctgagttgcttatttttcctttacagttatagtaaagttatactcatttattttctcctgctttctgcagagtaaaatactgatttttgtctagaaacaagacagtgcaagacaatgttgaaagtgaaattctatgttaaaatatgccagatttattttaagaatttaatatctgtagtcagttatcaatacaaccaaattacataattatgcatgataataggtaaatactgagaagttcacctcattttcttgttaaaggatttggctattaccgtatgtgtcagttagtactcttttgtatggtagtgaaagaaaactcaacccaaactgattcatgaagaagaaagtaaatctggttagatgtggtttgaattaggtaattcatgtcatgaggactcagatctcccatctctatttctacgttccacttttgcattggcttcattttcggttaggttctcccttggtggtggtaaggtggttgtagcaatgtcagcctcccatttttggaaccgagtccataggaggctattctttctagaccttaataggagtaacacaattattgctcatcaccctagctttggccatgtgtcaaatcctgaccagtcacaatttcacagtcatagattctaccctggagctgggatgttactggcctcactagaaacacattgctgatagggtagaaggtgtgttcatcctacccaacccgacccgcaccaaagtcagaatagggaaaaacagatgttgggtgacatgcaactaacgtctgccgtactacactgaagatatttttctatgtttattctccagtgaaagagcttatatttgtggtacataggggattttgttttaatttagaaaatttaattgtagaaaacatgttttataaccctttctctgtactttgttctatatcaggaattgacttgattagataaggtgacatagggtatcttaggccctacaagatagtaaaccccccatcacttgaaagtattcagtagaggcttaaaaaacattattaaaggatgtggttattaggggactttaagaaatgaatatgaaattgaagtaggaaatctttaagctactctgtgagttatgccttttaaaagcaatttgtaattcctgtagatttcttttaaatttaggcagtttcataaatgactatagcatcattttagcaaatttgtgatcctgtaagaggaggataagtgttttttgtttgtttgtttgttttttgtttttttgagacagagtctcactttgtaccccagaaagtaaatctagttagatgtggtttgtctcggctcactgcaacctccaccccgtgcgttctagcaattctcctgcctcagccaccacacctggcctaagaggggaggataagtgttttagtgatcatattagactgaatgtggcagatgagatttcccgcccccccattgttggttagactgacattcaacattcaacaagagccacctgcccttgtaggcatttctgccactatacccctacataaacctagagtgctattgcttacttgctttccttcaaatacattttttcatttgtggcctccacattcttgtgtgtgatgtcctttctctgtgaaatgtcttctaccctttttttcaaagcctagtttagaactgacctcttctatgaaccctctgccgactggcctttccttccccagtcccccaagttcaaaatgatctctttcctttgaatactatagtatttgcacaattcactatctccttatcatattcttcttgtttatttgttatcagctgatgttgacatcataagttcaggttcctaactagatccaatattggaatttttcagcttttgctaagaagagagcttgtatgtctttgggaataatgggcagaaaaagataactttgagaagtcttagacttctaatagctttgatatttaaaagtacatgtaatacaagaggtttttttcctacatttaatgcatggagaagataggacatttagaaatatggaattaatgttcatttgactggcaaaagattattttctcagatgtagtgaagtgtggtaaagaacttcactctagagccagaatgtctgtgtttgtatcccagagcccaccacttacatttaaccattaacattcaacttactgtctctgagtttcagtggcctcatctataaaatgaggataataagagtacctacttcatagagttgttttagtggttaaataaactaacgtaaacttgctagaacttgataaactaatattggatgagaactggttgaaataatgcctggctatagtaaaaacttggtaaatgttagttgccattacaatgcaactactgttcctaccattccctctgccagtgcctggtattcagtagcactcagtaaatgttagttaaatgaagaaataactgaaggaatgaatgaacaaatggttgatgtagagattgcttttccattgttgtttattgaatattttgagatgtataacatactgtctgttaggcactgtgggatgggcactcacggagctgtcttccaaaggggtataggagaggagacgcagtgatctcagcaacctacctttaaaacatatcctagtatctactgccatgttaggttctcttcttttgctttttttaaaaaaaaattctcacaaaactccccccacccacttcagtttatagatgaggaagctcctactacataatagtgcttcccagtctaattcttgacctcattgtatttatatgtcctttttttttttgacagagtctcactcattgcagtggcacaatcacagctcactgcaacctctgcctcccctgctcaagtgatcctcccacctcaacctcctgagtagctgggactacaggcatgcaccaccacgcctggctaatttttgtatttttttgtagagatgcggttttgccatgttggccaggctggtctcgaactcctgggctcaagccatctgcccactttggcctctgagagtgctgagattataggcatgagccaccattcccagccatgttttcctttttcattgaactttatctactttagccattaaactccactccattggtcttgtcattactaagagctgaaccacctgcaaaatattaagttaaaaagcgttttctttgacaacagttttcttttcttcatcttcctctatcactttacttctgaacttttattctctcattttgatctgacccctacttctctgtttttcctggccatttagtactttcttgttttgctcatcccatttcccagtggagaccttctggtctgctgctttatcactggttttgttagaagacatacaaatggcaaggaggtatatgaaaaggtgcctaacatcattgatcatcagagaaatgcagaccaaaactacaatgagatatcatttcaccccagttaaaatggctttttttttttttttccaaaagacaggcaataacaaagtactggtgaggatgtggagtaaagggaacccacatacactattagtaggaatgtaaattagtacagccactgtggagaacagtttgaaggttcctcaaaaaactaaaaatagagctaccatataatccagcaatcccactgctaggtatatatccaaaagaaaggcaatcaatatacggaagagatacctgcacacccaggtttattgcagcactattcacaatagccaagatttggaagcaacccaggtgtccaacagatgaatggataaagaaaacatggtatataaacacaatggaatactattcagctgtgaaaaagaatgaaatcctgtcatttgcaatcctgtcttgaatagaactggaggtcatgatgttaagtgaaataagacaggcacaaacttcacatgttctcacttatttgtgggagctaaaaattaaaacaatcgaactcatggagctagagaatagaattatggttaccagaggctggaagggtggttgggcgtataagtgtagggggagtggggatggttaatgggtacaaaaaaatgagaacgaataagatctacttgataacacaacagggtgactatagtcaacagtaattatacatttaaaaataactagaagagtataattagattgtaacacaaaagataaatgcttgaggtgatggatacctatttaccctgatgtgattattacttatttcatgcctatatcaaaatatttatactccaaaaatatatatacctactatgtacccacaaaaatttaaaaatttatatattgtttttgctatcacctttagaatttcttgtcattggatagttcgtctgtataccattctggtcttcattccccagggcccccgttgtctgatttttctgcttctagaactgttagaggtcacaaaagcaagatggttgtatctatcacaatttttgtctgactttaactgggtatctgttacgatttagtagtcatcttactgacttcttgttggtttccaattgaatcctcacagtagactgttttcattgtaatcagtatcgaattatagcctgttcccttcttcataaatgaaggctttcttcttcaacagttcttagtgacttcacctgtactttatttctctgctttgaatatttcgaagaaaacatattcttgctctttcccaaggttaacactacatacattaccttgaccacaggatgttttcttgcagattgtgacctaattccatcacccttcagcagcccccaccgttttcatggattcagctaaaccttctgtaagatgactctttttccccctaatctttatatctcttttgatatgtagctttagtctcactttttttccttttggattttgccagttagatgtctccctggaattccacttcagcatggctaagactaagcttgtcttctctttcctccccaaagcaaattgtaattaggatagactgaaggtgacagaagataactaagatcttcttcatcctttcggctcttatggaagctgaattccagtagtcattctaaatttgttgtatgtcagcttatggtatcttttcatgtctttacattcagccaaagaggaagttccttgaaggggagaccagagggcgtgctgtgcttcttaatcctctctttcttaaccagtaagaggcattcagtagatatctgatgatactgattaatagaggggaacttttcagattcttttttttttttaaccctagtaagctttagtacaaactaaatgctgagagattatcaagtaagggattgatcatcacaagaagactcaggatgttacatcctgtaggttttatagtttcctatattgtaaaaaatatgagttatagcagcttgtctggatgtcatacaggtataaaaatcagttttataaacttgagtaaattggggcccattttagaaaaaactcttgcaggctgtgaatgccaatatataagtaaagtattaagtataatgttatttaatgtgggcaaacataaagccaggtgtaaattttttaggtttaaaatcttatagaactatacatccaaaagaaaatttcaagttaaacataatacaaagcaatacaatctaaattaacattaatttaatgtgatgaatgatattgccttgctaaaagtgggtcactacttacaatgtgcaaatggtactcatcgttagggtatagattcttttaaactatgacatacgtacactaccatgtggaacgtgatgatgtgttctctgttctaactactgggaagacttccttggcatagcacatgccatggggtcagttggctttgacttcatatagatatgccatttacttggtcagtgtcacttctatgacaagtagtatgttgtgccagtttgattataagtacaaatatgggcaatgaagtaacttggttttaaggttgttactaagctgagtaacagtgtgtggctatacaaatttttataggctatcaggaatgaaaacacaggagattgttgtagattcaagtattttagattcaagtttgaagatgctcatgcagatgtttaactgagttgtatagacctttatgtttctttctttttctctttttttttttttgagacagagtcttgctctgtcacccaagctggagtgcaatggtgtgatctcggcttactgcaacctccgcctcccaggttcaagcaattctcctgcctcagcctcccaagtagctgggattacagatgtgcaccacgacgcccagctgattttttgtattttagtagaggcggggtctcaccatgttgtcaagatggtctcaatctcctgaccttgtgatccacccacctctgcctcccaaagtgctgtgattacaggcgtgagccaccgcgcctgactgacctttatgtttcttaactttatgctatacatcagttgatatttcaaaaatttaaatggtttctatgattattctttgggctaagaaattgggcattaattgtcctcatatgtatggtttttgtggctacttcatgtagattttatttttggtggttatcaaattggaatttttttttttttttttttttttgagacggagtctcattctgtttcccaggttggagtacagtggtgcaatctcagctcactgcagcctcgacctcccaggctcaagcagtcctctcacctcagccttctaagtagctgggactacaggcacgcaccaccacacctggctagttttttgtgtttttagtagagatggggttttaccctgttggccaggctggtcttgaactcctggcctcaagtgatccacctgcctcagcctcccaaagtgctgggattagaggcatgagccaccacacctggctgaaattggaatttcattggtactgcctgtaattttatgttaatttttttttttttttgtcgtcactagcttttatctaaagcccctagagagaaaggccatgataccttgtatacaaggttataagagtatacaagggaaagggagggctgaagggaacagggtgggctggtacaagcctcattagaaataccattgagtctgtgagtaaaacatcattatatgaaaaggagatgtggttttagggtggtccaattacttttgcaccagcctaataaaattacaagtcattatcaatagagacattgtaaaacctttttttttcccaaaagaagtatcaggtatgataattacatgtctgcccaactttcgttatagattaacataacttaattgtatttaaggtacaatttaggagagttgctgaaaaatgaatctttagtattgggatgccttgattctaccctcaatagctataatggattatgtgtctgagtagattaataaaaatcttttgagcatttttcttgaactacttcactgaagattagctttttgagcatccattttaatttctcagtatataaggatcggtttatcacaactgtattgttttccctggccttgttagattatattttcatatcatgtagaaaaataggtgtattcgttctcccttgaagtcctttgtctcccaaaggaaatggttgcaatacagatgtgtcacctcttccacaggtaaagtggaatggagaagtagccagttaaatagtgcatgctcaatttggaacatttagagcatacaggaaagttatttatttggtaaatattttttaagcatttactatgtttcatgcattgtactagttgtagaggatataattgaatacaactacatgtagcccttgactttatggaactagtctagtataaagatttaagattgcctggcatggtggctcacgccactaatcccagcactttgagaggccaaggcaggattgcttgaggccagaagtttaagagtagcttggtcaacataatgagactccatctctaaaataaatagatagatagatagatagatagatagatagatagatagatagaagtagttagacaacacaaagcagtttcactcatcttgtggcaaggagttatgtatttctaatcaaatttggcaactcaagcattttcaacaaaatctacatgttttttcagaataaagtgaccaacacagaatgttacctgtaaaaatcagagcaataattgctatctaaaataattttgaaaattaagtggtactgaaaggctcatatagcaaaaatatggcctcctgtcattgtactttcctacttcccagactcaccattttcaacattttttagtagtttattttgccattttatagcatagtacctgacattttatttattcaacagacatttcttaagtacctaatacatgccattccttgtttgaagggatgctaaggatacagtggtgaacaaggcgttgtggggttgtatagagggtattcattcctaaccttgaaccaaatatttctttctgttggataatgcattaaaaattgcaaacagtttacaaacttttggagcaatggtggccttgatcataaagtagggactgcttctaccgtatacatgcttggtggtgtatttgtgatatctggctaaagtttctacatggaaattgactgactttagttttgagacttctgggaaccagtcaggcaaaatagtgaaactgtgtatcctgtttccaagagttgtcttttaaggttatctgcttcattcatttggcctgacttgctaggcaaatgcctagggtaaatatgatttgattaactataacaacaacagcaacaacaacaactttattttttagagcagtttgaggttcacagcaaaattgagcagaatgtacagagattttccctatacccgcttcccctacgcatgtgcggcctcccctactatcaacatcccccaccagagtggtttgttacaattaatgaacctacattgacacatcattatcactcaaggtccgtagtttacattagagtccactcttggtgttgtgtatgggtttggtcgattttataatgacatttatccaccattatagtgtcatacatagtaattttgctaccctaaaaatccagtgtgctccacctgttcctccttccctcctccctcatccctggcaaccactgaactttttaacatctccatagttttgccttttccagaatgtcatatcattggaatcacacagtatgcagccttttcaaatgggcttctttccgttagtaataggcatttaagtttcatcctcatcttttcatggcttgatagctcatttctttccctccctcttttcttccctgtcttccttccttcctcttctttcctgtttcctctttcttcttccttttttaagagacaaggtgtctcactctgttgcccaggctggagtgcagtggcccaatcatagctcattgcagccttgaattcctgggctcaagtgatcctcctgcgttagcctcctgagtagctgggatcacaggctccagtcattttagtgctgaataatatttcattatctggatgtaccgcctattcattcacctactgaagaatatcttggttgcttctaagttttggcaattatgagtgaagttactataaacattgtatacaagttttatgtggatgtatgttgtcatctcccttgggcagataccaaggagtgccattgttggatcatatggtaaatatatctttagttttgtacagaattctaggttggtatttttttctctctcagtcctttattttatttggagacagtctcgctatgtcgcccaggctgccatacagtggtgccatctgggctcactgaaacctccacctcccaggttcaagcgattcttgtgccttggcctcccaagtagctgggattacaggagtgcgccaccacgcctgctaatttttgtatttttagtagagacagggttttgccatgttgcccaggctggtctcaaactcctgaccttaagtgattcacccacctcaatctcccaaaatcctgggattacaggcctgagctactgtgcctgatctctctcagtactttaaagaaatatttcattccacttttcttttttttcttctttttgagatggagtctcactctgtcgcctgggctggagtgcagtggcgcgatctcagctcactgccacctccgcctcctgggttcaagtgattctcctgcctcagcctcctgaatagctgagattacaggcgcccaccaccatgcccagctaattttttgcatttttagtagagacgggggttccaccatgttggccaggctggtctcgaactcctgacctcgtgattcgcacatctcggcctcccaaattgctgggattacaggtgtgagctaccacgcctggcccactcttcttgcttacatagtttctgaggagatgtcagatgtaatttttatttttgctcttctgtaggcaagttgagttttttccccctctagcttctctcaggatttttttctttatctttgattttcagtagtttgaaaattatatgcctagctgtcagggttttttgcttgtttgtttttgttttctcaggtgtgactccagaaaggttctaaagaggagctttacaatctcttctctggggtttatggagacttcctttacccttctgtgttagccccttaaagcactgcgtcaaccttaaaagggcacaggaaagggtgtctatgccatttttatgccatttatcctgcttggtgttttctgagctttcttcatctgcggtttaatgtctcacattaatttgtagaaattctctgtcattgtttcaaatttttcttcagttcttttctctgtttcttcttctggtgttcccattatgcttttgtggttgtcgtacagttattggatattttgttccaggcttttttttttccagtctttttttccttttgcttctcggttttgtaggtgtctgttgagatactctcaagtgcagatattctttcctcagctttgtctagtttactaataagcccattaaaggcagtcttcatttctgttacagtctttttgatcagtagcatttcttttttattctttcttaaaatttctgtctttctgcttacattgcccatctgttcttgcatggtttctactttgtccattagagttcttaggatatttatcataattatttcaaatttctggtgtaacaattccaacatccctgcaacatccaagtctagtttcgatgcttactgtgtctcttccagctgtgttttttcctatttaatatgtcttataattttttcttgatagccatacatgatgcattaggtaacagaaactgctgtgagtggacctttagtaatgtggtggtaaggtgtgcatggaggggaaacattttcagtctgttagtgaacttttgtcaacttcacatgtgcttctcaagtccatcctgtaagtgggagagtagggctagagaggactgaagttgggtatatattaaatactttctcctacaaagaagcctagaggggacgcattaggggattttttttcccccagtattcactgtgatgacccttattgagctcctggaggtaaaactcacaaaactgtggttctcccccctgcccatattactacatgtccctggagtttatatctttcagacttgtctgcactgagcttccaccaatttgtcaaatacagatcaggtttccctaccacccgtgcagttgaaaacccacatacaacttttgactcctccagagcttaactactcatagcctgctattgactggaagccttgccaataacataaacagttgattaatacatattttatatgttttctgtattatatattgtattcttacaataaagagaaaagaagatgttattaagaaaatcataaggaagataaaatatatttactgttcattaagtggttcccatgggtgctggttcccatggaggttgccccttgtgagtttttgctcagggaagttgtgattctctatatttgcctgttggtctcctaatttgggagtcatcagttttccctgtgacctcacttctcttacagagttaagaacagttgttggtttttcagtttgttcagtgttttacatgttgttagaacacagtggtacttctaagtttcttaacatgctagatcagaaacctgaagtctcacctaatttggctttttatattttttcttcttttttttcttccattgctaccaaagcatttttcatctgtgtctggggtgacattagagcagaatgtgatttctaggtaaacattattgggctccctagcagaaaaatttttgaaagtagtacatgaattctgtataattaaaattttcttttcatcttaataggtataggtaataggcacggcctattttttttttgctcaacagtctaaaatagtaatttaatcacctaatagccttagttatatagttgaaagaagagttggaaatctgattcatgggttggaaatcacctgtcacatatgagttttaggcactggtcactttattttgaaacagctttggggttttttcctttttcaactcataataggctttaacagcttttagttttgtttctgtttttttaacagcatgagttgccaaatttggttatagcttcttggtacaagatgggtaaatttgctttgtgttgtgtaattactttttattttaaatgctacctcttttatgaacactaactttacactaagattaggaaaatgagaattgcatgtctgcaacaaatagctatctgtagtattaaattgtgaaaatgtagactttggattggagctggcatctcttaatatgtaattgtaacatagagtaaataagtattttgtcccttgtagggtcaaacagtacagtgcatgggcagaattagagatgtaggcttttttttttttttttttttttactggcttagagaaccgtttgatcagctaatatggaattaagtccctagggctgcccaggcacaacattaactgctattaaaggaaaatttaaaagagtattagtgaaggttaaatactgaccatggacatctggcaaaattgatgttttttttcccctccaccattgtttatagtttattgttatttatcagagaattaatgtttattttcagaatctattaccataagaaatctgtttgaggacttcgtatgtgccaggaattctactaaataatgatataatgctgaacagaattagataggatcctcacttcgttaagcttacagtctagtggtatagatcaacattaatcaaagaataacacaaatagaaagcagagcagtggttcatgggattgactgtagagaagcatgagggaagttcccaggtgatggaaaatactttatttcttaatcgtggtggttacatgtgtgcatatgtttatgaaaatatattgtacatttaaagtggatacattttatcacatgtaaattatgactctataaagttaattaaaaagaataactcaggtaaggtggtgtgtgcgcctgtagtcccagctatttctgaggcaggaagatcacttgagcccaggagtttgagttcagcatgggcaacatgagacctgtgagactttgtctctaaaaaaatttaaataaataactaagataaatgtaaaattacagctgtagtaagttctacaaaggagagttacatgggctatgacgatgtaagatagcaagaactgacattggcagggaggaaatgatgatgagtagaagtaaataagtgaagtgtggggattgatgtcaaggggacagtataaaagaaataacagcatgcgccaaggccctaaaattggaaagtccttggcaaattaaaggagtttgaaaaaggccattgtgtgcaaagcagaaaataggtactacaaggtaaaagatggagctaagcggtaggtaaggctaaaccttgtcagccattgttaaatattgaattgtatcctaagcacaactcagtggaaagcagttaaagttctttaattgggggaggcaatgaaggggtaataaaattggttatagaaatactgctctggctctagtgttgagaatgaattggagtagccagagtagattcaagaagactttagtaagattattccaacaggccaggacctgttatagggtggtggcaatggagagagatggacagaatggagagtgtatttaggaggtaaaaatgacagaacttggtgatgcactgaatgtgaaatggggaaggtgtctaggaggactactaggtttatggtttgcgtattagggtggatgatagcagtttcatttactgagacagggagccctggcagagtacccagcttttagagtgggtagggggaaggggagagtgcatctggtgttgggcattttgaagtgatttacatacaacaaactgaaggtatctttaacactgagtccagcaggttagcatatttattcagcaagcattgcacctttttttgttgtttttggggtcttcaactcctggcctcgaatcctccctccttcccccgcctctcccagcctccgcctcccaaagtgctgggatttcaggagtgagccaccgcgcctggccagcatcgcgctgtttgtgcagtgtgccctgtgctaggtcttgcagtgggtaccagtagagacataaaagtacaaaagataattggacgtttagtagagtcctgaaagggggcgggataggaagatacctaaccataagaaaaaccagcaagagcggaaaaggagctagtcctccagatcaataagttaatcacttatgtttgtgattccctgcattttgggtgattctctgtcgaggtcctcttaagtccagacttttgatataatctgcagtttgcgccatttggattcctgaagcatctttacaagccacctacattccttatggagctgtggcacaacagcaagcccacgatgtctcaccggattaataaaaatataggcgctcacgcttttgtttaccgatatagtatctcctcctcccctcactccatcaacccccacgcgacacaactttccggaagtaagcaaaatccgttatcaaggtgaaactccggggaccaggctccacagctgccataaactggatggcacgttagaagccggtgggtgtaggtgaggcacgctggcgcccgcgggcccttctccagccgctacccagtgggaatccgcggggctgaagccccgaaaccaggctgagcgtcccagagcgcaacctccctttcccccagcagcgccggcgccgcagaagccgcgtgtccccaggcgcactcccccaaggtgaacccccgccccccacggaggcggctgggtcgcgggtctgggcggggcgctccggacgccctcccgccgctgcgcacccctcccgcgagctgccagctccctcggcctctccacccaaaactggcccaaccgccaatcgtctgcctctcacctcctacagcaggtgacccatggccaatcgccaggggtctctttgccaggagccgccagggccagccaatcggggcgacccctccgccggggaggggacgggaaaggggtggggggtgaagggggtgaagggggtgtcccgggggacgggctgaacctcagtcaggaccgcctgcaccgcagtccggggatcgggtcgaggggagaagaaaaaggggtgctcgggagcagcccccggctacctcccctggaggcacagagggcgggggccttggcgaatggctttcttgctggccacttgcggagtgagtagaccccgagggtctgggagaggggccggcccctacccctgagtccccggggtcccggccgccaggccggagcgcgaatgtcgtgctcaccctgcctccttcccgccgccccctgggctttttgatgacaagcttcaaaactgcaaagaagatgaacagagaaagaaaattgaaactctcaaagagacaacaaatagcatggtagaatcaattaaacactgcattgtgttgctgcagattgccaaaagtactattaatcccgtagatgcaatatatcaacctagtcctttggaacctgtgatcagcacaatgccttcccagactgtgttacctccagaacctgttcagttgtgtaagtcagagcagcgtccatcttccctaccagttggacctgtgttggctaccttgggacatcatcagactcctacaccaaatagtacaggcagtggccattcaccaccgagtagcagtctcacttctccaagccacgtgaacttgtctccaaatacagtcccagagttctcttactccagcagtgaagatgaattttatgatgctgatgaattccatcaaagtggctcatccccaaagcgcttaatagattcttctggatctgcctcagtcctgacacacagcagctcgggaaatagtctaaaacgcccagataccacagaatcacttaattcttccttgtccaatggaacaagtgatgctgacctgtttgattcacatgatgacagagatgatgatgcggaggcagggtctgtggaggagcacaagagcgttatcatgcatctcttgtcgcaggttagacttggaatggatcttactaaggtagttcttccaacgtttattcttgaaagaagatctcttttagaaatgtatgcagacttttttgcacatccggacctgtttgtgagcattagtgaccagaaggatcccaaggatcgaatggttcaggttgtgaaatggtacctctcagcctttcatgcgggaaggaaaggatcagttgccaaaaagccatacaatcccattttgggcgagatttttcagtgtcattggacattaccaaatgatactgaagagaacacagaactagtttcagaaggaccagttccctgggtttccaaaaacagtgtaacatttgtggctgagcaggtttcccatcatccacccatttcagccttttatgctgagtgttttaacaagaagatacaattcaatgctcatatctggaccaaatcaaaattccttgggatgtcaattggggtgcacaacatagggcagggctgtgtctcatgtctagactatgatgaacattacattctcacattccccaatggctatggaaggcaagtgtgtccatttcctctgatcagcagtagactctgctgttccttgagacatgccccttccccctcttcctcttaactgtcaaccttacctaaaaacttttgattttgcaggtctatcctcacagtgccctgggtggaattaggaggagaatgcaatattaattgttccaaaacaggctatagtgcaaatatcatcttccacactaaacccttctatgggggcaagaagcacagaattactgccgagattttttctccaaatgacaagaagtctttttgctcaattgaaggggaatggaatggtgtgatgtatgcaaaatatgcaacaggggaaaatacagtctttgtagataccaagaagttgcctataatcaagaagaaagtgaggaagttggaagatcagaacgagtatgaatcccgcagcctttggaaggatgtcactttcaacttaaaaatcagagacattgatgcagcaactgaagcaaagcacaggcttgaagaaagacaaagagcagaagcccgagaaaggaaggagaaggaaattcagtgggagacaaggttatttcatgaagatggagaatgctgggtttatgatgaaccattactgaaacgtcttggtgctgccaagcattaggttggaagatgcaaagtttatacctgatgatcagggcagtaggcataattcagcaacaaacaatcttcctttgggagaaacctgttcattccaatcttctaattacagtggttcctatctcagggatactggactttctgacgcagatgaacaattaaggggaaaagcttcccttttccctctgtggcagttacgattttgacttcagtcctgagaaaaacttcaggttttgaaaatcagatgatgtcttctccttttccaaacaccacacgttgaaagcatttataaatccaagtctgaaactctgcgctctagtactgctgttaagatacacaacttgtttcttagttcatataatctcgggatacacacacacacacacatatatatacacacacatacgtatacacacacatacatatatataaatatacctgatgccagatttttttcataaatattctgcctactgtaaatatgggttcctctgagttgttttagaaaattagcgcaatgtattaaaatcaagtgttaggaaatttcatggtcttacctacaataacttttattttggaattgaactattattaaattgtatctaatcctggaaaaaaaaaaaaaaaaaaaaaaaaaaaaaaaacaaaaaaaagaacaaaataaaaaaaaagaaaacaacaaaaaaaaaaacaacaaaaaacaaaagagagggaggaggcgcaacaagcacaacgaagcactaccccgggagggggcacgccgcacacagaacgccggagcggcacgcccggaccccactatctagaaacgacaaagcgtgtgcccacacaaaacaaaagtaaaaagagcgcagacttatcaatcagacacacgccaagcgacgagacgcggccgcagatcctcaacaaacacagcacactgaatagcaaggtggagagaaacacaacctggtggctgacgcagcgacacacatcctgcgaaggaaaagacgagacactcacactaccatgggagagtggaggagcaaaacaacacacaggcgagaagaacaacaaaaacccagccacaccagcaaacataaacacgccaccatgacaacggcgacaacacaacaacgaccacgtctcaagcccgagtcactaactgagcacagacaacaccgcacacacaactacaatcagccgcggaacaaaggacaactaactacgaacgacaaccgactgatcagagcagagacaaacactcaactccaaccgagggagcgatcaaagaacaaataaggan

SEQ ID NO: 735137 - DNA, 18687 bp, Homo sapiens
gtaagggtctttacatggtttccagatagttcattagttgttgctttctttttttgtctgttttctgttttttttttttaaataactgtggtatgatgtaataggaacttataatttctgagttgcttatttttcctttacagttatagtaaagttatactcatttattttctcctgctttctgcagagtaaaatactgatttttgtctagaaacaagacagtgcaagacaatgttgaaagtgaaattctatgttaaaatatgccagatttattttaagaatttaatatctgtagtcagttatcaatacaaccaaattacataattatgcatgataataggtaaatactgagaagttcacctcattttcttgttaaaggatttggctattaccgtatgtgtcagttagtactcttttgtatggtagtgaaagaaaactcaacccaaactgattcatgaagaagaaagtaaatctggttagatgtggtttgaattaggtaattcatgtcatgaggactcagatctcccatctctatttctacgttccacttttgcattggcttcattttcggttaggttctcccttggtggtggtaaggtggttgtagcaatgtcagcctcccatttttggaaccgagtccataggaggctattctttctagaccttaataggagtaacacaattattgctcatcaccctagctttggccatgtgtcaaatcctgaccagtcacaatttcacagtcatagattctaccctggagctgggatgttactggcctcactagaaacacattgctgatagggtagaaggtgtgttcatcctacccaacccgacccgcaccaaagtcagaatagggaaaaacagatgttgggtgacatgcaactaacgtctgccgtactacactgaagatatttttctatgtttattctccagtgaaagagcttatatttgtggtacataggggattttgttttaatttagaaaatttaattgtagaaaacatgttttataaccctttctctgtactttgttctatatcaggaattgacttgattagataaggtgacatagggtatcttaggccctacaagatagtaaaccccccatcacttgaaagtattcagtagaggcttaaaaaacattattaaaggatgtggttattaggggactttaagaaatgaatatgaaattgaagtaggaaatctttaagctactctgtgagttatgccttttaaaagcaatttgtaattcctgtagatttcttttaaatttaggcagtttcataaatgactatagcatcattttagcaaatttgtgatcctgtaagaggaggataagtgttttttgtttgtttgtttgttttttgtttttttgagacagagtctcactttgtaccccagaaagtaaatctagttagatgtggtttgtctcggctcactgcaacctccaccccgtgcgttctagcaattctcctgcctcagccaccacacctggcctaagaggggaggataagtgttttagtgatcatattagactgaatgtggcagatgagatttcccgcccccccattgttggttagactgacattcaacattcaacaagagccacctgcccttgtaggcatttctgccactatacccctacataaacctagagtgctattgcttacttgctttccttcaaatacattttttcatttgtggcctccacattcttgtgtgtgatgtcctttctctgtgaaatgtcttctaccctttttttcaaagcctagtttagaactgacctcttctatgaaccctctgccgactggcctttccttccccagtcccccaagttcaaaatgatctctttcctttgaatactatagtatttgcacaattcactatctccttatcatattcttcttgtttatttgttatcagctgatgttgacatcataagttcaggttcctaactagatccaatattggaatttttcagcttttgctaagaagagagcttgtatgtctttgggaataatgggcagaaaaagataactttgagaagtcttagacttctaatagctttgatatttaaaagtacatgtaatacaagaggtttttttcctacatttaatgcatggagaagataggacatttagaaatatggaattaatgttcatttgactggcaaaagattattttctcagatgtagtgaagtgtggtaaagaacttcactctagagccagaatgtctgtgtttgtatcccagagcccaccacttacatttaaccattaacattcaacttactgtctctgagtttcagtggcctcatctataaaatgaggataataagagtacctacttcatagagttgttttagtggttaaataaactaacgtaaacttgctagaacttgataaactaatattggatgagaactggttgaaataatgcctggctatagtaaaaacttggtaaatgttagttgccattacaatgcaactactgttcctaccattccctctgccagtgcctggtattcagtagcactcagtaaatgttagttaaatgaagaaataactgaaggaatgaatgaacaaatggttgatgtagagattgcttttccattgttgtttattgaatattttgagatgtataacatactgtctgttaggcactgtgggatgggcactcacggagctgtcttccaaaggggtataggagaggagacgcagtgatctcagcaacctacctttaaaacatatcctagtatctactgccatgttaggttctcttcttttgctttttttaaaaaaaaattctcacaaaactccccccacccacttcagtttatagatgaggaagctcctactacataatagtgcttcccagtctaattcttgacctcattgtatttatatgtcctttttttttttgacagagtctcactcattgcagtggcacaatcacagctcactgcaacctctgcctcccctgctcaagtgatcctcccacctcaacctcctgagtagctgggactacaggcatgcaccaccacgcctggctaatttttgtatttttttgtagagatgcggttttgccatgttggccaggctggtctcgaactcctgggctcaagccatctgcccactttggcctctgagagtgctgagattataggcatgagccaccattcccagccatgttttcctttttcattgaactttatctactttagccattaaactccactccattggtcttgtcattactaagagctgaaccacctgcaaaatattaagttaaaaagcgttttctttgacaacagttttcttttcttcatcttcctctatcactttacttctgaacttttattctctcattttgatctgacccctacttctctgtttttcctggccatttagtactttcttgttttgctcatcccatttcccagtggagaccttctggtctgctgctttatcactggttttgttagaagacatacaaatggcaaggaggtatatgaaaaggtgcctaacatcattgatcatcagagaaatgcagaccaaaactacaatgagatatcatttcaccccagttaaaatggctttttttttttttttccaaaagacaggcaataacaaagtactggtgaggatgtggagtaaagggaacccacatacactattagtaggaatgtaaattagtacagccactgtggagaacagtttgaaggttcctcaaaaaactaaaaatagagctaccatataatccagcaatcccactgctaggtatatatccaaaagaaaggcaatcaatatacggaagagatacctgcacacccaggtttattgcagcactattcacaatagccaagatttggaagcaacccaggtgtccaacagatgaatggataaagaaaacatggtatataaacacaatggaatactattcagctgtgaaaaagaatgaaatcctgtcatttgcaatcctgtcttgaatagaactggaggtcatgatgttaagtgaaataagacaggcacaaacttcacatgttctcacttatttgtgggagctaaaaattaaaacaatcgaactcatggagctagagaatagaattatggttaccagaggctggaagggtggttgggcgtataagtgtagggggagtggggatggttaatgggtacaaaaaaatgagaacgaataagatctacttgataacacaacagggtgactatagtcaacagtaattatacatttaaaaataactagaagagtataattagattgtaacacaaaagataaatgcttgaggtgatggatacctatttaccctgatgtgattattacttatttcatgcctatatcaaaatatttatactccaaaaatatatatacctactatgtacccacaaaaatttaaaaatttatatattgtttttgctatcacctttagaatttcttgtcattggatagttcgtctgtataccattctggtcttcattccccagggcccccgttgtctgatttttctgcttctagaactgttagaggtcacaaaagcaagatggttgtatctatcacaatttttgtctgactttaactgggtatctgttacgatttagtagtcatcttactgacttcttgttggtttccaattgaatcctcacagtagactgttttcattgtaatcagtatcgaattatagcctgttcccttcttcataaatgaaggctttcttcttcaacagttcttagtgacttcacctgtactttatttctctgctttgaatatttcgaagaaaacatattcttgctctttcccaaggttaacactacatacattaccttgaccacaggatgttttcttgcagattgtgacctaattccatcacccttcagcagcccccaccgttttcatggattcagctaaaccttctgtaagatgactctttttccccctaatctttatatctcttttgatatgtagctttagtctcactttttttccttttggattttgccagttagatgtctccctggaattccacttcagcatggctaagactaagcttgtcttctctttcctccccaaagcaaattgtaattaggatagactgaaggtgacagaagataactaagatcttcttcatcctttcggctcttatggaagctgaattccagtagtcattctaaatttgttgtatgtcagcttatggtatcttttcatgtctttacattcagccaaagaggaagttccttgaaggggagaccagagggcgtgctgtgcttcttaatcctctctttcttaaccagtaagaggcattcagtagatatctgatgatactgattaatagaggggaacttttcagattcttttttttttttaaccctagtaagctttagtacaaactaaatgctgagagattatcaagtaagggattgatcatcacaagaagactcaggatgttacatcctgtaggttttatagtttcctatattgtaaaaaatatgagttatagcagcttgtctggatgtcatacaggtataaaaatcagttttataaacttgagtaaattggggcccattttagaaaaaactcttgcaggctgtgaatgccaatatataagtaaagtattaagtataatgttatttaatgtgggcaaacataaagccaggtgtaaattttttaggtttaaaatcttatagaactatacatccaaaagaaaatttcaagttaaacataatacaaagcaatacaatctaaattaacattaatttaatgtgatgaatgatattgccttgctaaaagtgggtcactacttacaatgtgcaaatggtactcatcgttagggtatagattcttttaaactatgacatacgtacactaccatgtggaacgtgatgatgtgttctctgttctaactactgggaagacttccttggcatagcacatgccatggggtcagttggctttgacttcatatagatatgccatttacttggtcagtgtcacttctatgacaagtagtatgttgtgccagtttgattataagtacaaatatgggcaatgaagtaacttggttttaaggttgttactaagctgagtaacagtgtgtggctatacaaatttttataggctatcaggaatgaaaacacaggagattgttgtagattcaagtattttagattcaagtttgaagatgctcatgcagatgtttaactgagttgtatagacctttatgtttctttctttttctctttttttttttttgagacagagtcttgctctgtcacccaagctggagtgcaatggtgtgatctcggcttactgcaacctccgcctcccaggttcaagcaattctcctgcctcagcctcccaagtagctgggattacagatgtgcaccacgacgcccagctgattttttgtattttagtagaggcggggtctcaccatgttgtcaagatggtctcaatctcctgaccttgtgatccacccacctctgcctcccaaagtgctgtgattacaggcgtgagccaccgcgcctgactgacctttatgtttcttaactttatgctatacatcagttgatatttcaaaaatttaaatggtttctatgattattctttgggctaagaaattgggcattaattgtcctcatatgtatggtttttgtggctacttcatgtagattttatttttggtggttatcaaattggaatttttttttttttttttttttttgagacggagtctcattctgtttcccaggttggagtacagtggtgcaatctcagctcactgcagcctcgacctcccaggctcaagcagtcctctcacctcagccttctaagtagctgggactacaggcacgcaccaccacacctggctagttttttgtgtttttagtagagatggggttttaccctgttggccaggctggtcttgaactcctggcctcaagtgatccacctgcctcagcctcccaaagtgctgggattagaggcatgagccaccacacctggctgaaattggaatttcattggtactgcctgtaattttatgttaatttttttttttttttgtcgtcactagcttttatctaaagcccctagagagaaaggccatgataccttgtatacaaggttataagagtatacaagggaaagggagggctgaagggaacagggtgggctggtacaagcctcattagaaataccattgagtctgtgagtaaaacatcattatatgaaaaggagatgtggttttagggtggtccaattacttttgcaccagcctaataaaattacaagtcattatcaatagagacattgtaaaacctttttttttcccaaaagaagtatcaggtatgataattacatgtctgcccaactttcgttatagattaacataacttaattgtatttaaggtacaatttaggagagttgctgaaaaatgaatctttagtattgggatgccttgattctaccctcaatagctataatggattatgtgtctgagtagattaataaaaatcttttgagcatttttcttgaactacttcactgaagattagctttttgagcatccattttaatttctcagtatataaggatcggtttatcacaactgtattgttttccctggccttgttagattatattttcatatcatgtagaaaaataggtgtattcgttctcccttgaagtcctttgtctcccaaaggaaatggttgcaatacagatgtgtcacctcttccacaggtaaagtggaatggagaagtagccagttaaatagtgcatgctcaatttggaacatttagagcatacaggaaagttatttatttggtaaatattttttaagcatttactatgtttcatgcattgtactagttgtagaggatataattgaatacaactacatgtagcccttgactttatggaactagtctagtataaagatttaagattgcctggcatggtggctcacgccactaatcccagcactttgagaggccaaggcaggattgcttgaggccagaagtttaagagtagcttggtcaacataatgagactccatctctaaaataaatagatagatagatagatagatagatagatagatagatagatagaagtagttagacaacacaaagcagtttcactcatcttgtggcaaggagttatgtatttctaatcaaatttggcaactcaagcattttcaacaaaatctacatgttttttcagaataaagtgaccaacacagaatgttacctgtaaaaatcagagcaataattgctatctaaaataattttgaaaattaagtggtactgaaaggctcatatagcaaaaatatggcctcctgtcattgtactttcctacttcccagactcaccattttcaacattttttagtagtttattttgccattttatagcatagtacctgacattttatttattcaacagacatttcttaagtacctaatacatgccattccttgtttgaagggatgctaaggatacagtggtgaacaaggcgttgtggggttgtatagagggtattcattcctaaccttgaaccaaatatttctttctgttggataatgcattaaaaattgcaaacagtttacaaacttttggagcaatggtggccttgatcataaagtagggactgcttctaccgtatacatgcttggtggtgtatttgtgatatctggctaaagtttctacatggaaattgactgactttagttttgagacttctgggaaccagtcaggcaaaatagtgaaactgtgtatcctgtttccaagagttgtcttttaaggttatctgcttcattcatttggcctgacttgctaggcaaatgcctagggtaaatatgatttgattaactataacaacaacagcaacaacaacaactttattttttagagcagtttgaggttcacagcaaaattgagcagaatgtacagagattttccctatacccgcttcccctacgcatgtgcggcctcccctactatcaacatcccccaccagagtggtttgttacaattaatgaacctacattgacacatcattatcactcaaggtccgtagtttacattagagtccactcttggtgttgtgtatgggtttggtcgattttataatgacatttatccaccattatagtgtcatacatagtaattttgctaccctaaaaatccagtgtgctccacctgttcctccttccctcctccctcatccctggcaaccactgaactttttaacatctccatagttttgccttttccagaatgtcatatcattggaatcacacagtatgcagccttttcaaatgggcttctttccgttagtaataggcatttaagtttcatcctcatcttttcatggcttgatagctcatttctttccctccctcttttcttccctgtcttccttccttcctcttctttcctgtttcctctttcttcttccttttttaagagacaaggtgtctcactctgttgcccaggctggagtgcagtggcccaatcatagctcattgcagccttgaattcctgggctcaagtgatcctcctgcgttagcctcctgagtagctgggatcacaggctccagtcattttagtgctgaataatatttcattatctggatgtaccgcctattcattcacctactgaagaatatcttggttgcttctaagttttggcaattatgagtgaagttactataaacattgtatacaagttttatgtggatgtatgttgtcatctcccttgggcagataccaaggagtgccattgttggatcatatggtaaatatatctttagttttgtacagaattctaggttggtatttttttctctctcagtcctttattttatttggagacagtctcgctatgtcgcccaggctgccatacagtggtgccatctgggctcactgaaacctccacctcccaggttcaagcgattcttgtgccttggcctcccaagtagctgggattacaggagtgcgccaccacgcctgctaatttttgtatttttagtagagacagggttttgccatgttgcccaggctggtctcaaactcctgaccttaagtgattcacccacctcaatctcccaaaatcctgggattacaggcctgagctactgtgcctgatctctctcagtactttaaagaaatatttcattccacttttcttttttttcttctttttgagatggagtctcactctgtcgcctgggctggagtgcagtggcgcgatctcagctcactgccacctccgcctcctgggttcaagtgattctcctgcctcagcctcctgaatagctgagattacaggcgcccaccaccatgcccagctaattttttgcatttttagtagagacgggggttccaccatgttggccaggctggtctcgaactcctgacctcgtgattcgcacatctcggcctcccaaattgctgggattacaggtgtgagctaccacgcctggcccactcttcttgcttacatagtttctgaggagatgtcagatgtaatttttatttttgctcttctgtaggcaagttgagttttttccccctctagcttctctcaggatttttttctttatctttgattttcagtagtttgaaaattatatgcctagctgtcagggttttttgcttgtttgtttttgttttctcaggtgtgactccagaaaggttctaaagaggagctttacaatctcttctctggggtttatggagacttcctttacccttctgtgttagccccttaaagcactgcgtcaaccttaaaagggcacaggaaagggtgtctatgccatttttatgccatttatcctgcttggtgttttctgagctttcttcatctgcggtttaatgtctcacattaatttgtagaaattctctgtcattgtttcaaatttttcttcagttcttttctctgtttcttcttctggtgttcccattatgcttttgtggttgtcgtacagttattggatattttgttccaggcttttttttttccagtctttttttccttttgcttctcggttttgtaggtgtctgttgagatactctcaagtgcagatattctttcctcagctttgtctagtttactaataagcccattaaaggcagtcttcatttctgttacagtctttttgatcagtagcatttcttttttattctttcttaaaatttctgtctttctgcttacattgcccatctgttcttgcatggtttctactttgtccattagagttcttaggatatttatcataattatttcaaatttctggtgtaacaattccaacatccctgcaacatccaagtctagtttcgatgcttactgtgtctcttccagctgtgttttttcctatttaatatgtcttataattttttcttgatagccatacatgatgcattaggtaacagaaactgctgtgagtggacctttagtaatgtggtggtaaggtgtgcatggaggggaaacattttcagtctgttagtgaacttttgtcaacttcacatgtgcttctcaagtccatcctgtaagtgggagagtagggctagagaggactgaagttgggtatatattaaatactttctcctacaaagaagcctagaggggacgcattaggggattttttttcccccagtattcactgtgatgacccttattgagctcctggaggtaaaactcacaaaactgtggttctcccccctgcccatattactacatgtccctggagtttatatctttcagacttgtctgcactgagcttccaccaatttgtcaaatacagatcaggtttccctaccacccgtgcagttgaaaacccacatacaacttttgactcctccagagcttaactactcatagcctgctattgactggaagccttgccaataacataaacagttgattaatacatattttatatgttttctgtattatatattgtattcttacaataaagagaaaagaagatgttattaagaaaatcataaggaagataaaatatatttactgttcattaagtggttcccatgggtgctggttcccatggaggttgccccttgtgagtttttgctcagggaagttgtgattctctatatttgcctgttggtctcctaatttgggagtcatcagttttccctgtgacctcacttctcttacagagttaagaacagttgttggtttttcagtttgttcagtgttttacatgttgttagaacacagtggtacttctaagtttcttaacatgctagatcagaaacctgaagtctcacctaatttggctttttatattttttcttcttttttttcttccattgctaccaaagcatttttcatctgtgtctggggtgacattagagcagaatgtgatttctaggtaaacattattgggctccctagcagaaaaatttttgaaagtagtacatgaattctgtataattaaaattttcttttcatcttaataggtataggtaataggcacggcctattttttttttgctcaacagtctaaaatagtaatttaatcacctaatagccttagttatatagttgaaagaagagttggaaatctgattcatgggttggaaatcacctgtcacatatgagttttaggcactggtcactttattttgaaacagctttggggttttttcctttttcaactcataataggctttaacagcttttagttttgtttctgtttttttaacagcatgagttgccaaatttggttatagcttcttggtacaagatgggtaaatttgctttgtgttgtgtaattactttttattttaaatgctacctcttttatgaacactaactttacactaagattaggaaaatgagaattgcatgtctgcaacaaatagctatctgtagtattaaattgtgaaaatgtagactttggattggagctggcatctcttaatatgtaattgtaacatagagtaaataagtattttgtcccttgtagggtcaaacagtacagtgcatgggcagaattagagatgtaggcttttttttttttttttttttttactggcttagagaaccgtttgatcagctaatatggaattaagtccctagggctgcccaggcacaacattaactgctattaaaggaaaatttaaaagagtattagtgaaggttaaatactgaccatggacatctggcaaaattgatgttttttttcccctccaccattgtttatagtttattgttatttatcagagaattaatgtttattttcagaatctattaccataagaaatctgtttgaggacttcgtatgtgccaggaattctactaaataatgatataatgctgaacagaattagataggatcctcacttcgttaagcttacagtctagtggtatagatcaacattaatcaaagaataacacaaatagaaagcagagcagtggttcatgggattgactgtagagaagcatgagggaagttcccaggtgatggaaaatactttatttcttaatcgtggtggttacatgtgtgcatatgtttatgaaaatatattgtacatttaaagtggatacattttatcacatgtaaattatgactctataaagttaattaaaaagaataactcaggtaaggtggtgtgtgcgcctgtagtcccagctatttctgaggcaggaagatcacttgagcccaggagtttgagttcagcatgggcaacatgagacctgtgagactttgtctctaaaaaaatttaaataaataactaagataaatgtaaaattacagctgtagtaagttctacaaaggagagttacatgggctatgacgatgtaagatagcaagaactgacattggcagggaggaaatgatgatgagtagaagtaaataagtgaagtgtggggattgatgtcaaggggacagtataaaagaaataacagcatgcgccaaggccctaaaattggaaagtccttggcaaattaaaggagtttgaaaaaggccattgtgtgcaaagcagaaaataggtactacaaggtaaaagatggagctaagcggtaggtaaggctaaaccttgtcagccattgttaaatattgaattgtatcctaagcacaactcagtggaaagcagttaaagttctttaattgggggaggcaatgaaggggtaataaaattggttatagaaatactgctctggctctagtgttgagaatgaattggagtagccagagtagattcaagaagactttagtaagattattccaacaggccaggacctgttatagggtggtggcaatggagagagatggacagaatggagagtgtatttaggaggtaaaaatgacagaacttggtgatgcactgaatgtgaaatggggaaggtgtctaggaggactactaggtttatggtttgcgtattagggtggatgatagcagtttcatttactgagacagggagccctggcagagtacccagcttttagagtgggtagggggaaggggagagtgcatctggtgttgggcattttgaagtgatttacatacaacaaactgaaggtatctttaacactgagtccagcaggttagcatatttattcagcaagcattgcacctttttttgttgtttttggggtcttcaactcctggcctcgaatcctccctccttcccccgcctctcccagcctccgcctcccaaagtgctgggatttcaggagtgagccaccgcgcctggccagcatcgcgctgtttgtgcagtgtgccctgtgctaggtcttgcagtgggtaccagtagagacataaaagtacaaaagataattggacgtttagtagagtcctgaaagggggcgggataggaagatacctaaccataagaaaaaccagcaagagcggaaaaggagctagtcctccagatcaataagttaatcacttatgtttgtgattccctgcattttgggtgattctctgtcgaggtcctcttaagtccagacttttgatataatctgcagtttgcgccatttggattcctgaagcatctttacaagccacctacattccttatggagctgtggcacaacagcaagcccacgatgtctcaccggattaataaaaatataggcgctcacgcttttgtttaccgatatagtatctcctcctcccctcactccatcaacccccacgcgacacaactttccggaagtaagcaaaatccgttatcaaggtgaaactccggggaccaggctccacagctgccataaactggatggcacgttagaagccggtgggtgtaggtgaggcacgctggcgcccgcgggcccttctccagccgctacccagtgggaatccgcggggctgaagccccgaaaccaggctgagcgtcccagagcgcaacctccctttcccccagcagcgccggcgccgcagaagccgcgtgtccccaggcgcactcccccaaggtgaacccccgccccccacggaggcggctgggtcgcgggtctgggcggggcgctccggacgccctcccgccgctgcgcacccctcccgcgagctgccagctccctcggcctctccacccaaaactggcccaaccgccaatcgtctgcctctcacctcctacagcaggtgacccatggccaatcgccaggggtctctttgccaggagccgccagggccagccaatcggggcgacccctccgccggggaggggacgggaaaggggtggggggtgaagggggtgaagggggtgtcccgggggacgggctgaacctcagtcaggaccgcctgcaccgcagtccggggatcgggtcgaggggagaagaaaaaggggtgctcgggagcagcccccggctacctcccctggaggcacagagggcgggggccttggcgaatggctttcttgctggccacttgcggagtgagtagaccccgagggtctgggagaggggccggcccctacccctgagtccccggggtcccggccgccaggccggagcgcgaatgtcgtgctcaccctgcctccttcccgccgccccctgggctttttgatgacaagcttcaaaactgcaaagaagatgaacagagaaagaaaattgaaactctcaaagagacaacaaatagcatggtagaatcaattaaacactgcattgtgttgctgcagattgccaaaagtactattaatcccgtagatgcaatatatcaacctagtcctttggaacctgtgatcagcacaatgccttcccagactgtgttacctccagaacctgttcagttgtgtaagtcagagcagcgtccatcttccctaccagttggacctgtgttggctaccttgggacatcatcagactcctacaccaaatagtacaggcagtggccattcaccaccgagtagcagtctcacttctccaagccacgtgaacttgtctccaaatacagtcccagagttctcttactccagcagtgaagatgaattttatgatgctgatgaattccatcaaagtggctcatccccaaagcgcttaatagattcttctggatctgcctcagtcctgacacacagcagctcgggaaatagtctaaaacgcccagataccacagaatcacttaattcttccttgtccaatggaacaagtgatgctgacctgtttgattcacatgatgacagagatgatgatgcggaggcagggtctgtggaggagcacaagagcgttatcatgcatctcttgtcgcaggttagacttggaatggatcttactaaggtagttcttccaacgtttattcttgaaagaagatctcttttagaaatgtatgcagacttttttgcacatccggacctgtttgtgagcattagtgaccagaaggatcccaaggatcgaatggttcaggttgtgaaatggtacctctcagcctttcatgcgggaaggaaaggatcagttgccaaaaagccatacaatcccattttgggcgagatttttcagtgtcattggacattaccaaatgatactgaagagaacacagaactagtttcagaaggaccagttccctgggtttccaaaaacagtgtaacatttgtggctgagcaggtttcccatcatccacccatttcagccttttatgctgagtgttttaacaagaagatacaattcaatgctcatatctggaccaaatcaaaattccttgggatgtcaattggggtgcacaacatagggcagggctgtgtctcatgtctagactatgatgaacattacattctcacattccccaatggctatggaaggcaagtgtgtccatttcctctgatcagcagtagactctgctgttccttgagacatgccccttccccctcttcctcttaactgtcaaccttacctaaaaacttttgattttgcaggtctatcctcacagtgccctgggtggaattaggaggagaatgcaatattaattgttccaaaacaggctatagtgcaaatatcatcttccacactaaacccttctatgggggcaagaagcacagaattactgccgagattttttctccaaatgacaagaagtctttttgctcaattgaaggggaatggaatggtgtgatgtatgcaaaatatgcaacaggggaaaatacagtctttgtagataccaagaagttgcctataatcaagaagaaagtgaggaagttggaagatcagaacgagtatgaatcccgcagcctttggaaggatgtcactttcaacttaaaaatcagagacattgatgcagcaactgaagcaaagcacaggcttgaagaaagacaaagagcagaagcccgagaaaggaaggagaaggaaattcagtgggagacaaggttatttcatgaagatggagaatgctgggtttatgatgaaccattactgaaacgtcttggtgctgccaagcattaggttggaagatgcaaagtttatacctgatgatcagggcagtaggcataattcagcaacaaacaatcttcctttgggagaaacctgttcattccaatcttctaattacagtggttcctatctcagggatactggactttctgacgcagatgaacaattaaggggaaaagcttcccttttccctctgtggcagttacgattttgacttcagtcctgagaaaaacttcaggttttgaaaatcagatgatgtcttctccttttccaaacaccacacgttgaaagcatttataaatccaagtctgaaactctgcgctctagtactgctgttaagatacacaacttgtttcttagttcatataatctcgggatacacacacacacacacatatatatacacacacatacgtatacacacacatacatatatataaatatacctgatgccagatttttttcataaatattctgcctactgtaaatatgggttcctctgagttgttttagaaaattagcgcaatgtattaaaatcaagtgttaggaaatttcatggtcttacctacaataacttttattttggaattgaactattattaaattgtatctaatcctggaaaaaaaacaaaaatgctagtaaaatgataatgtaccgaaattggagaaatattcaattgtaactcacttttaaaaataataaaaccttagggggggtcccggtacaaatttccccttatagagggcggttttaaatttaattggcggcttttaacaacgtt

SEQ ID NO: 735138 - DNA, 18477 bp, Homo sapiens
  misc_feature (18401)..(18401): n is a, c, g, or t
  misc_feature (18412)..(18412): n is a, c, g, or t
  misc_feature (18417)..(18417): n is a, c, g, or t
  misc_feature (18420)..(18420): n is a, c, g, or t
  misc_feature (18422)..(18422): n is a, c, g, or t
gtaagggtctttacatggtttccagatagttcattagttgttgctttctttttttgtctgttttctgttttttttttttaaataactgtggtatgatgtaataggaacttataatttctgagttgcttatttttcctttacagttatagtaaagttatactcatttattttctcctgctttctgcagagtaaaatactgatttttgtctagaaacaagacagtgcaagacaatgttgaaagtgaaattctatgttaaaatatgccagatttattttaagaatttaatatctgtagtcagttatcaatacaaccaaattacataattatgcatgataataggtaaatactgagaagttcacctcattttcttgttaaaggatttggctattaccgtatgtgtcagttagtactcttttgtatggtagtgaaagaaaactcaacccaaactgattcatgaagaagaaagtaaatctggttagatgtggtttgaattaggtaattcatgtcatgaggactcagatctcccatctctatttctacgttccacttttgcattggcttcattttcggttaggttctcccttggtggtggtaaggtggttgtagcaatgtcagcctcccatttttggaaccgagtccataggaggctattctttctagaccttaataggagtaacacaattattgctcatcaccctagctttggccatgtgtcaaatcctgaccagtcacaatttcacagtcatagattctaccctggagctgggatgttactggcctcactagaaacacattgctgatagggtagaaggtgtgttcatcctacccaacccgacccgcaccaaagtcagaatagggaaaaacagatgttgggtgacatgcaactaacgtctgccgtactacactgaagatatttttctatgtttattctccagtgaaagagcttatatttgtggtacataggggattttgttttaatttagaaaatttaattgtagaaaacatgttttataaccctttctctgtactttgttctatatcaggaattgacttgattagataaggtgacatagggtatcttaggccctacaagatagtaaaccccccatcacttgaaagtattcagtagaggcttaaaaaacattattaaaggatgtggttattaggggactttaagaaatgaatatgaaattgaagtaggaaatctttaagctactctgtgagttatgccttttaaaagcaatttgtaattcctgtagatttcttttaaatttaggcagtttcataaatgactatagcatcattttagcaaatttgtgatcctgtaagaggaggataagtgttttttgtttgtttgtttgttttttgtttttttgagacagagtctcactttgtaccccagaaagtaaatctagttagatgtggtttgtctcggctcactgcaacctccaccccgtgcgttctagcaattctcctgcctcagccaccacacctggcctaagaggggaggataagtgttttagtgatcatattagactgaatgtggcagatgagatttcccgcccccccattgttggttagactgacattcaacattcaacaagagccacctgcccttgtaggcatttctgccactatacccctacataaacctagagtgctattgcttacttgctttccttcaaatacattttttcatttgtggcctccacattcttgtgtgtgatgtcctttctctgtgaaatgtcttctaccctttttttcaaagcctagtttagaactgacctcttctatgaaccctctgccgactggcctttccttccccagtcccccaagttcaaaatgatctctttcctttgaatactatagtatttgcacaattcactatctccttatcatattcttcttgtttatttgttatcagctgatgttgacatcataagttcaggttcctaactagatccaatattggaatttttcagcttttgctaagaagagagcttgtatgtctttgggaataatgggcagaaaaagataactttgagaagtcttagacttctaatagctttgatatttaaaagtacatgtaatacaagaggtttttttcctacatttaatgcatggagaagataggacatttagaaatatggaattaatgttcatttgactggcaaaagattattttctcagatgtagtgaagtgtggtaaagaacttcactctagagccagaatgtctgtgtttgtatcccagagcccaccacttacatttaaccattaacattcaacttactgtctctgagtttcagtggcctcatctataaaatgaggataataagagtacctacttcatagagttgttttagtggttaaataaactaacgtaaacttgctagaacttgataaactaatattggatgagaactggttgaaataatgcctggctatagtaaaaacttggtaaatgttagttgccattacaatgcaactactgttcctaccattccctctgccagtgcctggtattcagtagcactcagtaaatgttagttaaatgaagaaataactgaaggaatgaatgaacaaatggttgatgtagagattgcttttccattgttgtttattgaatattttgagatgtataacatactgtctgttaggcactgtgggatgggcactcacggagctgtcttccaaaggggtataggagaggagacgcagtgatctcagcaacctacctttaaaacatatcctagtatctactgccatgttaggttctcttcttttgctttttttaaaaaaaaattctcacaaaactccccccacccacttcagtttatagatgaggaagctcctactacataatagtgcttcccagtctaattcttgacctcattgtatttatatgtcctttttttttttgacagagtctcactcattgcagtggcacaatcacagctcactgcaacctctgcctcccctgctcaagtgatcctcccacctcaacctcctgagtagctgggactacaggcatgcaccaccacgcctggctaatttttgtatttttttgtagagatgcggttttgccatgttggccaggctggtctcgaactcctgggctcaagccatctgcccactttggcctctgagagtgctgagattataggcatgagccaccattcccagccatgttttcctttttcattgaactttatctactttagccattaaactccactccattggtcttgtcattactaagagctgaaccacctgcaaaatattaagttaaaaagcgttttctttgacaacagttttcttttcttcatcttcctctatcactttacttctgaacttttattctctcattttgatctgacccctacttctctgtttttcctggccatttagtactttcttgttttgctcatcccatttcccagtggagaccttctggtctgctgctttatcactggttttgttagaagacatacaaatggcaaggaggtatatgaaaaggtgcctaacatcattgatcatcagagaaatgcagaccaaaactacaatgagatatcatttcaccccagttaaaatggctttttttttttttttccaaaagacaggcaataacaaagtactggtgaggatgtggagtaaagggaacccacatacactattagtaggaatgtaaattagtacagccactgtggagaacagtttgaaggttcctcaaaaaactaaaaatagagctaccatataatccagcaatcccactgctaggtatatatccaaaagaaaggcaatcaatatacggaagagatacctgcacacccaggtttattgcagcactattcacaatagccaagatttggaagcaacccaggtgtccaacagatgaatggataaagaaaacatggtatataaacacaatggaatactattcagctgtgaaaaagaatgaaatcctgtcatttgcaatcctgtcttgaatagaactggaggtcatgatgttaagtgaaataagacaggcacaaacttcacatgttctcacttatttgtgggagctaaaaattaaaacaatcgaactcatggagctagagaatagaattatggttaccagaggctggaagggtggttgggcgtataagtgtagggggagtggggatggttaatgggtacaaaaaaatgagaacgaataagatctacttgataacacaacagggtgactatagtcaacagtaattatacatttaaaaataactagaagagtataattagattgtaacacaaaagataaatgcttgaggtgatggatacctatttaccctgatgtgattattacttatttcatgcctatatcaaaatatttatactccaaaaatatatatacctactatgtacccacaaaaatttaaaaatttatatattgtttttgctatcacctttagaatttcttgtcattggatagttcgtctgtataccattctggtcttcattccccagggcccccgttgtctgatttttctgcttctagaactgttagaggtcacaaaagcaagatggttgtatctatcacaatttttgtctgactttaactgggtatctgttacgatttagtagtcatcttactgacttcttgttggtttccaattgaatcctcacagtagactgttttcattgtaatcagtatcgaattatagcctgttcccttcttcataaatgaaggctttcttcttcaacagttcttagtgacttcacctgtactttatttctctgctttgaatatttcgaagaaaacatattcttgctctttcccaaggttaacactacatacattaccttgaccacaggatgttttcttgcagattgtgacctaattccatcacccttcagcagcccccaccgttttcatggattcagctaaaccttctgtaagatgactctttttccccctaatctttatatctcttttgatatgtagctttagtctcactttttttccttttggattttgccagttagatgtctccctggaattccacttcagcatggctaagactaagcttgtcttctctttcctccccaaagcaaattgtaattaggatagactgaaggtgacagaagataactaagatcttcttcatcctttcggctcttatggaagctgaattccagtagtcattctaaatttgttgtatgtcagcttatggtatcttttcatgtctttacattcagccaaagaggaagttccttgaaggggagaccagagggcgtgctgtgcttcttaatcctctctttcttaaccagtaagaggcattcagtagatatctgatgatactgattaatagaggggaacttttcagattcttttttttttttaaccctagtaagctttagtacaaactaaatgctgagagattatcaagtaagggattgatcatcacaagaagactcaggatgttacatcctgtaggttttatagtttcctatattgtaaaaaatatgagttatagcagcttgtctggatgtcatacaggtataaaaatcagttttataaacttgagtaaattggggcccattttagaaaaaactcttgcaggctgtgaatgccaatatataagtaaagtattaagtataatgttatttaatgtgggcaaacataaagccaggtgtaaattttttaggtttaaaatcttatagaactatacatccaaaagaaaatttcaagttaaacataatacaaagcaatacaatctaaattaacattaatttaatgtgatgaatgatattgccttgctaaaagtgggtcactacttacaatgtgcaaatggtactcatcgttagggtatagattcttttaaactatgacatacgtacactaccatgtggaacgtgatgatgtgttctctgttctaactactgggaagacttccttggcatagcacatgccatggggtcagttggctttgacttcatatagatatgccatttacttggtcagtgtcacttctatgacaagtagtatgttgtgccagtttgattataagtacaaatatgggcaatgaagtaacttggttttaaggttgttactaagctgagtaacagtgtgtggctatacaaatttttataggctatcaggaatgaaaacacaggagattgttgtagattcaagtattttagattcaagtttgaagatgctcatgcagatgtttaactgagttgtatagacctttatgtttctttctttttctctttttttttttttgagacagagtcttgctctgtcacccaagctggagtgcaatggtgtgatctcggcttactgcaacctccgcctcccaggttcaagcaattctcctgcctcagcctcccaagtagctgggattacagatgtgcaccacgacgcccagctgattttttgtattttagtagaggcggggtctcaccatgttgtcaagatggtctcaatctcctgaccttgtgatccacccacctctgcctcccaaagtgctgtgattacaggcgtgagccaccgcgcctgactgacctttatgtttcttaactttatgctatacatcagttgatatttcaaaaatttaaatggtttctatgattattctttgggctaagaaattgggcattaattgtcctcatatgtatggtttttgtggctacttcatgtagattttatttttggtggttatcaaattggaatttttttttttttttttttttttgagacggagtctcattctgtttcccaggttggagtacagtggtgcaatctcagctcactgcagcctcgacctcccaggctcaagcagtcctctcacctcagccttctaagtagctgggactacaggcacgcaccaccacacctggctagttttttgtgtttttagtagagatggggttttaccctgttggccaggctggtcttgaactcctggcctcaagtgatccacctgcctcagcctcccaaagtgctgggattagaggcatgagccaccacacctggctgaaattggaatttcattggtactgcctgtaattttatgttaatttttttttttttttgtcgtcactagcttttatctaaagcccctagagagaaaggccatgataccttgtatacaaggttataagagtatacaagggaaagggagggctgaagggaacagggtgggctggtacaagcctcattagaaataccattgagtctgtgagtaaaacatcattatatgaaaaggagatgtggttttagggtggtccaattacttttgcaccagcctaataaaattacaagtcattatcaatagagacattgtaaaacctttttttttcccaaaagaagtatcaggtatgataattacatgtctgcccaactttcgttatagattaacataacttaattgtatttaaggtacaatttaggagagttgctgaaaaatgaatctttagtattgggatgccttgattctaccctcaatagctataatggattatgtgtctgagtagattaataaaaatcttttgagcatttttcttgaactacttcactgaagattagctttttgagcatccattttaatttctcagtatataaggatcggtttatcacaactgtattgttttccctggccttgttagattatattttcatatcatgtagaaaaataggtgtattcgttctcccttgaagtcctttgtctcccaaaggaaatggttgcaatacagatgtgtcacctcttccacaggtaaagtggaatggagaagtagccagttaaatagtgcatgctcaatttggaacatttagagcatacaggaaagttatttatttggtaaatattttttaagcatttactatgtttcatgcattgtactagttgtagaggatataattgaatacaactacatgtagcccttgactttatggaactagtctagtataaagatttaagattgcctggcatggtggctcacgccactaatcccagcactttgagaggccaaggcaggattgcttgaggccagaagtttaagagtagcttggtcaacataatgagactccatctctaaaataaatagatagatagatagatagatagatagatagatagatagatagaagtagttagacaacacaaagcagtttcactcatcttgtggcaaggagttatgtatttctaatcaaatttggcaactcaagcattttcaacaaaatctacatgttttttcagaataaagtgaccaacacagaatgttacctgtaaaaatcagagcaataattgctatctaaaataattttgaaaattaagtggtactgaaaggctcatatagcaaaaatatggcctcctgtcattgtactttcctacttcccagactcaccattttcaacattttttagtagtttattttgccattttatagcatagtacctgacattttatttattcaacagacatttcttaagtacctaatacatgccattccttgtttgaagggatgctaaggatacagtggtgaacaaggcgttgtggggttgtatagagggtattcattcctaaccttgaaccaaatatttctttctgttggataatgcattaaaaattgcaaacagtttacaaacttttggagcaatggtggccttgatcataaagtagggactgcttctaccgtatacatgcttggtggtgtatttgtgatatctggctaaagtttctacatggaaattgactgactttagttttgagacttctgggaaccagtcaggcaaaatagtgaaactgtgtatcctgtttccaagagttgtcttttaaggttatctgcttcattcatttggcctgacttgctaggcaaatgcctagggtaaatatgatttgattaactataacaacaacagcaacaacaacaactttattttttagagcagtttgaggttcacagcaaaattgagcagaatgtacagagattttccctatacccgcttcccctacgcatgtgcggcctcccctactatcaacatcccccaccagagtggtttgttacaattaatgaacctacattgacacatcattatcactcaaggtccgtagtttacattagagtccactcttggtgttgtgtatgggtttggtcgattttataatgacatttatccaccattatagtgtcatacatagtaattttgctaccctaaaaatccagtgtgctccacctgttcctccttccctcctccctcatccctggcaaccactgaactttttaacatctccatagttttgccttttccagaatgtcatatcattggaatcacacagtatgcagccttttcaaatgggcttctttccgttagtaataggcatttaagtttcatcctcatcttttcatggcttgatagctcatttctttccctccctcttttcttccctgtcttccttccttcctcttctttcctgtttcctctttcttcttccttttttaagagacaaggtgtctcactctgttgcccaggctggagtgcagtggcccaatcatagctcattgcagccttgaattcctgggctcaagtgatcctcctgcgttagcctcctgagtagctgggatcacaggctccagtcattttagtgctgaataatatttcattatctggatgtaccgcctattcattcacctactgaagaatatcttggttgcttctaagttttggcaattatgagtgaagttactataaacattgtatacaagttttatgtggatgtatgttgtcatctcccttgggcagataccaaggagtgccattgttggatcatatggtaaatatatctttagttttgtacagaattctaggttggtatttttttctctctcagtcctttattttatttggagacagtctcgctatgtcgcccaggctgccatacagtggtgccatctgggctcactgaaacctccacctcccaggttcaagcgattcttgtgccttggcctcccaagtagctgggattacaggagtgcgccaccacgcctgctaatttttgtatttttagtagagacagggttttgccatgttgcccaggctggtctcaaactcctgaccttaagtgattcacccacctcaatctcccaaaatcctgggattacaggcctgagctactgtgcctgatctctctcagtactttaaagaaatatttcattccacttttcttttttttcttctttttgagatggagtctcactctgtcgcctgggctggagtgcagtggcgcgatctcagctcactgccacctccgcctcctgggttcaagtgattctcctgcctcagcctcctgaatagctgagattacaggcgcccaccaccatgcccagctaattttttgcatttttagtagagacgggggttccaccatgttggccaggctggtctcgaactcctgacctcgtgattcgcacatctcggcctcccaaattgctgggattacaggtgtgagctaccacgcctggcccactcttcttgcttacatagtttctgaggagatgtcagatgtaatttttatttttgctcttctgtaggcaagttgagttttttccccctctagcttctctcaggatttttttctttatctttgattttcagtagtttgaaaattatatgcctagctgtcagggttttttgcttgtttgtttttgttttctcaggtgtgactccagaaaggttctaaagaggagctttacaatctcttctctggggtttatggagacttcctttacccttctgtgttagccccttaaagcactgcgtcaaccttaaaagggcacaggaaagggtgtctatgccatttttatgccatttatcctgcttggtgttttctgagctttcttcatctgcggtttaatgtctcacattaatttgtagaaattctctgtcattgtttcaaatttttcttcagttcttttctctgtttcttcttctggtgttcccattatgcttttgtggttgtcgtacagttattggatattttgttccaggcttttttttttccagtctttttttccttttgcttctcggttttgtaggtgtctgttgagatactctcaagtgcagatattctttcctcagctttgtctagtttactaataagcccattaaaggcagtcttcatttctgttacagtctttttgatcagtagcatttcttttttattctttcttaaaatttctgtctttctgcttacattgcccatctgttcttgcatggtttctactttgtccattagagttcttaggatatttatcataattatttcaaatttctggtgtaacaattccaacatccctgcaacatccaagtctagtttcgatgcttactgtgtctcttccagctgtgttttttcctatttaatatgtcttataattttttcttgatagccatacatgatgcattaggtaacagaaactgctgtgagtggacctttagtaatgtggtggtaaggtgtgcatggaggggaaacattttcagtctgttagtgaacttttgtcaacttcacatgtgcttctcaagtccatcctgtaagtgggagagtagggctagagaggactgaagttgggtatatattaaatactttctcctacaaagaagcctagaggggacgcattaggggattttttttcccccagtattcactgtgatgacccttattgagctcctggaggtaaaactcacaaaactgtggttctcccccctgcccatattactacatgtccctggagtttatatctttcagacttgtctgcactgagcttccaccaatttgtcaaatacagatcaggtttccctaccacccgtgcagttgaaaacccacatacaacttttgactcctccagagcttaactactcatagcctgctattgactggaagccttgccaataacataaacagttgattaatacatattttatatgttttctgtattatatattgtattcttacaataaagagaaaagaagatgttattaagaaaatcataaggaagataaaatatatttactgttcattaagtggttcccatgggtgctggttcccatggaggttgccccttgtgagtttttgctcagggaagttgtgattctctatatttgcctgttggtctcctaatttgggagtcatcagttttccctgtgacctcacttctcttacagagttaagaacagttgttggtttttcagtttgttcagtgttttacatgttgttagaacacagtggtacttctaagtttcttaacatgctagatcagaaacctgaagtctcacctaatttggctttttatattttttcttcttttttttcttccattgctaccaaagcatttttcatctgtgtctggggtgacattagagcagaatgtgatttctaggtaaacattattgggctccctagcagaaaaatttttgaaagtagtacatgaattctgtataattaaaattttcttttcatcttaataggtataggtaataggcacggcctattttttttttgctcaacagtctaaaatagtaatttaatcacctaatagccttagttatatagttgaaagaagagttggaaatctgattcatgggttggaaatcacctgtcacatatgagttttaggcactggtcactttattttgaaacagctttggggttttttcctttttcaactcataataggctttaacagcttttagttttgtttctgtttttttaacagcatgagttgccaaatttggttatagcttcttggtacaagatgggtaaatttgctttgtgttgtgtaattactttttattttaaatgctacctcttttatgaacactaactttacactaagattaggaaaatgagaattgcatgtctgcaacaaatagctatctgtagtattaaattgtgaaaatgtagactttggattggagctggcatctcttaatatgtaattgtaacatagagtaaataagtattttgtcccttgtagggtcaaacagtacagtgcatgggcagaattagagatgtaggcttttttttttttttttttttttactggcttagagaaccgtttgatcagctaatatggaattaagtccctagggctgcccaggcacaacattaactgctattaaaggaaaatttaaaagagtattagtgaaggttaaatactgaccatggacatctggcaaaattgatgttttttttcccctccaccattgtttatagtttattgttatttatcagagaattaatgtttattttcagaatctattaccataagaaatctgtttgaggacttcgtatgtgccaggaattctactaaataatgatataatgctgaacagaattagataggatcctcacttcgttaagcttacagtctagtggtatagatcaacattaatcaaagaataacacaaatagaaagcagagcagtggttcatgggattgactgtagagaagcatgagggaagttcccaggtgatggaaaatactttatttcttaatcgtggtggttacatgtgtgcatatgtttatgaaaatatattgtacatttaaagtggatacattttatcacatgtaaattatgactctataaagttaattaaaaagaataactcaggtaaggtggtgtgtgcgcctgtagtcccagctatttctgaggcaggaagatcacttgagcccaggagtttgagttcagcatgggcaacatgagacctgtgagactttgtctctaaaaaaatttaaataaataactaagataaatgtaaaattacagctgtagtaagttctacaaaggagagttacatgggctatgacgatgtaagatagcaagaactgacattggcagggaggaaatgatgatgagtagaagtaaataagtgaagtgtggggattgatgtcaaggggacagtataaaagaaataacagcatgcgccaaggccctaaaattggaaagtccttggcaaattaaaggagtttgaaaaaggccattgtgtgcaaagcagaaaataggtactacaaggtaaaagatggagctaagcggtaggtaaggctaaaccttgtcagccattgttaaatattgaattgtatcctaagcacaactcagtggaaagcagttaaagttctttaattgggggaggcaatgaaggggtaataaaattggttatagaaatactgctctggctctagtgttgagaatgaattggagtagccagagtagattcaagaagactttagtaagattattccaacaggccaggacctgttatagggtggtggcaatggagagagatggacagaatggagagtgtatttaggaggtaaaaatgacagaacttggtgatgcactgaatgtgaaatggggaaggtgtctaggaggactactaggtttatggtttgcgtattagggtggatgatagcagtttcatttactgagacagggagccctggcagagtacccagcttttagagtgggtagggggaaggggagagtgcatctggtgttgggcattttgaagtgatttacatacaacaaactgaaggtatctttaacactgagtccagcaggttagcatatttattcagcaagcattgcacctttttttgttgtttttggggtcttcaactcctggcctcgaatcctccctccttcccccgcctctcccagcctccgcctcccaaagtgctgggatttcaggagtgagccaccgcgcctggccagcatcgcgctgtttgtgcagtgtgccctgtgctaggtcttgcagtgggtaccagtagagacataaaagtacaaaagataattggacgtttagtagagtcctgaaagggggcgggataggaagatacctaaccataagaaaaaccagcaagagcggaaaaggagctagtcctccagatcaataagttaatcacttatgtttgtgattccctgcattttgggtgattctctgtcgaggtcctcttaagtccagacttttgatataatctgcagtttgcgccatttggattcctgaagcatctttacaagccacctacattccttatggagctgtggcacaacagcaagcccacgatgtctcaccggattaataaaaatataggcgctcacgcttttgtttaccgatatagtatctcctcctcccctcactccatcaacccccacgcgacacaactttccggaagtaagcaaaatccgttatcaaggtgaaactccggggaccaggctccacagctgccataaactggatggcacgttagaagccggtgggtgtaggtgaggcacgctggcgcccgcgggcccttctccagccgctacccagtgggaatccgcggggctgaagccccgaaaccaggctgagcgtcccagagcgcaacctccctttcccccagcagcgccggcgccgcagaagccgcgtgtccccaggcgcactcccccaaggtgaacccccgccccccacggaggcggctgggtcgcgggtctgggcggggcgctccggacgccctcccgccgctgcgcacccctcccgcgagctgccagctccctcggcctctccacccaaaactggcccaaccgccaatcgtctgcctctcacctcctacagcaggtgacccatggccaatcgccaggggtctctttgccaggagccgccagggccagccaatcggggcgacccctccgccggggaggggacgggaaaggggtggggggtgaagggggtgaagggggtgtcccgggggacgggctgaacctcagtcaggaccgcctgcaccgcagtccggggatcgggtcgaggggagaagaaaaaggggtgctcgggagcagcccccggctacctcccctggaggcacagagggcgggggccttggcgaatggctttcttgctggccacttgcggagtgagtagaccccgagggtctgggagaggggccggcccctacccctgagtccccggggtcccggccgccaggccggagcgcgaatgtcgtgctcaccctgcctccttcccgccgccccctgggctttttgatgacaagcttcaaaactgcaaagaagatgaacagagaaagaaaattgaaactctcaaagagacaacaaatagcatggtagaatcaattaaacactgcattgtgttgctgcagattgccaaaagtactattaatcccgtagatgcaatatatcaacctagtcctttggaacctgtgatcagcacaatgccttcccagactgtgttacctccagaacctgttcagttgtgtaagtcagagcagcgtccatcttccctaccagttggacctgtgttggctaccttgggacatcatcagactcctacaccaaatagtacaggcagtggccattcaccaccgagtagcagtctcacttctccaagccacgtgaacttgtctccaaatacagtcccagagttctcttactccagcagtgaagatgaattttatgatgctgatgaattccatcaaagtggctcatccccaaagcgcttaatagattcttctggatctgcctcagtcctgacacacagcagctcgggaaatagtctaaaacgcccagataccacagaatcacttaattcttccttgtccaatggaacaagtgatgctgacctgtttgattcacatgatgacagagatgatgatgcggaggcagggtctgtggaggagcacaagagcgttatcatgcatctcttgtcgcaggttagacttggaatggatcttactaaggtagttcttccaacgtttattcttgaaagaagatctcttttagaaatgtatgcagacttttttgcacatccggacctgtttgtgagcattagtgaccagaaggatcccaaggatcgaatggttcaggttgtgaaatggtacctctcagcctttcatgcgggaaggaaaggatcagttgccaaaaagccatacaatcccattttgggcgagatttttcagtgtcattggacattaccaaatgatactgaagagaacacagaactagtttcagaaggaccagttccctgggtttccaaaaacagtgtaacatttgtggctgagcaggtttcccatcatccacccatttcagccttttatgctgagtgttttaacaagaagatacaattcaatgctcatatctggaccaaatcaaaattccttgggatgtcaattggggtgcacaacatagggcagggctgtgtctcatgtctagactatgatgaacattacattctcacattccccaatggctatggaaggcaagtgtgtccatttcctctgatcagcagtagactctgctgttccttgagacatgccccttccccctcttcctcttaactgtcaaccttacctaaaaacttttgattttgcaggtctatcctcacagtgccctgggtggaattaggaggagaatgcaatattaattgttccaaaacaggctatagtgcaaatatcatcttccacactaaacccttctatgggggcaagaagcacagaattactgccgagattttttctccaaatgacaagaagtctttttgctcaattgaaggggaatggaatggtgtgatgtatgcaaaatatgcaacaggggaaaatacagtctttgtagataccaagaagttgcctataatcaagaagaaagtgaggaagttggaagatcagaacgagtatgaatcccgcagcctttggaaggatgtcactttcaacttaaaaatcagagacattgatgcagcaactgaagcaaagcacaggcttgaagaaagacaaagagcagaagcccgagaaaggaaggagaaggaaattcagtgggagacaaggttatttcatgaagatggagaatgctgggtttatgatgaaccattactgaaacgtcttggtgctgccaagcattaggttggaagatgcaaagtttatacctgatgatcagggcagtaggcataattcagcaacaaacaatcttcctttgggagaaacctgttcattccaatcttctaattacagtggttcctatctcagggatactggactttctgacgcagatgaacaattaaggggaaaagcttcccttttccctctgtggcagttacgattttgacttcagtcctgagaaaaacttcaggttttgaaaatcagatgatgtcttctccttttccaaacaccacacgttgaaagcatttataaatccaagtctgaaactctgcgctctagtactgctgttaagatacacaacttgtttcttagttcatataatctcgggatacacacacacacacacatatatatacacacacatacgtatacacacacatacatatatataaatatacctgatgccagatttttttcataaatattctgcctactgtaaatatggggnccccgggtggntaaanatngngccggtttaacccggggggaattcggggtaccacacaaaaccattgggaggcaca

SEQ ID NO: 735139 - DNA, 18646 bp, Homo sapiens
gtaagggtctttacatggtttccagatagttcattagttgttgctttctttttttgtctgttttctgttttttttttttaaataactgtggtatgatgtaataggaacttataatttctgagttgcttatttttcctttacagttatagtaaagttatactcatttattttctcctgctttctgcagagtaaaatactgatttttgtctagaaacaagacagtgcaagacaatgttgaaagtgaaattctatgttaaaatatgccagatttattttaagaatttaatatctgtagtcagttatcaatacaaccaaattacataattatgcatgataataggtaaatactgagaagttcacctcattttcttgttaaaggatttggctattaccgtatgtgtcagttagtactcttttgtatggtagtgaaagaaaactcaacccaaactgattcatgaagaagaaagtaaatctggttagatgtggtttgaattaggtaattcatgtcatgaggactcagatctcccatctctatttctacgttccacttttgcattggcttcattttcggttaggttctcccttggtggtggtaaggtggttgtagcaatgtcagcctcccatttttggaaccgagtccataggaggctattctttctagaccttaataggagtaacacaattattgctcatcaccctagctttggccatgtgtcaaatcctgaccagtcacaatttcacagtcatagattctaccctggagctgggatgttactggcctcactagaaacacattgctgatagggtagaaggtgtgttcatcctacccaacccgacccgcaccaaagtcagaatagggaaaaacagatgttgggtgacatgcaactaacgtctgccgtactacactgaagatatttttctatgtttattctccagtgaaagagcttatatttgtggtacataggggattttgttttaatttagaaaatttaattgtagaaaacatgttttataaccctttctctgtactttgttctatatcaggaattgacttgattagataaggtgacatagggtatcttaggccctacaagatagtaaaccccccatcacttgaaagtattcagtagaggcttaaaaaacattattaaaggatgtggttattaggggactttaagaaatgaatatgaaattgaagtaggaaatctttaagctactctgtgagttatgccttttaaaagcaatttgtaattcctgtagatttcttttaaatttaggcagtttcataaatgactatagcatcattttagcaaatttgtgatcctgtaagaggaggataagtgttttttgtttgtttgtttgttttttgtttttttgagacagagtctcactttgtaccccagaaagtaaatctagttagatgtggtttgtctcggctcactgcaacctccaccccgtgcgttctagcaattctcctgcctcagccaccacacctggcctaagaggggaggataagtgttttagtgatcatattagactgaatgtggcagatgagatttcccgcccccccattgttggttagactgacattcaacattcaacaagagccacctgcccttgtaggcatttctgccactatacccctacataaacctagagtgctattgcttacttgctttccttcaaatacattttttcatttgtggcctccacattcttgtgtgtgatgtcctttctctgtgaaatgtcttctaccctttttttcaaagcctagtttagaactgacctcttctatgaaccctctgccgactggcctttccttccccagtcccccaagttcaaaatgatctctttcctttgaatactatagtatttgcacaattcactatctccttatcatattcttcttgtttatttgttatcagctgatgttgacatcataagttcaggttcctaactagatccaatattggaatttttcagcttttgctaagaagagagcttgtatgtctttgggaataatgggcagaaaaagataactttgagaagtcttagacttctaatagctttgatatttaaaagtacatgtaatacaagaggtttttttcctacatttaatgcatggagaagataggacatttagaaatatggaattaatgttcatttgactggcaaaagattattttctcagatgtagtgaagtgtggtaaagaacttcactctagagccagaatgtctgtgtttgtatcccagagcccaccacttacatttaaccattaacattcaacttactgtctctgagtttcagtggcctcatctataaaatgaggataataagagtacctacttcatagagttgttttagtggttaaataaactaacgtaaacttgctagaacttgataaactaatattggatgagaactggttgaaataatgcctggctatagtaaaaacttggtaaatgttagttgccattacaatgcaactactgttcctaccattccctctgccagtgcctggtattcagtagcactcagtaaatgttagttaaatgaagaaataactgaaggaatgaatgaacaaatggttgatgtagagattgcttttccattgttgtttattgaatattttgagatgtataacatactgtctgttaggcactgtgggatgggcactcacggagctgtcttccaaaggggtataggagaggagacgcagtgatctcagcaacctacctttaaaacatatcctagtatctactgccatgttaggttctcttcttttgctttttttaaaaaaaaattctcacaaaactccccccacccacttcagtttatagatgaggaagctcctactacataatagtgcttcccagtctaattcttgacctcattgtatttatatgtcctttttttttttgacagagtctcactcattgcagtggcacaatcacagctcactgcaacctctgcctcccctgctcaagtgatcctcccacctcaacctcctgagtagctgggactacaggcatgcaccaccacgcctggctaatttttgtatttttttgtagagatgcggttttgccatgttggccaggctggtctcgaactcctgggctcaagccatctgcccactttggcctctgagagtgctgagattataggcatgagccaccattcccagccatgttttcctttttcattgaactttatctactttagccattaaactccactccattggtcttgtcattactaagagctgaaccacctgcaaaatattaagttaaaaagcgttttctttgacaacagttttcttttcttcatcttcctctatcactttacttctgaacttttattctctcattttgatctgacccctacttctctgtttttcctggccatttagtactttcttgttttgctcatcccatttcccagtggagaccttctggtctgctgctttatcactggttttgttagaagacatacaaatggcaaggaggtatatgaaaaggtgcctaacatcattgatcatcagagaaatgcagaccaaaactacaatgagatatcatttcaccccagttaaaatggctttttttttttttttccaaaagacaggcaataacaaagtactggtgaggatgtggagtaaagggaacccacatacactattagtaggaatgtaaattagtacagccactgtggagaacagtttgaaggttcctcaaaaaactaaaaatagagctaccatataatccagcaatcccactgctaggtatatatccaaaagaaaggcaatcaatatacggaagagatacctgcacacccaggtttattgcagcactattcacaatagccaagatttggaagcaacccaggtgtccaacagatgaatggataaagaaaacatggtatataaacacaatggaatactattcagctgtgaaaaagaatgaaatcctgtcatttgcaatcctgtcttgaatagaactggaggtcatgatgttaagtgaaataagacaggcacaaacttcacatgttctcacttatttgtgggagctaaaaattaaaacaatcgaactcatggagctagagaatagaattatggttaccagaggctggaagggtggttgggcgtataagtgtagggggagtggggatggttaatgggtacaaaaaaatgagaacgaataagatctacttgataacacaacagggtgactatagtcaacagtaattatacatttaaaaataactagaagagtataattagattgtaacacaaaagataaatgcttgaggtgatggatacctatttaccctgatgtgattattacttatttcatgcctatatcaaaatatttatactccaaaaatatatatacctactatgtacccacaaaaatttaaaaatttatatattgtttttgctatcacctttagaatttcttgtcattggatagttcgtctgtataccattctggtcttcattccccagggcccccgttgtctgatttttctgcttctagaactgttagaggtcacaaaagcaagatggttgtatctatcacaatttttgtctgactttaactgggtatctgttacgatttagtagtcatcttactgacttcttgttggtttccaattgaatcctcacagtagactgttttcattgtaatcagtatcgaattatagcctgttcccttcttcataaatgaaggctttcttcttcaacagttcttagtgacttcacctgtactttatttctctgctttgaatatttcgaagaaaacatattcttgctctttcccaaggttaacactacatacattaccttgaccacaggatgttttcttgcagattgtgacctaattccatcacccttcagcagcccccaccgttttcatggattcagctaaaccttctgtaagatgactctttttccccctaatctttatatctcttttgatatgtagctttagtctcactttttttccttttggattttgccagttagatgtctccctggaattccacttcagcatggctaagactaagcttgtcttctctttcctccccaaagcaaattgtaattaggatagactgaaggtgacagaagataactaagatcttcttcatcctttcggctcttatggaagctgaattccagtagtcattctaaatttgttgtatgtcagcttatggtatcttttcatgtctttacattcagccaaagaggaagttccttgaaggggagaccagagggcgtgctgtgcttcttaatcctctctttcttaaccagtaagaggcattcagtagatatctgatgatactgattaatagaggggaacttttcagattcttttttttttttaaccctagtaagctttagtacaaactaaatgctgagagattatcaagtaagggattgatcatcacaagaagactcaggatgttacatcctgtaggttttatagtttcctatattgtaaaaaatatgagttatagcagcttgtctggatgtcatacaggtataaaaatcagttttataaacttgagtaaattggggcccattttagaaaaaactcttgcaggctgtgaatgccaatatataagtaaagtattaagtataatgttatttaatgtgggcaaacataaagccaggtgtaaattttttaggtttaaaatcttatagaactatacatccaaaagaaaatttcaagttaaacataatacaaagcaatacaatctaaattaacattaatttaatgtgatgaatgatattgccttgctaaaagtgggtcactacttacaatgtgcaaatggtactcatcgttagggtatagattcttttaaactatgacatacgtacactaccatgtggaacgtgatgatgtgttctctgttctaactactgggaagacttccttggcatagcacatgccatggggtcagttggctttgacttcatatagatatgccatttacttggtcagtgtcacttctatgacaagtagtatgttgtgccagtttgattataagtacaaatatgggcaatgaagtaacttggttttaaggttgttactaagctgagtaacagtgtgtggctatacaaatttttataggctatcaggaatgaaaacacaggagattgttgtagattcaagtattttagattcaagtttgaagatgctcatgcagatgtttaactgagttgtatagacctttatgtttctttctttttctctttttttttttttgagacagagtcttgctctgtcacccaagctggagtgcaatggtgtgatctcggcttactgcaacctccgcctcccaggttcaagcaattctcctgcctcagcctcccaagtagctgggattacagatgtgcaccacgacgcccagctgattttttgtattttagtagaggcggggtctcaccatgttgtcaagatggtctcaatctcctgaccttgtgatccacccacctctgcctcccaaagtgctgtgattacaggcgtgagccaccgcgcctgactgacctttatgtttcttaactttatgctatacatcagttgatatttcaaaaatttaaatggtttctatgattattctttgggctaagaaattgggcattaattgtcctcatatgtatggtttttgtggctacttcatgtagattttatttttggtggttatcaaattggaatttttttttttttttttttttttgagacggagtctcattctgtttcccaggttggagtacagtggtgcaatctcagctcactgcagcctcgacctcccaggctcaagcagtcctctcacctcagccttctaagtagctgggactacaggcacgcaccaccacacctggctagttttttgtgtttttagtagagatggggttttaccctgttggccaggctggtcttgaactcctggcctcaagtgatccacctgcctcagcctcccaaagtgctgggattagaggcatgagccaccacacctggctgaaattggaatttcattggtactgcctgtaattttatgttaatttttttttttttttgtcgtcactagcttttatctaaagcccctagagagaaaggccatgataccttgtatacaaggttataagagtatacaagggaaagggagggctgaagggaacagggtgggctggtacaagcctcattagaaataccattgagtctgtgagtaaaacatcattatatgaaaaggagatgtggttttagggtggtccaattacttttgcaccagcctaataaaattacaagtcattatcaatagagacattgtaaaacctttttttttcccaaaagaagtatcaggtatgataattacatgtctgcccaactttcgttatagattaacataacttaattgtatttaaggtacaatttaggagagttgctgaaaaatgaatctttagtattgggatgccttgattctaccctcaatagctataatggattatgtgtctgagtagattaataaaaatcttttgagcatttttcttgaactacttcactgaagattagctttttgagcatccattttaatttctcagtatataaggatcggtttatcacaactgtattgttttccctggccttgttagattatattttcatatcatgtagaaaaataggtgtattcgttctcccttgaagtcctttgtctcccaaaggaaatggttgcaatacagatgtgtcacctcttccacaggtaaagtggaatggagaagtagccagttaaatagtgcatgctcaatttggaacatttagagcatacaggaaagttatttatttggtaaatattttttaagcatttactatgtttcatgcattgtactagttgtagaggatataattgaatacaactacatgtagcccttgactttatggaactagtctagtataaagatttaagattgcctggcatggtggctcacgccactaatcccagcactttgagaggccaaggcaggattgcttgaggccagaagtttaagagtagcttggtcaacataatgagactccatctctaaaataaatagatagatagatagatagatagatagatagatagatagatagaagtagttagacaacacaaagcagtttcactcatcttgtggcaaggagttatgtatttctaatcaaatttggcaactcaagcattttcaacaaaatctacatgttttttcagaataaagtgaccaacacagaatgttacctgtaaaaatcagagcaataattgctatctaaaataattttgaaaattaagtggtactgaaaggctcatatagcaaaaatatggcctcctgtcattgtactttcctacttcccagactcaccattttcaacattttttagtagtttattttgccattttatagcatagtacctgacattttatttattcaacagacatttcttaagtacctaatacatgccattccttgtttgaagggatgctaaggatacagtggtgaacaaggcgttgtggggttgtatagagggtattcattcctaaccttgaaccaaatatttctttctgttggataatgcattaaaaattgcaaacagtttacaaacttttggagcaatggtggccttgatcataaagtagggactgcttctaccgtatacatgcttggtggtgtatttgtgatatctggctaaagtttctacatggaaattgactgactttagttttgagacttctgggaaccagtcaggcaaaatagtgaaactgtgtatcctgtttccaagagttgtcttttaaggttatctgcttcattcatttggcctgacttgctaggcaaatgcctagggtaaatatgatttgattaactataacaacaacagcaacaacaacaactttattttttagagcagtttgaggttcacagcaaaattgagcagaatgtacagagattttccctatacccgcttcccctacgcatgtgcggcctcccctactatcaacatcccccaccagagtggtttgttacaattaatgaacctacattgacacatcattatcactcaaggtccgtagtttacattagagtccactcttggtgttgtgtatgggtttggtcgattttataatgacatttatccaccattatagtgtcatacatagtaattttgctaccctaaaaatccagtgtgctccacctgttcctccttccctcctccctcatccctggcaaccactgaactttttaacatctccatagttttgccttttccagaatgtcatatcattggaatcacacagtatgcagccttttcaaatgggcttctttccgttagtaataggcatttaagtttcatcctcatcttttcatggcttgatagctcatttctttccctccctcttttcttccctgtcttccttccttcctcttctttcctgtttcctctttcttcttccttttttaagagacaaggtgtctcactctgttgcccaggctggagtgcagtggcccaatcatagctcattgcagccttgaattcctgggctcaagtgatcctcctgcgttagcctcctgagtagctgggatcacaggctccagtcattttagtgctgaataatatttcattatctggatgtaccgcctattcattcacctactgaagaatatcttggttgcttctaagttttggcaattatgagtgaagttactataaacattgtatacaagttttatgtggatgtatgttgtcatctcccttgggcagataccaaggagtgccattgttggatcatatggtaaatatatctttagttttgtacagaattctaggttggtatttttttctctctcagtcctttattttatttggagacagtctcgctatgtcgcccaggctgccatacagtggtgccatctgggctcactgaaacctccacctcccaggttcaagcgattcttgtgccttggcctcccaagtagctgggattacaggagtgcgccaccacgcctgctaatttttgtatttttagtagagacagggttttgccatgttgcccaggctggtctcaaactcctgaccttaagtgattcacccacctcaatctcccaaaatcctgggattacaggcctgagctactgtgcctgatctctctcagtactttaaagaaatatttcattccacttttcttttttttcttctttttgagatggagtctcactctgtcgcctgggctggagtgcagtggcgcgatctcagctcactgccacctccgcctcctgggttcaagtgattctcctgcctcagcctcctgaatagctgagattacaggcgcccaccaccatgcccagctaattttttgcatttttagtagagacgggggttccaccatgttggccaggctggtctcgaactcctgacctcgtgattcgcacatctcggcctcccaaattgctgggattacaggtgtgagctaccacgcctggcccactcttcttgcttacatagtttctgaggagatgtcagatgtaatttttatttttgctcttctgtaggcaagttgagttttttccccctctagcttctctcaggatttttttctttatctttgattttcagtagtttgaaaattatatgcctagctgtcagggttttttgcttgtttgtttttgttttctcaggtgtgactccagaaaggttctaaagaggagctttacaatctcttctctggggtttatggagacttcctttacccttctgtgttagccccttaaagcactgcgtcaaccttaaaagggcacaggaaagggtgtctatgccatttttatgccatttatcctgcttggtgttttctgagctttcttcatctgcggtttaatgtctcacattaatttgtagaaattctctgtcattgtttcaaatttttcttcagttcttttctctgtttcttcttctggtgttcccattatgcttttgtggttgtcgtacagttattggatattttgttccaggcttttttttttccagtctttttttccttttgcttctcggttttgtaggtgtctgttgagatactctcaagtgcagatattctttcctcagctttgtctagtttactaataagcccattaaaggcagtcttcatttctgttacagtctttttgatcagtagcatttcttttttattctttcttaaaatttctgtctttctgcttacattgcccatctgttcttgcatggtttctactttgtccattagagttcttaggatatttatcataattatttcaaatttctggtgtaacaattccaacatccctgcaacatccaagtctagtttcgatgcttactgtgtctcttccagctgtgttttttcctatttaatatgtcttataattttttcttgatagccatacatgatgcattaggtaacagaaactgctgtgagtggacctttagtaatgtggtggtaaggtgtgcatggaggggaaacattttcagtctgttagtgaacttttgtcaacttcacatgtgcttctcaagtccatcctgtaagtgggagagtagggctagagaggactgaagttgggtatatattaaatactttctcctacaaagaagcctagaggggacgcattaggggattttttttcccccagtattcactgtgatgacccttattgagctcctggaggtaaaactcacaaaactgtggttctcccccctgcccatattactacatgtccctggagtttatatctttcagacttgtctgcactgagcttccaccaatttgtcaaatacagatcaggtttccctaccacccgtgcagttgaaaacccacatacaacttttgactcctccagagcttaactactcatagcctgctattgactggaagccttgccaataacataaacagttgattaatacatattttatatgttttctgtattatatattgtattcttacaataaagagaaaagaagatgttattaagaaaatcataaggaagataaaatatatttactgttcattaagtggttcccatgggtgctggttcccatggaggttgccccttgtgagtttttgctcagggaagttgtgattctctatatttgcctgttggtctcctaatttgggagtcatcagttttccctgtgacctcacttctcttacagagttaagaacagttgttggtttttcagtttgttcagtgttttacatgttgttagaacacagtggtacttctaagtttcttaacatgctagatcagaaacctgaagtctcacctaatttggctttttatattttttcttcttttttttcttccattgctaccaaagcatttttcatctgtgtctggggtgacattagagcagaatgtgatttctaggtaaacattattgggctccctagcagaaaaatttttgaaagtagtacatgaattctgtataattaaaattttcttttcatcttaataggtataggtaataggcacggcctattttttttttgctcaacagtctaaaatagtaatttaatcacctaatagccttagttatatagttgaaagaagagttggaaatctgattcatgggttggaaatcacctgtcacatatgagttttaggcactggtcactttattttgaaacagctttggggttttttcctttttcaactcataataggctttaacagcttttagttttgtttctgtttttttaacagcatgagttgccaaatttggttatagcttcttggtacaagatgggtaaatttgctttgtgttgtgtaattactttttattttaaatgctacctcttttatgaacactaactttacactaagattaggaaaatgagaattgcatgtctgcaacaaatagctatctgtagtattaaattgtgaaaatgtagactttggattggagctggcatctcttaatatgtaattgtaacatagagtaaataagtattttgtcccttgtagggtcaaacagtacagtgcatgggcagaattagagatgtaggcttttttttttttttttttttttactggcttagagaaccgtttgatcagctaatatggaattaagtccctagggctgcccaggcacaacattaactgctattaaaggaaaatttaaaagagtattagtgaaggttaaatactgaccatggacatctggcaaaattgatgttttttttcccctccaccattgtttatagtttattgttatttatcagagaattaatgtttattttcagaatctattaccataagaaatctgtttgaggacttcgtatgtgccaggaattctactaaataatgatataatgctgaacagaattagataggatcctcacttcgttaagcttacagtctagtggtatagatcaacattaatcaaagaataacacaaatagaaagcagagcagtggttcatgggattgactgtagagaagcatgagggaagttcccaggtgatggaaaatactttatttcttaatcgtggtggttacatgtgtgcatatgtttatgaaaatatattgtacatttaaagtggatacattttatcacatgtaaattatgactctataaagttaattaaaaagaataactcaggtaaggtggtgtgtgcgcctgtagtcccagctatttctgaggcaggaagatcacttgagcccaggagtttgagttcagcatgggcaacatgagacctgtgagactttgtctctaaaaaaatttaaataaataactaagataaatgtaaaattacagctgtagtaagttctacaaaggagagttacatgggctatgacgatgtaagatagcaagaactgacattggcagggaggaaatgatgatgagtagaagtaaataagtgaagtgtggggattgatgtcaaggggacagtataaaagaaataacagcatgcgccaaggccctaaaattggaaagtccttggcaaattaaaggagtttgaaaaaggccattgtgtgcaaagcagaaaataggtactacaaggtaaaagatggagctaagcggtaggtaaggctaaaccttgtcagccattgttaaatattgaattgtatcctaagcacaactcagtggaaagcagttaaagttctttaattgggggaggcaatgaaggggtaataaaattggttatagaaatactgctctggctctagtgttgagaatgaattggagtagccagagtagattcaagaagactttagtaagattattccaacaggccaggacctgttatagggtggtggcaatggagagagatggacagaatggagagtgtatttaggaggtaaaaatgacagaacttggtgatgcactgaatgtgaaatggggaaggtgtctaggaggactactaggtttatggtttgcgtattagggtggatgatagcagtttcatttactgagacagggagccctggcagagtacccagcttttagagtgggtagggggaaggggagagtgcatctggtgttgggcattttgaagtgatttacatacaacaaactgaaggtatctttaacactgagtccagcaggttagcatatttattcagcaagcattgcacctttttttgttgtttttggggtcttcaactcctggcctcgaatcctccctccttcccccgcctctcccagcctccgcctcccaaagtgctgggatttcaggagtgagccaccgcgcctggccagcatcgcgctgtttgtgcagtgtgccctgtgctaggtcttgcagtgggtaccagtagagacataaaagtacaaaagataattggacgtttagtagagtcctgaaagggggcgggataggaagatacctaaccataagaaaaaccagcaagagcggaaaaggagctagtcctccagatcaataagttaatcacttatgtttgtgattccctgcattttgggtgattctctgtcgaggtcctcttaagtccagacttttgatataatctgcagtttgcgccatttggattcctgaagcatctttacaagccacctacattccttatggagctgtggcacaacagcaagcccacgatgtctcaccggattaataaaaatataggcgctcacgcttttgtttaccgatatagtatctcctcctcccctcactccatcaacccccacgcgacacaactttccggaagtaagcaaaatccgttatcaaggtgaaactccggggaccaggctccacagctgccataaactggatggcacgttagaagccggtgggtgtaggtgaggcacgctggcgcccgcgggcccttctccagccgctacccagtgggaatccgcggggctgaagccccgaaaccaggctgagcgtcccagagcgcaacctccctttcccccagcagcgccggcgccgcagaagccgcgtgtccccaggcgcactcccccaaggtgaacccccgccccccacggaggcggctgggtcgcgggtctgggcggggcgctccggacgccctcccgccgctgcgcacccctcccgcgagctgccagctccctcggcctctccacccaaaactggcccaaccgccaatcgtctgcctctcacctcctacagcaggtgacccatggccaatcgccaggggtctctttgccaggagccgccagggccagccaatcggggcgacccctccgccggggaggggacgggaaaggggtggggggtgaagggggtgaagggggtgtcccgggggacgggctgaacctcagtcaggaccgcctgcaccgcagtccggggatcgggtcgaggggagaagaaaaaggggtgctcgggagcagcccccggctacctcccctggaggcacagagggcgggggccttggcgaatggctttcttgctggccacttgcggagtgagtagaccccgagggtctgggagaggggccggcccctacccctgagtccccggggtcccggccgccaggccggagcgcgaatgtcgtgctcaccctgcctccttcccgccgccccctgggctttttgatgacaagcttcaaaactgcaaagaagatgaacagagaaagaaaattgaaactctcaaagagacaacaaatagcatggtagaatcaattaaacactgcattgtgttgctgcagattgccaaaagtactattaatcccgtagatgcaatatatcaacctagtcctttggaacctgtgatcagcacaatgccttcccagactgtgttacctccagaacctgttcagttgtgtaagtcagagcagcgtccatcttccctaccagttggacctgtgttggctaccttgggacatcatcagactcctacaccaaatagtacaggcagtggccattcaccaccgagtagcagtctcacttctccaagccacgtgaacttgtctccaaatacagtcccagagttctcttactccagcagtgaagatgaattttatgatgctgatgaattccatcaaagtggctcatccccaaagcgcttaatagattcttctggatctgcctcagtcctgacacacagcagctcgggaaatagtctaaaacgcccagataccacagaatcacttaattcttccttgtccaatggaacaagtgatgctgacctgtttgattcacatgatgacagagatgatgatgcggaggcagggtctgtggaggagcacaagagcgttatcatgcatctcttgtcgcaggttagacttggaatggatcttactaaggtagttcttccaacgtttattcttgaaagaagatctcttttagaaatgtatgcagacttttttgcacatccggacctgtttgtgagcattagtgaccagaaggatcccaaggatcgaatggttcaggttgtgaaatggtacctctcagcctttcatgcgggaaggaaaggatcagttgccaaaaagccatacaatcccattttgggcgagatttttcagtgtcattggacattaccaaatgatactgaagagaacacagaactagtttcagaaggaccagttccctgggtttccaaaaacagtgtaacatttgtggctgagcaggtttcccatcatccacccatttcagccttttatgctgagtgttttaacaagaagatacaattcaatgctcatatctggaccaaatcaaaattccttgggatgtcaattggggtgcacaacatagggcagggctgtgtctcatgtctagactatgatgaacattacattctcacattccccaatggctatggaaggtctatcctcacagtgccctgggtggaattaggaggagaatgcaatattaattgttccaaaacaggctatagtgcaaatatcatcttccacactaaacccttctatgggggcaagaagcacagaattactgccgagattttgtaggtattttttctgccttagagctcttatgcttttctgaaataactgccttttgtcttgaactacagcttctggattaggagtgtgaaagaatggttctgtctttgtaagcgtgtttcacattttatgtgtcatgtcttttgctgaagtcccatatcagaagaagacctaaaacatatattcagagcagtcagaggtcattgataggtttccttcctaaaaacctgacttgcaatgttgaactaaaagaggccttcctaggttgcctagctaaaccagattatggatccctaatttattcttgccagattgaatgatgagctggtccttacagcagactttgtgacccctgcagcactgcctcctggtcctcacagctatccctttttctgtgcctttgctggggaaaaacagtaaccatcacattttgcacgcatctggcttgcttccacttgacactcttgggtcacgtgcagatgactgtgccagtcagtggaaagtctatagtgatggcaccatgactctctctgcctctggaacccttaactgggggggaaggggacagtgggaaagaaagtttcaggcgttgatagcagctctcctccctctgccctggtcatgtctcccttttctggcctctttcaatcctgtttatgccttgcccttcctaaccaggcctttgctgtgttgcttatcttctcacattccatagttgtgtgtccaagtagaggtctgttacggcttttgcagaatggatccttgctcagggaaagtattcacaccatctggcacagaggtccctttcaacctgaggatgaaagcctgcattatattcttaagcaaagccttccctgacccccagtgcccatgtaagctcaccacagcacttaccacctagaatttcaatggtggttacgtctctctccactacgctgtgaacagcttgaggatagggaatttgccaactctgttatggtccttgcacccagaataggacgttcttgcccaaacccaccattcttgggatctcaagttcataagcgtcctgttgaaggccctcattcttatagttagccctggggagtccagttctgttaagatgctttcatcaaaaacttcacagttgctcttctgtgctctactctgtagttgggccacactgagcagattctttggtagaattttcaacttgagactaacacaagtatttccttttctgttcag

SEQ ID NO: 735140 - DNA, 19042 bp, Homo sapiens
gtaagggtctttacatggtttccagatagttcattagttgttgctttctttttttgtctgttttctgttttttttttttaaataactgtggtatgatgtaataggaacttataatttctgagttgcttatttttcctttacagttatagtaaagttatactcatttattttctcctgctttctgcagagtaaaatactgatttttgtctagaaacaagacagtgcaagacaatgttgaaagtgaaattctatgttaaaatatgccagatttattttaagaatttaatatctgtagtcagttatcaatacaaccaaattacataattatgcatgataataggtaaatactgagaagttcacctcattttcttgttaaaggatttggctattaccgtatgtgtcagttagtactcttttgtatggtagtgaaagaaaactcaacccaaactgattcatgaagaagaaagtaaatctggttagatgtggtttgaattaggtaattcatgtcatgaggactcagatctcccatctctatttctacgttccacttttgcattggcttcattttcggttaggttctcccttggtggtggtaaggtggttgtagcaatgtcagcctcccatttttggaaccgagtccataggaggctattctttctagaccttaataggagtaacacaattattgctcatcaccctagctttggccatgtgtcaaatcctgaccagtcacaatttcacagtcatagattctaccctggagctgggatgttactggcctcactagaaacacattgctgatagggtagaaggtgtgttcatcctacccaacccgacccgcaccaaagtcagaatagggaaaaacagatgttgggtgacatgcaactaacgtctgccgtactacactgaagatatttttctatgtttattctccagtgaaagagcttatatttgtggtacataggggattttgttttaatttagaaaatttaattgtagaaaacatgttttataaccctttctctgtactttgttctatatcaggaattgacttgattagataaggtgacatagggtatcttaggccctacaagatagtaaaccccccatcacttgaaagtattcagtagaggcttaaaaaacattattaaaggatgtggttattaggggactttaagaaatgaatatgaaattgaagtaggaaatctttaagctactctgtgagttatgccttttaaaagcaatttgtaattcctgtagatttcttttaaatttaggcagtttcataaatgactatagcatcattttagcaaatttgtgatcctgtaagaggaggataagtgttttttgtttgtttgtttgttttttgtttttttgagacagagtctcactttgtaccccagaaagtaaatctagttagatgtggtttgtctcggctcactgcaacctccaccccgtgcgttctagcaattctcctgcctcagccaccacacctggcctaagaggggaggataagtgttttagtgatcatattagactgaatgtggcagatgagatttcccgcccccccattgttggttagactgacattcaacattcaacaagagccacctgcccttgtaggcatttctgccactatacccctacataaacctagagtgctattgcttacttgctttccttcaaatacattttttcatttgtggcctccacattcttgtgtgtgatgtcctttctctgtgaaatgtcttctaccctttttttcaaagcctagtttagaactgacctcttctatgaaccctctgccgactggcctttccttccccagtcccccaagttcaaaatgatctctttcctttgaatactatagtatttgcacaattcactatctccttatcatattcttcttgtttatttgttatcagctgatgttgacatcataagttcaggttcctaactagatccaatattggaatttttcagcttttgctaagaagagagcttgtatgtctttgggaataatgggcagaaaaagataactttgagaagtcttagacttctaatagctttgatatttaaaagtacatgtaatacaagaggtttttttcctacatttaatgcatggagaagataggacatttagaaatatggaattaatgttcatttgactggcaaaagattattttctcagatgtagtgaagtgtggtaaagaacttcactctagagccagaatgtctgtgtttgtatcccagagcccaccacttacatttaaccattaacattcaacttactgtctctgagtttcagtggcctcatctataaaatgaggataataagagtacctacttcatagagttgttttagtggttaaataaactaacgtaaacttgctagaacttgataaactaatattggatgagaactggttgaaataatgcctggctatagtaaaaacttggtaaatgttagttgccattacaatgcaactactgttcctaccattccctctgccagtgcctggtattcagtagcactcagtaaatgttagttaaatgaagaaataactgaaggaatgaatgaacaaatggttgatgtagagattgcttttccattgttgtttattgaatattttgagatgtataacatactgtctgttaggcactgtgggatgggcactcacggagctgtcttccaaaggggtataggagaggagacgcagtgatctcagcaacctacctttaaaacatatcctagtatctactgccatgttaggttctcttcttttgctttttttaaaaaaaaattctcacaaaactccccccacccacttcagtttatagatgaggaagctcctactacataatagtgcttcccagtctaattcttgacctcattgtatttatatgtcctttttttttttgacagagtctcactcattgcagtggcacaatcacagctcactgcaacctctgcctcccctgctcaagtgatcctcccacctcaacctcctgagtagctgggactacaggcatgcaccaccacgcctggctaatttttgtatttttttgtagagatgcggttttgccatgttggccaggctggtctcgaactcctgggctcaagccatctgcccactttggcctctgagagtgctgagattataggcatgagccaccattcccagccatgttttcctttttcattgaactttatctactttagccattaaactccactccattggtcttgtcattactaagagctgaaccacctgcaaaatattaagttaaaaagcgttttctttgacaacagttttcttttcttcatcttcctctatcactttacttctgaacttttattctctcattttgatctgacccctacttctctgtttttcctggccatttagtactttcttgttttgctcatcccatttcccagtggagaccttctggtctgctgctttatcactggttttgttagaagacatacaaatggcaaggaggtatatgaaaaggtgcctaacatcattgatcatcagagaaatgcagaccaaaactacaatgagatatcatttcaccccagttaaaatggctttttttttttttttccaaaagacaggcaataacaaagtactggtgaggatgtggagtaaagggaacccacatacactattagtaggaatgtaaattagtacagccactgtggagaacagtttgaaggttcctcaaaaaactaaaaatagagctaccatataatccagcaatcccactgctaggtatatatccaaaagaaaggcaatcaatatacggaagagatacctgcacacccaggtttattgcagcactattcacaatagccaagatttggaagcaacccaggtgtccaacagatgaatggataaagaaaacatggtatataaacacaatggaatactattcagctgtgaaaaagaatgaaatcctgtcatttgcaatcctgtcttgaatagaactggaggtcatgatgttaagtgaaataagacaggcacaaacttcacatgttctcacttatttgtgggagctaaaaattaaaacaatcgaactcatggagctagagaatagaattatggttaccagaggctggaagggtggttgggcgtataagtgtagggggagtggggatggttaatgggtacaaaaaaatgagaacgaataagatctacttgataacacaacagggtgactatagtcaacagtaattatacatttaaaaataactagaagagtataattagattgtaacacaaaagataaatgcttgaggtgatggatacctatttaccctgatgtgattattacttatttcatgcctatatcaaaatatttatactccaaaaatatatatacctactatgtacccacaaaaatttaaaaatttatatattgtttttgctatcacctttagaatttcttgtcattggatagttcgtctgtataccattctggtcttcattccccagggcccccgttgtctgatttttctgcttctagaactgttagaggtcacaaaagcaagatggttgtatctatcacaatttttgtctgactttaactgggtatctgttacgatttagtagtcatcttactgacttcttgttggtttccaattgaatcctcacagtagactgttttcattgtaatcagtatcgaattatagcctgttcccttcttcataaatgaaggctttcttcttcaacagttcttagtgacttcacctgtactttatttctctgctttgaatatttcgaagaaaacatattcttgctctttcccaaggttaacactacatacattaccttgaccacaggatgttttcttgcagattgtgacctaattccatcacccttcagcagcccccaccgttttcatggattcagctaaaccttctgtaagatgactctttttccccctaatctttatatctcttttgatatgtagctttagtctcactttttttccttttggattttgccagttagatgtctccctggaattccacttcagcatggctaagactaagcttgtcttctctttcctccccaaagcaaattgtaattaggatagactgaaggtgacagaagataactaagatcttcttcatcctttcggctcttatggaagctgaattccagtagtcattctaaatttgttgtatgtcagcttatggtatcttttcatgtctttacattcagccaaagaggaagttccttgaaggggagaccagagggcgtgctgtgcttcttaatcctctctttcttaaccagtaagaggcattcagtagatatctgatgatactgattaatagaggggaacttttcagattcttttttttttttaaccctagtaagctttagtacaaactaaatgctgagagattatcaagtaagggattgatcatcacaagaagactcaggatgttacatcctgtaggttttatagtttcctatattgtaaaaaatatgagttatagcagcttgtctggatgtcatacaggtataaaaatcagttttataaacttgagtaaattggggcccattttagaaaaaactcttgcaggctgtgaatgccaatatataagtaaagtattaagtataatgttatttaatgtgggcaaacataaagccaggtgtaaattttttaggtttaaaatcttatagaactatacatccaaaagaaaatttcaagttaaacataatacaaagcaatacaatctaaattaacattaatttaatgtgatgaatgatattgccttgctaaaagtgggtcactacttacaatgtgcaaatggtactcatcgttagggtatagattcttttaaactatgacatacgtacactaccatgtggaacgtgatgatgtgttctctgttctaactactgggaagacttccttggcatagcacatgccatggggtcagttggctttgacttcatatagatatgccatttacttggtcagtgtcacttctatgacaagtagtatgttgtgccagtttgattataagtacaaatatgggcaatgaagtaacttggttttaaggttgttactaagctgagtaacagtgtgtggctatacaaatttttataggctatcaggaatgaaaacacaggagattgttgtagattcaagtattttagattcaagtttgaagatgctcatgcagatgtttaactgagttgtatagacctttatgtttctttctttttctctttttttttttttgagacagagtcttgctctgtcacccaagctggagtgcaatggtgtgatctcggcttactgcaacctccgcctcccaggttcaagcaattctcctgcctcagcctcccaagtagctgggattacagatgtgcaccacgacgcccagctgattttttgtattttagtagaggcggggtctcaccatgttgtcaagatggtctcaatctcctgaccttgtgatccacccacctctgcctcccaaagtgctgtgattacaggcgtgagccaccgcgcctgactgacctttatgtttcttaactttatgctatacatcagttgatatttcaaaaatttaaatggtttctatgattattctttgggctaagaaattgggcattaattgtcctcatatgtatggtttttgtggctacttcatgtagattttatttttggtggttatcaaattggaatttttttttttttttttttttttgagacggagtctcattctgtttcccaggttggagtacagtggtgcaatctcagctcactgcagcctcgacctcccaggctcaagcagtcctctcacctcagccttctaagtagctgggactacaggcacgcaccaccacacctggctagttttttgtgtttttagtagagatggggttttaccctgttggccaggctggtcttgaactcctggcctcaagtgatccacctgcctcagcctcccaaagtgctgggattagaggcatgagccaccacacctggctgaaattggaatttcattggtactgcctgtaattttatgttaatttttttttttttttgtcgtcactagcttttatctaaagcccctagagagaaaggccatgataccttgtatacaaggttataagagtatacaagggaaagggagggctgaagggaacagggtgggctggtacaagcctcattagaaataccattgagtctgtgagtaaaacatcattatatgaaaaggagatgtggttttagggtggtccaattacttttgcaccagcctaataaaattacaagtcattatcaatagagacattgtaaaacctttttttttcccaaaagaagtatcaggtatgataattacatgtctgcccaactttcgttatagattaacataacttaattgtatttaaggtacaatttaggagagttgctgaaaaatgaatctttagtattgggatgccttgattctaccctcaatagctataatggattatgtgtctgagtagattaataaaaatcttttgagcatttttcttgaactacttcactgaagattagctttttgagcatccattttaatttctcagtatataaggatcggtttatcacaactgtattgttttccctggccttgttagattatattttcatatcatgtagaaaaataggtgtattcgttctcccttgaagtcctttgtctcccaaaggaaatggttgcaatacagatgtgtcacctcttccacaggtaaagtggaatggagaagtagccagttaaatagtgcatgctcaatttggaacatttagagcatacaggaaagttatttatttggtaaatattttttaagcatttactatgtttcatgcattgtactagttgtagaggatataattgaatacaactacatgtagcccttgactttatggaactagtctagtataaagatttaagattgcctggcatggtggctcacgccactaatcccagcactttgagaggccaaggcaggattgcttgaggccagaagtttaagagtagcttggtcaacataatgagactccatctctaaaataaatagatagatagatagatagatagatagatagatagatagatagaagtagttagacaacacaaagcagtttcactcatcttgtggcaaggagttatgtatttctaatcaaatttggcaactcaagcattttcaacaaaatctacatgttttttcagaataaagtgaccaacacagaatgttacctgtaaaaatcagagcaataattgctatctaaaataattttgaaaattaagtggtactgaaaggctcatatagcaaaaatatggcctcctgtcattgtactttcctacttcccagactcaccattttcaacattttttagtagtttattttgccattttatagcatagtacctgacattttatttattcaacagacatttcttaagtacctaatacatgccattccttgtttgaagggatgctaaggatacagtggtgaacaaggcgttgtggggttgtatagagggtattcattcctaaccttgaaccaaatatttctttctgttggataatgcattaaaaattgcaaacagtttacaaacttttggagcaatggtggccttgatcataaagtagggactgcttctaccgtatacatgcttggtggtgtatttgtgatatctggctaaagtttctacatggaaattgactgactttagttttgagacttctgggaaccagtcaggcaaaatagtgaaactgtgtatcctgtttccaagagttgtcttttaaggttatctgcttcattcatttggcctgacttgctaggcaaatgcctagggtaaatatgatttgattaactataacaacaacagcaacaacaacaactttattttttagagcagtttgaggttcacagcaaaattgagcagaatgtacagagattttccctatacccgcttcccctacgcatgtgcggcctcccctactatcaacatcccccaccagagtggtttgttacaattaatgaacctacattgacacatcattatcactcaaggtccgtagtttacattagagtccactcttggtgttgtgtatgggtttggtcgattttataatgacatttatccaccattatagtgtcatacatagtaattttgctaccctaaaaatccagtgtgctccacctgttcctccttccctcctccctcatccctggcaaccactgaactttttaacatctccatagttttgccttttccagaatgtcatatcattggaatcacacagtatgcagccttttcaaatgggcttctttccgttagtaataggcatttaagtttcatcctcatcttttcatggcttgatagctcatttctttccctccctcttttcttccctgtcttccttccttcctcttctttcctgtttcctctttcttcttccttttttaagagacaaggtgtctcactctgttgcccaggctggagtgcagtggcccaatcatagctcattgcagccttgaattcctgggctcaagtgatcctcctgcgttagcctcctgagtagctgggatcacaggctccagtcattttagtgctgaataatatttcattatctggatgtaccgcctattcattcacctactgaagaatatcttggttgcttctaagttttggcaattatgagtgaagttactataaacattgtatacaagttttatgtggatgtatgttgtcatctcccttgggcagataccaaggagtgccattgttggatcatatggtaaatatatctttagttttgtacagaattctaggttggtatttttttctctctcagtcctttattttatttggagacagtctcgctatgtcgcccaggctgccatacagtggtgccatctgggctcactgaaacctccacctcccaggttcaagcgattcttgtgccttggcctcccaagtagctgggattacaggagtgcgccaccacgcctgctaatttttgtatttttagtagagacagggttttgccatgttgcccaggctggtctcaaactcctgaccttaagtgattcacccacctcaatctcccaaaatcctgggattacaggcctgagctactgtgcctgatctctctcagtactttaaagaaatatttcattccacttttcttttttttcttctttttgagatggagtctcactctgtcgcctgggctggagtgcagtggcgcgatctcagctcactgccacctccgcctcctgggttcaagtgattctcctgcctcagcctcctgaatagctgagattacaggcgcccaccaccatgcccagctaattttttgcatttttagtagagacgggggttccaccatgttggccaggctggtctcgaactcctgacctcgtgattcgcacatctcggcctcccaaattgctgggattacaggtgtgagctaccacgcctggcccactcttcttgcttacatagtttctgaggagatgtcagatgtaatttttatttttgctcttctgtaggcaagttgagttttttccccctctagcttctctcaggatttttttctttatctttgattttcagtagtttgaaaattatatgcctagctgtcagggttttttgcttgtttgtttttgttttctcaggtgtgactccagaaaggttctaaagaggagctttacaatctcttctctggggtttatggagacttcctttacccttctgtgttagccccttaaagcactgcgtcaaccttaaaagggcacaggaaagggtgtctatgccatttttatgccatttatcctgcttggtgttttctgagctttcttcatctgcggtttaatgtctcacattaatttgtagaaattctctgtcattgtttcaaatttttcttcagttcttttctctgtttcttcttctggtgttcccattatgcttttgtggttgtcgtacagttattggatattttgttccaggcttttttttttccagtctttttttccttttgcttctcggttttgtaggtgtctgttgagatactctcaagtgcagatattctttcctcagctttgtctagtttactaataagcccattaaaggcagtcttcatttctgttacagtctttttgatcagtagcatttcttttttattctttcttaaaatttctgtctttctgcttacattgcccatctgttcttgcatggtttctactttgtccattagagttcttaggatatttatcataattatttcaaatttctggtgtaacaattccaacatccctgcaacatccaagtctagtttcgatgcttactgtgtctcttccagctgtgttttttcctatttaatatgtcttataattttttcttgatagccatacatgatgcattaggtaacagaaactgctgtgagtggacctttagtaatgtggtggtaaggtgtgcatggaggggaaacattttcagtctgttagtgaacttttgtcaacttcacatgtgcttctcaagtccatcctgtaagtgggagagtagggctagagaggactgaagttgggtatatattaaatactttctcctacaaagaagcctagaggggacgcattaggggattttttttcccccagtattcactgtgatgacccttattgagctcctggaggtaaaactcacaaaactgtggttctcccccctgcccatattactacatgtccctggagtttatatctttcagacttgtctgcactgagcttccaccaatttgtcaaatacagatcaggtttccctaccacccgtgcagttgaaaacccacatacaacttttgactcctccagagcttaactactcatagcctgctattgactggaagccttgccaataacataaacagttgattaatacatattttatatgttttctgtattatatattgtattcttacaataaagagaaaagaagatgttattaagaaaatcataaggaagataaaatatatttactgttcattaagtggttcccatgggtgctggttcccatggaggttgccccttgtgagtttttgctcagggaagttgtgattctctatatttgcctgttggtctcctaatttgggagtcatcagttttccctgtgacctcacttctcttacagagttaagaacagttgttggtttttcagtttgttcagtgttttacatgttgttagaacacagtggtacttctaagtttcttaacatgctagatcagaaacctgaagtctcacctaatttggctttttatattttttcttcttttttttcttccattgctaccaaagcatttttcatctgtgtctggggtgacattagagcagaatgtgatttctaggtaaacattattgggctccctagcagaaaaatttttgaaagtagtacatgaattctgtataattaaaattttcttttcatcttaataggtataggtaataggcacggcctattttttttttgctcaacagtctaaaatagtaatttaatcacctaatagccttagttatatagttgaaagaagagttggaaatctgattcatgggttggaaatcacctgtcacatatgagttttaggcactggtcactttattttgaaacagctttggggttttttcctttttcaactcataataggctttaacagcttttagttttgtttctgtttttttaacagcatgagttgccaaatttggttatagcttcttggtacaagatgggtaaatttgctttgtgttgtgtaattactttttattttaaatgctacctcttttatgaacactaactttacactaagattaggaaaatgagaattgcatgtctgcaacaaatagctatctgtagtattaaattgtgaaaatgtagactttggattggagctggcatctcttaatatgtaattgtaacatagagtaaataagtattttgtcccttgtagggtcaaacagtacagtgcatgggcagaattagagatgtaggcttttttttttttttttttttttactggcttagagaaccgtttgatcagctaatatggaattaagtccctagggctgcccaggcacaacattaactgctattaaaggaaaatttaaaagagtattagtgaaggttaaatactgaccatggacatctggcaaaattgatgttttttttcccctccaccattgtttatagtttattgttatttatcagagaattaatgtttattttcagaatctattaccataagaaatctgtttgaggacttcgtatgtgccaggaattctactaaataatgatataatgctgaacagaattagataggatcctcacttcgttaagcttacagtctagtggtatagatcaacattaatcaaagaataacacaaatagaaagcagagcagtggttcatgggattgactgtagagaagcatgagggaagttcccaggtgatggaaaatactttatttcttaatcgtggtggttacatgtgtgcatatgtttatgaaaatatattgtacatttaaagtggatacattttatcacatgtaaattatgactctataaagttaattaaaaagaataactcaggtaaggtggtgtgtgcgcctgtagtcccagctatttctgaggcaggaagatcacttgagcccaggagtttgagttcagcatgggcaacatgagacctgtgagactttgtctctaaaaaaatttaaataaataactaagataaatgtaaaattacagctgtagtaagttctacaaaggagagttacatgggctatgacgatgtaagatagcaagaactgacattggcagggaggaaatgatgatgagtagaagtaaataagtgaagtgtggggattgatgtcaaggggacagtataaaagaaataacagcatgcgccaaggccctaaaattggaaagtccttggcaaattaaaggagtttgaaaaaggccattgtgtgcaaagcagaaaataggtactacaaggtaaaagatggagctaagcggtaggtaaggctaaaccttgtcagccattgttaaatattgaattgtatcctaagcacaactcagtggaaagcagttaaagttctttaattgggggaggcaatgaaggggtaataaaattggttatagaaatactgctctggctctagtgttgagaatgaattggagtagccagagtagattcaagaagactttagtaagattattccaacaggccaggacctgttatagggtggtggcaatggagagagatggacagaatggagagtgtatttaggaggtaaaaatgacagaacttggtgatgcactgaatgtgaaatggggaaggtgtctaggaggactactaggtttatggtttgcgtattagggtggatgatagcagtttcatttactgagacagggagccctggcagagtacccagcttttagagtgggtagggggaaggggagagtgcatctggtgttgggcattttgaagtgatttacatacaacaaactgaaggtatctttaacactgagtccagcaggttagcatatttattcagcaagcattgcacctttttttgttgtttttggggtcttcaactcctggcctcgaatcctccctccttcccccgcctctcccagcctccgcctcccaaagtgctgggatttcaggagtgagccaccgcgcctggccagcatcgcgctgtttgtgcagtgtgccctgtgctaggtcttgcagtgggtaccagtagagacataaaagtacaaaagataattggacgtttagtagagtcctgaaagggggcgggataggaagatacctaaccataagaaaaaccagcaagagcggaaaaggagctagtcctccagatcaataagttaatcacttatgtttgtgattccctgcattttgggtgattctctgtcgaggtcctcttaagtccagacttttgatataatctgcagtttgcgccatttggattcctgaagcatctttacaagccacctacattccttatggagctgtggcacaacagcaagcccacgatgtctcaccggattaataaaaatataggcgctcacgcttttgtttaccgatatagtatctcctcctcccctcactccatcaacccccacgcgacacaactttccggaagtaagcaaaatccgttatcaaggtgaaactccggggaccaggctccacagctgccataaactggatggcacgttagaagccggtgggtgtaggtgaggcacgctggcgcccgcgggcccttctccagccgctacccagtgggaatccgcggggctgaagccccgaaaccaggctgagcgtcccagagcgcaacctccctttcccccagcagcgccggcgccgcagaagccgcgtgtccccaggcgcactcccccaaggtgaacccccgccccccacggaggcggctgggtcgcgggtctgggcggggcgctccggacgccctcccgccgctgcgcacccctcccgcgagctgccagctccctcggcctctccacccaaaactggcccaaccgccaatcgtctgcctctcacctcctacagcaggtgacccatggccaatcgccaggggtctctttgccaggagccgccagggccagccaatcggggcgacccctccgccggggaggggacgggaaaggggtggggggtgaagggggtgaagggggtgtcccgggggacgggctgaacctcagtcaggaccgcctgcaccgcagtccggggatcgggtcgaggggagaagaaaaaggggtgctcgggagcagcccccggctacctcccctggaggcacagagggcgggggccttggcgaatggctttcttgctggccacttgcggagtgagtagaccccgagggtctgggagaggggccggcccctacccctgagtccccggggtcccggccgccaggccggagcgcgaatgtcgtgctcaccctgcctccttcccgccgccccctgggctttttgatgacaagcttcaaaactgcaaagaagatgaacagagaaagaaaattgaaactctcaaagagacaacaaatagcatggtagaatcaattaaacactgcattgtgttgctgcagattgccaaaagtactattaatcccgtagatgcaatatatcaacctagtcctttggaacctgtgatcagcacaatgccttcccagactgtgttacctccagaacctgttcagttgtgtaagtcagagcagcgtccatcttccctaccagttggacctgtgttggctaccttgggacatcatcagactcctacaccaaatagtacaggcagtggccattcaccaccgagtagcagtctcacttctccaagccacgtgaacttgtctccaaatacagtcccagagttctcttactccagcagtgaagatgaattttatgatgctgatgaattccatcaaagtggctcatccccaaagcgcttaatagattcttctggatctgcctcagtcctgacacacagcagctcgggaaatagtctaaaacgcccagataccacagaatcacttaattcttccttgtccaatggaacaagtgatgctgacctgtttgattcacatgatgacagagatgatgatgcggaggcagggtctgtggaggagcacaagagcgttatcatgcatctcttgtcgcaggttagacttggaatggatcttactaaggtagttcttccaacgtttattcttgaaagaagatctcttttagaaatgtatgcagacttttttgcacatccggacctgtttgtgagcattagtgaccagaaggatcccaaggatcgaatggttcaggttgtgaaatggtacctctcagcctttcatgcgggaaggaaaggatcagttgccaaaaagccatacaatcccattttgggcgagatttttcagtgtcattggacattaccaaatgatactgaagagaacacagaactagtttcagaaggaccagttccctgggtttccaaaaacagtgtaacatttgtggctgagcaggtttcccatcatccacccatttcagccttttatgctgagtgttttaacaagaagatacaattcaatgctcatatctggaccaaatcaaaattccttgggatgtcaattggggtgcacaacatagggcagggctgtgtctcatgtctagactatgatgaacattacattctcacattccccaatggctatggaaggtctatcctcacagtgccctgggtggaattaggaggagaatgcaatattaattgttccaaaacaggctatagtgcaaatatcatcttccacactaaacccttctatgggggcaagaagcacagaattactgccgagattttttctccaaatgacaagaagtctttttgctcaattgaaggggaatggaatggtgtgatgtatgcaaaatatgcaacaggggaaaatacagtctttgtagataccaagaagttgcctataatcaagaagaaagtgaggaagttggaagatcagaacgagtatgaatcccgcagcctttggaaggatgtcactttcaacttaaaaatcagagacattgatgcagcaactgaagcaaagcacaggcttgaagaaagacaaagagcagaagcccgagaaaggaaggagaaggaaattcagtgggagacaaggttatttcatgaagatggagaatgctgggtttatgatgaaccattactgaaacgtcttggtgctgccaagcattaggttggaagatgcaaagtttatacctgatgatcagggcagtaggcataattcagcaacaaacaatcttcctttgggagaaacctgttcattccaatcttctaattacagtggttcctatctcagggatactggactttctgacgcagatgaacaattaaggggaaaagcttcccttttccctctgtggcagttacgattttgacttcagtcctgagaaaaacttcaggttttgaaaatcagatgatgtcttctccttttccaaacaccacacgttgaaagcatttataaatccaagtctgaaactctgcgctctagtactgctgttaagatacacaacttgtttcttagttcatataatctcgggatacacacacacacacacatatatatacacacacatacgtatacacacacatacatatatataaatatacctgatgccagatttttttcataaatattctgcctactgtaaatatgggttcctctgagttgttttagaaaattagcgcaatgtattaaaatcaagtgttaggaaatttcatggtcttacctacaataacttttattttggaattgaactattattaaattgtatctaatcctggattacagtttaattaattattcttagtgcttaaggcttcataaagtaatttttccaacctttttttaaaaagagcatcttttattatcttttatggttaaacttggaagccaattatttggcaaccttgaatacaagagctagcttttcaaagaaagacacttgaaataatggaggatccattcttttcctctgtcagattgtatgttctgtctttagcccctgccaggcaattccccagaatcttcacttaactcatattgcacatgtagggctgcctaccaacattttatccaaaaatgttttattgccttagagggtttgggaagagtgtgtatttatagatccccaccccacagtgaacaaaaatagatagatagatagaataaaatgaatgccacagcagcagatggctcattctgaagggaaatacagaactatatctatctatctatctatcatcttttttatttaaaaatacattaaaaaaacaggtattagtacctagcatttagttagttattcaatatactggttacgtaaggcctttcaagaagtagattctcagtctgagaggacacaggccagggcttctcaaagtgctgctgcaggctttctggtctcgcttggcc

SEQ ID NO: 735141 - DNA, 19084 bp, Homo sapiens
  misc_feature (19084)..(19084): n is a, c, g, or t
gtaagggtctttacatggtttccagatagttcattagttgttgctttctttttttgtctgttttctgttttttttttttaaataactgtggtatgatgtaataggaacttataatttctgagttgcttatttttcctttacagttatagtaaagttatactcatttattttctcctgctttctgcagagtaaaatactgatttttgtctagaaacaagacagtgcaagacaatgttgaaagtgaaattctatgttaaaatatgccagatttattttaagaatttaatatctgtagtcagttatcaatacaaccaaattacataattatgcatgataataggtaaatactgagaagttcacctcattttcttgttaaaggatttggctattaccgtatgtgtcagttagtactcttttgtatggtagtgaaagaaaactcaacccaaactgattcatgaagaagaaagtaaatctggttagatgtggtttgaattaggtaattcatgtcatgaggactcagatctcccatctctatttctacgttccacttttgcattggcttcattttcggttaggttctcccttggtggtggtaaggtggttgtagcaatgtcagcctcccatttttggaaccgagtccataggaggctattctttctagaccttaataggagtaacacaattattgctcatcaccctagctttggccatgtgtcaaatcctgaccagtcacaatttcacagtcatagattctaccctggagctgggatgttactggcctcactagaaacacattgctgatagggtagaaggtgtgttcatcctacccaacccgacccgcaccaaagtcagaatagggaaaaacagatgttgggtgacatgcaactaacgtctgccgtactacactgaagatatttttctatgtttattctccagtgaaagagcttatatttgtggtacataggggattttgttttaatttagaaaatttaattgtagaaaacatgttttataaccctttctctgtactttgttctatatcaggaattgacttgattagataaggtgacatagggtatcttaggccctacaagatagtaaaccccccatcacttgaaagtattcagtagaggcttaaaaaacattattaaaggatgtggttattaggggactttaagaaatgaatatgaaattgaagtaggaaatctttaagctactctgtgagttatgccttttaaaagcaatttgtaattcctgtagatttcttttaaatttaggcagtttcataaatgactatagcatcattttagcaaatttgtgatcctgtaagaggaggataagtgttttttgtttgtttgtttgttttttgtttttttgagacagagtctcactttgtaccccagaaagtaaatctagttagatgtggtttgtctcggctcactgcaacctccaccccgtgcgttctagcaattctcctgcctcagccaccacacctggcctaagaggggaggataagtgttttagtgatcatattagactgaatgtggcagatgagatttcccgcccccccattgttggttagactgacattcaacattcaacaagagccacctgcccttgtaggcatttctgccactatacccctacataaacctagagtgctattgcttacttgctttccttcaaatacattttttcatttgtggcctccacattcttgtgtgtgatgtcctttctctgtgaaatgtcttctaccctttttttcaaagcctagtttagaactgacctcttctatgaaccctctgccgactggcctttccttccccagtcccccaagttcaaaatgatctctttcctttgaatactatagtatttgcacaattcactatctccttatcatattcttcttgtttatttgttatcagctgatgttgacatcataagttcaggttcctaactagatccaatattggaatttttcagcttttgctaagaagagagcttgtatgtctttgggaataatgggcagaaaaagataactttgagaagtcttagacttctaatagctttgatatttaaaagtacatgtaatacaagaggtttttttcctacatttaatgcatggagaagataggacatttagaaatatggaattaatgttcatttgactggcaaaagattattttctcagatgtagtgaagtgtggtaaagaacttcactctagagccagaatgtctgtgtttgtatcccagagcccaccacttacatttaaccattaacattcaacttactgtctctgagtttcagtggcctcatctataaaatgaggataataagagtacctacttcatagagttgttttagtggttaaataaactaacgtaaacttgctagaacttgataaactaatattggatgagaactggttgaaataatgcctggctatagtaaaaacttggtaaatgttagttgccattacaatgcaactactgttcctaccattccctctgccagtgcctggtattcagtagcactcagtaaatgttagttaaatgaagaaataactgaaggaatgaatgaacaaatggttgatgtagagattgcttttccattgttgtttattgaatattttgagatgtataacatactgtctgttaggcactgtgggatgggcactcacggagctgtcttccaaaggggtataggagaggagacgcagtgatctcagcaacctacctttaaaacatatcctagtatctactgccatgttaggttctcttcttttgctttttttaaaaaaaaattctcacaaaactccccccacccacttcagtttatagatgaggaagctcctactacataatagtgcttcccagtctaattcttgacctcattgtatttatatgtcctttttttttttgacagagtctcactcattgcagtggcacaatcacagctcactgcaacctctgcctcccctgctcaagtgatcctcccacctcaacctcctgagtagctgggactacaggcatgcaccaccacgcctggctaatttttgtatttttttgtagagatgcggttttgccatgttggccaggctggtctcgaactcctgggctcaagccatctgcccactttggcctctgagagtgctgagattataggcatgagccaccattcccagccatgttttcctttttcattgaactttatctactttagccattaaactccactccattggtcttgtcattactaagagctgaaccacctgcaaaatattaagttaaaaagcgttttctttgacaacagttttcttttcttcatcttcctctatcactttacttctgaacttttattctctcattttgatctgacccctacttctctgtttttcctggccatttagtactttcttgttttgctcatcccatttcccagtggagaccttctggtctgctgctttatcactggttttgttagaagacatacaaatggcaaggaggtatatgaaaaggtgcctaacatcattgatcatcagagaaatgcagaccaaaactacaatgagatatcatttcaccccagttaaaatggctttttttttttttttccaaaagacaggcaataacaaagtactggtgaggatgtggagtaaagggaacccacatacactattagtaggaatgtaaattagtacagccactgtggagaacagtttgaaggttcctcaaaaaactaaaaatagagctaccatataatccagcaatcccactgctaggtatatatccaaaagaaaggcaatcaatatacggaagagatacctgcacacccaggtttattgcagcactattcacaatagccaagatttggaagcaacccaggtgtccaacagatgaatggataaagaaaacatggtatataaacacaatggaatactattcagctgtgaaaaagaatgaaatcctgtcatttgcaatcctgtcttgaatagaactggaggtcatgatgttaagtgaaataagacaggcacaaacttcacatgttctcacttatttgtgggagctaaaaattaaaacaatcgaactcatggagctagagaatagaattatggttaccagaggctggaagggtggttgggcgtataagtgtagggggagtggggatggttaatgggtacaaaaaaatgagaacgaataagatctacttgataacacaacagggtgactatagtcaacagtaattatacatttaaaaataactagaagagtataattagattgtaacacaaaagataaatgcttgaggtgatggatacctatttaccctgatgtgattattacttatttcatgcctatatcaaaatatttatactccaaaaatatatatacctactatgtacccacaaaaatttaaaaatttatatattgtttttgctatcacctttagaatttcttgtcattggatagttcgtctgtataccattctggtcttcattccccagggcccccgttgtctgatttttctgcttctagaactgttagaggtcacaaaagcaagatggttgtatctatcacaatttttgtctgactttaactgggtatctgttacgatttagtagtcatcttactgacttcttgttggtttccaattgaatcctcacagtagactgttttcattgtaatcagtatcgaattatagcctgttcccttcttcataaatgaaggctttcttcttcaacagttcttagtgacttcacctgtactttatttctctgctttgaatatttcgaagaaaacatattcttgctctttcccaaggttaacactacatacattaccttgaccacaggatgttttcttgcagattgtgacctaattccatcacccttcagcagcccccaccgttttcatggattcagctaaaccttctgtaagatgactctttttccccctaatctttatatctcttttgatatgtagctttagtctcactttttttccttttggattttgccagttagatgtctccctggaattccacttcagcatggctaagactaagcttgtcttctctttcctccccaaagcaaattgtaattaggatagactgaaggtgacagaagataactaagatcttcttcatcctttcggctcttatggaagctgaattccagtagtcattctaaatttgttgtatgtcagcttatggtatcttttcatgtctttacattcagccaaagaggaagttccttgaaggggagaccagagggcgtgctgtgcttcttaatcctctctttcttaaccagtaagaggcattcagtagatatctgatgatactgattaatagaggggaacttttcagattcttttttttttttaaccctagtaagctttagtacaaactaaatgctgagagattatcaagtaagggattgatcatcacaagaagactcaggatgttacatcctgtaggttttatagtttcctatattgtaaaaaatatgagttatagcagcttgtctggatgtcatacaggtataaaaatcagttttataaacttgagtaaattggggcccattttagaaaaaactcttgcaggctgtgaatgccaatatataagtaaagtattaagtataatgttatttaatgtgggcaaacataaagccaggtgtaaattttttaggtttaaaatcttatagaactatacatccaaaagaaaatttcaagttaaacataatacaaagcaatacaatctaaattaacattaatttaatgtgatgaatgatattgccttgctaaaagtgggtcactacttacaatgtgcaaatggtactcatcgttagggtatagattcttttaaactatgacatacgtacactaccatgtggaacgtgatgatgtgttctctgttctaactactgggaagacttccttggcatagcacatgccatggggtcagttggctttgacttcatatagatatgccatttacttggtcagtgtcacttctatgacaagtagtatgttgtgccagtttgattataagtacaaatatgggcaatgaagtaacttggttttaaggttgttactaagctgagtaacagtgtgtggctatacaaatttttataggctatcaggaatgaaaacacaggagattgttgtagattcaagtattttagattcaagtttgaagatgctcatgcagatgtttaactgagttgtatagacctttatgtttctttctttttctctttttttttttttgagacagagtcttgctctgtcacccaagctggagtgcaatggtgtgatctcggcttactgcaacctccgcctcccaggttcaagcaattctcctgcctcagcctcccaagtagctgggattacagatgtgcaccacgacgcccagctgattttttgtattttagtagaggcggggtctcaccatgttgtcaagatggtctcaatctcctgaccttgtgatccacccacctctgcctcccaaagtgctgtgattacaggcgtgagccaccgcgcctgactgacctttatgtttcttaactttatgctatacatcagttgatatttcaaaaatttaaatggtttctatgattattctttgggctaagaaattgggcattaattgtcctcatatgtatggtttttgtggctacttcatgtagattttatttttggtggttatcaaattggaatttttttttttttttttttttttgagacggagtctcattctgtttcccaggttggagtacagtggtgcaatctcagctcactgcagcctcgacctcccaggctcaagcagtcctctcacctcagccttctaagtagctgggactacaggcacgcaccaccacacctggctagttttttgtgtttttagtagagatggggttttaccctgttggccaggctggtcttgaactcctggcctcaagtgatccacctgcctcagcctcccaaagtgctgggattagaggcatgagccaccacacctggctgaaattggaatttcattggtactgcctgtaattttatgttaatttttttttttttttgtcgtcactagcttttatctaaagcccctagagagaaaggccatgataccttgtatacaaggttataagagtatacaagggaaagggagggctgaagggaacagggtgggctggtacaagcctcattagaaataccattgagtctgtgagtaaaacatcattatatgaaaaggagatgtggttttagggtggtccaattacttttgcaccagcctaataaaattacaagtcattatcaatagagacattgtaaaacctttttttttcccaaaagaagtatcaggtatgataattacatgtctgcccaactttcgttatagattaacataacttaattgtatttaaggtacaatttaggagagttgctgaaaaatgaatctttagtattgggatgccttgattctaccctcaatagctataatggattatgtgtctgagtagattaataaaaatcttttgagcatttttcttgaactacttcactgaagattagctttttgagcatccattttaatttctcagtatataaggatcggtttatcacaactgtattgttttccctggccttgttagattatattttcatatcatgtagaaaaataggtgtattcgttctcccttgaagtcctttgtctcccaaaggaaatggttgcaatacagatgtgtcacctcttccacaggtaaagtggaatggagaagtagccagttaaatagtgcatgctcaatttggaacatttagagcatacaggaaagttatttatttggtaaatattttttaagcatttactatgtttcatgcattgtactagttgtagaggatataattgaatacaactacatgtagcccttgactttatggaactagtctagtataaagatttaagattgcctggcatggtggctcacgccactaatcccagcactttgagaggccaaggcaggattgcttgaggccagaagtttaagagtagcttggtcaacataatgagactccatctctaaaataaatagatagatagatagatagatagatagatagatagatagatagaagtagttagacaacacaaagcagtttcactcatcttgtggcaaggagttatgtatttctaatcaaatttggcaactcaagcattttcaacaaaatctacatgttttttcagaataaagtgaccaacacagaatgttacctgtaaaaatcagagcaataattgctatctaaaataattttgaaaattaagtggtactgaaaggctcatatagcaaaaatatggcctcctgtcattgtactttcctacttcccagactcaccattttcaacattttttagtagtttattttgccattttatagcatagtacctgacattttatttattcaacagacatttcttaagtacctaatacatgccattccttgtttgaagggatgctaaggatacagtggtgaacaaggcgttgtggggttgtatagagggtattcattcctaaccttgaaccaaatatttctttctgttggataatgcattaaaaattgcaaacagtttacaaacttttggagcaatggtggccttgatcataaagtagggactgcttctaccgtatacatgcttggtggtgtatttgtgatatctggctaaagtttctacatggaaattgactgactttagttttgagacttctgggaaccagtcaggcaaaatagtgaaactgtgtatcctgtttccaagagttgtcttttaaggttatctgcttcattcatttggcctgacttgctaggcaaatgcctagggtaaatatgatttgattaactataacaacaacagcaacaacaacaactttattttttagagcagtttgaggttcacagcaaaattgagcagaatgtacagagattttccctatacccgcttcccctacgcatgtgcggcctcccctactatcaacatcccccaccagagtggtttgttacaattaatgaacctacattgacacatcattatcactcaaggtccgtagtttacattagagtccactcttggtgttgtgtatgggtttggtcgattttataatgacatttatccaccattatagtgtcatacatagtaattttgctaccctaaaaatccagtgtgctccacctgttcctccttccctcctccctcatccctggcaaccactgaactttttaacatctccatagttttgccttttccagaatgtcatatcattggaatcacacagtatgcagccttttcaaatgggcttctttccgttagtaataggcatttaagtttcatcctcatcttttcatggcttgatagctcatttctttccctccctcttttcttccctgtcttccttccttcctcttctttcctgtttcctctttcttcttccttttttaagagacaaggtgtctcactctgttgcccaggctggagtgcagtggcccaatcatagctcattgcagccttgaattcctgggctcaagtgatcctcctgcgttagcctcctgagtagctgggatcacaggctccagtcattttagtgctgaataatatttcattatctggatgtaccgcctattcattcacctactgaagaatatcttggttgcttctaagttttggcaattatgagtgaagttactataaacattgtatacaagttttatgtggatgtatgttgtcatctcccttgggcagataccaaggagtgccattgttggatcatatggtaaatatatctttagttttgtacagaattctaggttggtatttttttctctctcagtcctttattttatttggagacagtctcgctatgtcgcccaggctgccatacagtggtgccatctgggctcactgaaacctccacctcccaggttcaagcgattcttgtgccttggcctcccaagtagctgggattacaggagtgcgccaccacgcctgctaatttttgtatttttagtagagacagggttttgccatgttgcccaggctggtctcaaactcctgaccttaagtgattcacccacctcaatctcccaaaatcctgggattacaggcctgagctactgtgcctgatctctctcagtactttaaagaaatatttcattccacttttcttttttttcttctttttgagatggagtctcactctgtcgcctgggctggagtgcagtggcgcgatctcagctcactgccacctccgcctcctgggttcaagtgattctcctgcctcagcctcctgaatagctgagattacaggcgcccaccaccatgcccagctaattttttgcatttttagtagagacgggggttccaccatgttggccaggctggtctcgaactcctgacctcgtgattcgcacatctcggcctcccaaattgctgggattacaggtgtgagctaccacgcctggcccactcttcttgcttacatagtttctgaggagatgtcagatgtaatttttatttttgctcttctgtaggcaagttgagttttttccccctctagcttctctcaggatttttttctttatctttgattttcagtagtttgaaaattatatgcctagctgtcagggttttttgcttgtttgtttttgttttctcaggtgtgactccagaaaggttctaaagaggagctttacaatctcttctctggggtttatggagacttcctttacccttctgtgttagccccttaaagcactgcgtcaaccttaaaagggcacaggaaagggtgtctatgccatttttatgccatttatcctgcttggtgttttctgagctttcttcatctgcggtttaatgtctcacattaatttgtagaaattctctgtcattgtttcaaatttttcttcagttcttttctctgtttcttcttctggtgttcccattatgcttttgtggttgtcgtacagttattggatattttgttccaggcttttttttttccagtctttttttccttttgcttctcggttttgtaggtgtctgttgagatactctcaagtgcagatattctttcctcagctttgtctagtttactaataagcccattaaaggcagtcttcatttctgttacagtctttttgatcagtagcatttcttttttattctttcttaaaatttctgtctttctgcttacattgcccatctgttcttgcatggtttctactttgtccattagagttcttaggatatttatcataattatttcaaatttctggtgtaacaattccaacatccctgcaacatccaagtctagtttcgatgcttactgtgtctcttccagctgtgttttttcctatttaatatgtcttataattttttcttgatagccatacatgatgcattaggtaacagaaactgctgtgagtggacctttagtaatgtggtggtaaggtgtgcatggaggggaaacattttcagtctgttagtgaacttttgtcaacttcacatgtgcttctcaagtccatcctgtaagtgggagagtagggctagagaggactgaagttgggtatatattaaatactttctcctacaaagaagcctagaggggacgcattaggggattttttttcccccagtattcactgtgatgacccttattgagctcctggaggtaaaactcacaaaactgtggttctcccccctgcccatattactacatgtccctggagtttatatctttcagacttgtctgcactgagcttccaccaatttgtcaaatacagatcaggtttccctaccacccgtgcagttgaaaacccacatacaacttttgactcctccagagcttaactactcatagcctgctattgactggaagccttgccaataacataaacagttgattaatacatattttatatgttttctgtattatatattgtattcttacaataaagagaaaagaagatgttattaagaaaatcataaggaagataaaatatatttactgttcattaagtggttcccatgggtgctggttcccatggaggttgccccttgtgagtttttgctcagggaagttgtgattctctatatttgcctgttggtctcctaatttgggagtcatcagttttccctgtgacctcacttctcttacagagttaagaacagttgttggtttttcagtttgttcagtgttttacatgttgttagaacacagtggtacttctaagtttcttaacatgctagatcagaaacctgaagtctcacctaatttggctttttatattttttcttcttttttttcttccattgctaccaaagcatttttcatctgtgtctggggtgacattagagcagaatgtgatttctaggtaaacattattgggctccctagcagaaaaatttttgaaagtagtacatgaattctgtataattaaaattttcttttcatcttaataggtataggtaataggcacggcctattttttttttgctcaacagtctaaaatagtaatttaatcacctaatagccttagttatatagttgaaagaagagttggaaatctgattcatgggttggaaatcacctgtcacatatgagttttaggcactggtcactttattttgaaacagctttggggttttttcctttttcaactcataataggctttaacagcttttagttttgtttctgtttttttaacagcatgagttgccaaatttggttatagcttcttggtacaagatgggtaaatttgctttgtgttgtgtaattactttttattttaaatgctacctcttttatgaacactaactttacactaagattaggaaaatgagaattgcatgtctgcaacaaatagctatctgtagtattaaattgtgaaaatgtagactttggattggagctggcatctcttaatatgtaattgtaacatagagtaaataagtattttgtcccttgtagggtcaaacagtacagtgcatgggcagaattagagatgtaggcttttttttttttttttttttttactggcttagagaaccgtttgatcagctaatatggaattaagtccctagggctgcccaggcacaacattaactgctattaaaggaaaatttaaaagagtattagtgaaggttaaatactgaccatggacatctggcaaaattgatgttttttttcccctccaccattgtttatagtttattgttatttatcagagaattaatgtttattttcagaatctattaccataagaaatctgtttgaggacttcgtatgtgccaggaattctactaaataatgatataatgctgaacagaattagataggatcctcacttcgttaagcttacagtctagtggtatagatcaacattaatcaaagaataacacaaatagaaagcagagcagtggttcatgggattgactgtagagaagcatgagggaagttcccaggtgatggaaaatactttatttcttaatcgtggtggttacatgtgtgcatatgtttatgaaaatatattgtacatttaaagtggatacattttatcacatgtaaattatgactctataaagttaattaaaaagaataactcaggtaaggtggtgtgtgcgcctgtagtcccagctatttctgaggcaggaagatcacttgagcccaggagtttgagttcagcatgggcaacatgagacctgtgagactttgtctctaaaaaaatttaaataaataactaagataaatgtaaaattacagctgtagtaagttctacaaaggagagttacatgggctatgacgatgtaagatagcaagaactgacattggcagggaggaaatgatgatgagtagaagtaaataagtgaagtgtggggattgatgtcaaggggacagtataaaagaaataacagcatgcgccaaggccctaaaattggaaagtccttggcaaattaaaggagtttgaaaaaggccattgtgtgcaaagcagaaaataggtactacaaggtaaaagatggagctaagcggtaggtaaggctaaaccttgtcagccattgttaaatattgaattgtatcctaagcacaactcagtggaaagcagttaaagttctttaattgggggaggcaatgaaggggtaataaaattggttatagaaatactgctctggctctagtgttgagaatgaattggagtagccagagtagattcaagaagactttagtaagattattccaacaggccaggacctgttatagggtggtggcaatggagagagatggacagaatggagagtgtatttaggaggtaaaaatgacagaacttggtgatgcactgaatgtgaaatggggaaggtgtctaggaggactactaggtttatggtttgcgtattagggtggatgatagcagtttcatttactgagacagggagccctggcagagtacccagcttttagagtgggtagggggaaggggagagtgcatctggtgttgggcattttgaagtgatttacatacaacaaactgaaggtatctttaacactgagtccagcaggttagcatatttattcagcaagcattgcacctttttttgttgtttttggggtcttcaactcctggcctcgaatcctccctccttcccccgcctctcccagcctccgcctcccaaagtgctgggatttcaggagtgagccaccgcgcctggccagcatcgcgctgtttgtgcagtgtgccctgtgctaggtcttgcagtgggtaccagtagagacataaaagtacaaaagataattggacgtttagtagagtcctgaaagggggcgggataggaagatacctaaccataagaaaaaccagcaagagcggaaaaggagctagtcctccagatcaataagttaatcacttatgtttgtgattccctgcattttgggtgattctctgtcgaggtcctcttaagtccagacttttgatataatctgcagtttgcgccatttggattcctgaagcatctttacaagccacctacattccttatggagctgtggcacaacagcaagcccacgatgtctcaccggattaataaaaatataggcgctcacgcttttgtttaccgatatagtatctcctcctcccctcactccatcaacccccacgcgacacaactttccggaagtaagcaaaatccgttatcaaggtgaaactccggggaccaggctccacagctgccataaactggatggcacgttagaagccggtgggtgtaggtgaggcacgctggcgcccgcgggcccttctccagccgctacccagtgggaatccgcggggctgaagccccgaaaccaggctgagcgtcccagagcgcaacctccctttcccccagcagcgccggcgccgcagaagccgcgtgtccccaggcgcactcccccaaggtgaacccccgccccccacggaggcggctgggtcgcgggtctgggcggggcgctccggacgccctcccgccgctgcgcacccctcccgcgagctgccagctccctcggcctctccacccaaaactggcccaaccgccaatcgtctgcctctcacctcctacagcaggtgacccatggccaatcgccaggggtctctttgccaggagccgccagggccagccaatcggggcgacccctccgccggggaggggacgggaaaggggtggggggtgaagggggtgaagggggtgtcccgggggacgggctgaacctcagtcaggaccgcctgcaccgcagtccggggatcgggtcgaggggagaagaaaaaggggtgctcgggagcagcccccggctacctcccctggaggcacagagggcgggggccttggcgaatggctttcttgctggccacttgcggagtgagtagaccccgagggtctgggagaggggccggcccctacccctgagtccccggggtcccggccgccaggccggagcgcgaatgtcgtgctcaccctgcctccttcccgccgccccctgggctttttgatgacaagcttcaaaactgcaaagaagatgaacagagaaagaaaattgaaactctcaaagagacaacaaatagcatggtagaatcaattaaacactgcattgtgttgctgcagattgccaaaagtactattaatcccgtagatgcaatatatcaacctagtcctttggaacctgtgatcagcacaatgccttcccagactgtgttacctccagaacctgttcagttgtgtaagtcagagcagcgtccatcttccctaccagttggacctgtgttggctaccttgggacatcatcagactcctacaccaaatagtacaggcagtggccattcaccaccgagtagcagtctcacttctccaagccacgtgaacttgtctccaaatacagtcccagagttctcttactccagcagtgaagatgaattttatgatgctgatgaattccatcaaagtggctcatccccaaagcgcttaatagattcttctggatctgcctcagtcctgacacacagcagctcgggaaatagtctaaaacgcccagataccacagaatcacttaattcttccttgtccaatggaacaagtgatgctgacctgtttgattcacatgatgacagagatgatgatgcggaggcagggtctgtggaggagcacaagagcgttatcatgcatctcttgtcgcaggttagacttggaatggatcttactaaggtagttcttccaacgtttattcttgaaagaagatctcttttagaaatgtatgcagacttttttgcacatccggacctgtttgtgagcattagtgaccagaaggatcccaaggatcgaatggttcaggttgtgaaatggtacctctcagcctttcatgcgggaaggaaaggatcagttgccaaaaagccatacaatcccattttgggcgagatttttcagtgtcattggacattaccaaatgatactgaagagaacacagaactagtttcagaaggaccagttccctgggtttccaaaaacagtgtaacatttgtggctgagcaggtttcccatcatccacccatttcagccttttatgctgagtgttttaacaagaagatacaattcaatgctcatatctggaccaaatcaaaattccttgggatgtcaattggggtgcacaacatagggcagggctgtgtctcatgtctagactatgatgaacattacattctcacattccccaatggctatggaaggtctatcctcacagtgccctgggtggaattaggaggagaatgcaatattaattgttccaaaacaggctatagtgcaaatatcatcttccacactaaacccttctatgggggcaagaagcacagaattactgccgagattttttctccaaatgacaagaagtctttttgctcaattgaaggggaatggaatggtgtgatgtatgcaaaatatgcaacaggggaaaatacagtctttgtagataccaagaagttgcctataatcaagaagaaagtgaggaagttggaagatcagaacgagtatgaatcccgcagcctttggaaggatgtcactttcaacttaaaaatcagagacattgatgcagcaactgaagcaaagcacaggcttgaagaaagacaaagagcagaagcccgagaaaggaaggagaaggaaattcagtgggagacaaggttatttcatgaagatggagaatgctgggtttatgatgaaccattactgaaacgtcttggtgctgccaagcattaggttggaagatgcaaagtttatacctgatgatcagggcagtaggcataattcagcaacaaacaatcttcctttgggagaaacctgttcattccaatcttctaattacagtggttcctatctcagggatactggactttctgacgcagatgaacaattaaggggaaaagcttcccttttccctctgtggcagttacgattttgacttcagtcctgagaaaaacttcaggttttgaaaatcagatgatgtcttctccttttccaaacaccacacgttgaaagcatttataaatccaagtctgaaactctgcgctctagtactgctgttaagatacacaacttgtttcttagttcatataatctcgggatacacacacacacacacatatatatacacacacatacgtatacacacacatacatatatataaatatacctgatgccagatttttttcataaatattctgcctactgtaaatatgggttcctctgagttgttttagaaaattagcgcaatgtattaaaatcaagtgttaggaaatttcatggtcttacctacaataacttttattttggaattgaactattattaaattgtatctaatcctggaaaaaaaaaaaaaaaaaaaaaaaaaaaaaaaacaaaaaaaagaacaaaataaaaaaaaagaaaacaacaaaaaaaaaaacaacaaaaaacaaaagagagggaggaggcgcaacaagcacaacgaagcactaccccgggagggggcacgccgcacacagaacgccggagcggcacgcccggaccccactatctagaaacgacaaagcgtgtgcccacacaaaacaaaagtaaaaagagcgcagacttatcaatcagacacacgccaagcgacgagacgcggccgcagatcctcaacaaacacagcacactgaatagcaaggtggagagaaacacaacctggtggctgacgcagcgacacacatcctgcgaaggaaaagacgagacactcacactaccatgggagagtggaggagcaaaacaacacacaggcgagaagaacaacaaaaacccagccacaccagcaaacataaacacgccaccatgacaacggcgacaacacaacaacgaccacgtctcaagcccgagtcactaactgagcacagacaacaccgcacacacaactacaatcagccgcggaacaaaggacaactaactacgaacgacaaccgactgatcagagcagagacaaacactcaactccaaccgagggagcgatcaaagaacaaataaggan

SEQ ID NO: 735142 - DNA, 18573 bp, Homo sapiens
gtaagggtctttacatggtttccagatagttcattagttgttgctttctttttttgtctgttttctgttttttttttttaaataactgtggtatgatgtaataggaacttataatttctgagttgcttatttttcctttacagttatagtaaagttatactcatttattttctcctgctttctgcagagtaaaatactgatttttgtctagaaacaagacagtgcaagacaatgttgaaagtgaaattctatgttaaaatatgccagatttattttaagaatttaatatctgtagtcagttatcaatacaaccaaattacataattatgcatgataataggtaaatactgagaagttcacctcattttcttgttaaaggatttggctattaccgtatgtgtcagttagtactcttttgtatggtagtgaaagaaaactcaacccaaactgattcatgaagaagaaagtaaatctggttagatgtggtttgaattaggtaattcatgtcatgaggactcagatctcccatctctatttctacgttccacttttgcattggcttcattttcggttaggttctcccttggtggtggtaaggtggttgtagcaatgtcagcctcccatttttggaaccgagtccataggaggctattctttctagaccttaataggagtaacacaattattgctcatcaccctagctttggccatgtgtcaaatcctgaccagtcacaatttcacagtcatagattctaccctggagctgggatgttactggcctcactagaaacacattgctgatagggtagaaggtgtgttcatcctacccaacccgacccgcaccaaagtcagaatagggaaaaacagatgttgggtgacatgcaactaacgtctgccgtactacactgaagatatttttctatgtttattctccagtgaaagagcttatatttgtggtacataggggattttgttttaatttagaaaatttaattgtagaaaacatgttttataaccctttctctgtactttgttctatatcaggaattgacttgattagataaggtgacatagggtatcttaggccctacaagatagtaaaccccccatcacttgaaagtattcagtagaggcttaaaaaacattattaaaggatgtggttattaggggactttaagaaatgaatatgaaattgaagtaggaaatctttaagctactctgtgagttatgccttttaaaagcaatttgtaattcctgtagatttcttttaaatttaggcagtttcataaatgactatagcatcattttagcaaatttgtgatcctgtaagaggaggataagtgttttttgtttgtttgtttgttttttgtttttttgagacagagtctcactttgtaccccagaaagtaaatctagttagatgtggtttgtctcggctcactgcaacctccaccccgtgcgttctagcaattctcctgcctcagccaccacacctggcctaagaggggaggataagtgttttagtgatcatattagactgaatgtggcagatgagatttcccgcccccccattgttggttagactgacattcaacattcaacaagagccacctgcccttgtaggcatttctgccactatacccctacataaacctagagtgctattgcttacttgctttccttcaaatacattttttcatttgtggcctccacattcttgtgtgtgatgtcctttctctgtgaaatgtcttctaccctttttttcaaagcctagtttagaactgacctcttctatgaaccctctgccgactggcctttccttccccagtcccccaagttcaaaatgatctctttcctttgaatactatagtatttgcacaattcactatctccttatcatattcttcttgtttatttgttatcagctgatgttgacatcataagttcaggttcctaactagatccaatattggaatttttcagcttttgctaagaagagagcttgtatgtctttgggaataatgggcagaaaaagataactttgagaagtcttagacttctaatagctttgatatttaaaagtacatgtaatacaagaggtttttttcctacatttaatgcatggagaagataggacatttagaaatatggaattaatgttcatttgactggcaaaagattattttctcagatgtagtgaagtgtggtaaagaacttcactctagagccagaatgtctgtgtttgtatcccagagcccaccacttacatttaaccattaacattcaacttactgtctctgagtttcagtggcctcatctataaaatgaggataataagagtacctacttcatagagttgttttagtggttaaataaactaacgtaaacttgctagaacttgataaactaatattggatgagaactggttgaaataatgcctggctatagtaaaaacttggtaaatgttagttgccattacaatgcaactactgttcctaccattccctctgccagtgcctggtattcagtagcactcagtaaatgttagttaaatgaagaaataactgaaggaatgaatgaacaaatggttgatgtagagattgcttttccattgttgtttattgaatattttgagatgtataacatactgtctgttaggcactgtgggatgggcactcacggagctgtcttccaaaggggtataggagaggagacgcagtgatctcagcaacctacctttaaaacatatcctagtatctactgccatgttaggttctcttcttttgctttttttaaaaaaaaattctcacaaaactccccccacccacttcagtttatagatgaggaagctcctactacataatagtgcttcccagtctaattcttgacctcattgtatttatatgtcctttttttttttgacagagtctcactcattgcagtggcacaatcacagctcactgcaacctctgcctcccctgctcaagtgatcctcccacctcaacctcctgagtagctgggactacaggcatgcaccaccacgcctggctaatttttgtatttttttgtagagatgcggttttgccatgttggccaggctggtctcgaactcctgggctcaagccatctgcccactttggcctctgagagtgctgagattataggcatgagccaccattcccagccatgttttcctttttcattgaactttatctactttagccattaaactccactccattggtcttgtcattactaagagctgaaccacctgcaaaatattaagttaaaaagcgttttctttgacaacagttttcttttcttcatcttcctctatcactttacttctgaacttttattctctcattttgatctgacccctacttctctgtttttcctggccatttagtactttcttgttttgctcatcccatttcccagtggagaccttctggtctgctgctttatcactggttttgttagaagacatacaaatggcaaggaggtatatgaaaaggtgcctaacatcattgatcatcagagaaatgcagaccaaaactacaatgagatatcatttcaccccagttaaaatggctttttttttttttttccaaaagacaggcaataacaaagtactggtgaggatgtggagtaaagggaacccacatacactattagtaggaatgtaaattagtacagccactgtggagaacagtttgaaggttcctcaaaaaactaaaaatagagctaccatataatccagcaatcccactgctaggtatatatccaaaagaaaggcaatcaatatacggaagagatacctgcacacccaggtttattgcagcactattcacaatagccaagatttggaagcaacccaggtgtccaacagatgaatggataaagaaaacatggtatataaacacaatggaatactattcagctgtgaaaaagaatgaaatcctgtcatttgcaatcctgtcttgaatagaactggaggtcatgatgttaagtgaaataagacaggcacaaacttcacatgttctcacttatttgtgggagctaaaaattaaaacaatcgaactcatggagctagagaatagaattatggttaccagaggctggaagggtggttgggcgtataagtgtagggggagtggggatggttaatgggtacaaaaaaatgagaacgaataagatctacttgataacacaacagggtgactatagtcaacagtaattatacatttaaaaataactagaagagtataattagattgtaacacaaaagataaatgcttgaggtgatggatacctatttaccctgatgtgattattacttatttcatgcctatatcaaaatatttatactccaaaaatatatatacctactatgtacccacaaaaatttaaaaatttatatattgtttttgctatcacctttagaatttcttgtcattggatagttcgtctgtataccattctggtcttcattccccagggcccccgttgtctgatttttctgcttctagaactgttagaggtcacaaaagcaagatggttgtatctatcacaatttttgtctgactttaactgggtatctgttacgatttagtagtcatcttactgacttcttgttggtttccaattgaatcctcacagtagactgttttcattgtaatcagtatcgaattatagcctgttcccttcttcataaatgaaggctttcttcttcaacagttcttagtgacttcacctgtactttatttctctgctttgaatatttcgaagaaaacatattcttgctctttcccaaggttaacactacatacattaccttgaccacaggatgttttcttgcagattgtgacctaattccatcacccttcagcagcccccaccgttttcatggattcagctaaaccttctgtaagatgactctttttccccctaatctttatatctcttttgatatgtagctttagtctcactttttttccttttggattttgccagttagatgtctccctggaattccacttcagcatggctaagactaagcttgtcttctctttcctccccaaagcaaattgtaattaggatagactgaaggtgacagaagataactaagatcttcttcatcctttcggctcttatggaagctgaattccagtagtcattctaaatttgttgtatgtcagcttatggtatcttttcatgtctttacattcagccaaagaggaagttccttgaaggggagaccagagggcgtgctgtgcttcttaatcctctctttcttaaccagtaagaggcattcagtagatatctgatgatactgattaatagaggggaacttttcagattcttttttttttttaaccctagtaagctttagtacaaactaaatgctgagagattatcaagtaagggattgatcatcacaagaagactcaggatgttacatcctgtaggttttatagtttcctatattgtaaaaaatatgagttatagcagcttgtctggatgtcatacaggtataaaaatcagttttataaacttgagtaaattggggcccattttagaaaaaactcttgcaggctgtgaatgccaatatataagtaaagtattaagtataatgttatttaatgtgggcaaacataaagccaggtgtaaattttttaggtttaaaatcttatagaactatacatccaaaagaaaatttcaagttaaacataatacaaagcaatacaatctaaattaacattaatttaatgtgatgaatgatattgccttgctaaaagtgggtcactacttacaatgtgcaaatggtactcatcgttagggtatagattcttttaaactatgacatacgtacactaccatgtggaacgtgatgatgtgttctctgttctaactactgggaagacttccttggcatagcacatgccatggggtcagttggctttgacttcatatagatatgccatttacttggtcagtgtcacttctatgacaagtagtatgttgtgccagtttgattataagtacaaatatgggcaatgaagtaacttggttttaaggttgttactaagctgagtaacagtgtgtggctatacaaatttttataggctatcaggaatgaaaacacaggagattgttgtagattcaagtattttagattcaagtttgaagatgctcatgcagatgtttaactgagttgtatagacctttatgtttctttctttttctctttttttttttttgagacagagtcttgctctgtcacccaagctggagtgcaatggtgtgatctcggcttactgcaacctccgcctcccaggttcaagcaattctcctgcctcagcctcccaagtagctgggattacagatgtgcaccacgacgcccagctgattttttgtattttagtagaggcggggtctcaccatgttgtcaagatggtctcaatctcctgaccttgtgatccacccacctctgcctcccaaagtgctgtgattacaggcgtgagccaccgcgcctgactgacctttatgtttcttaactttatgctatacatcagttgatatttcaaaaatttaaatggtttctatgattattctttgggctaagaaattgggcattaattgtcctcatatgtatggtttttgtggctacttcatgtagattttatttttggtggttatcaaattggaatttttttttttttttttttttttgagacggagtctcattctgtttcccaggttggagtacagtggtgcaatctcagctcactgcagcctcgacctcccaggctcaagcagtcctctcacctcagccttctaagtagctgggactacaggcacgcaccaccacacctggctagttttttgtgtttttagtagagatggggttttaccctgttggccaggctggtcttgaactcctggcctcaagtgatccacctgcctcagcctcccaaagtgctgggattagaggcatgagccaccacacctggctgaaattggaatttcattggtactgcctgtaattttatgttaatttttttttttttttgtcgtcactagcttttatctaaagcccctagagagaaaggccatgataccttgtatacaaggttataagagtatacaagggaaagggagggctgaagggaacagggtgggctggtacaagcctcattagaaataccattgagtctgtgagtaaaacatcattatatgaaaaggagatgtggttttagggtggtccaattacttttgcaccagcctaataaaattacaagtcattatcaatagagacattgtaaaacctttttttttcccaaaagaagtatcaggtatgataattacatgtctgcccaactttcgttatagattaacataacttaattgtatttaaggtacaatttaggagagttgctgaaaaatgaatctttagtattgggatgccttgattctaccctcaatagctataatggattatgtgtctgagtagattaataaaaatcttttgagcatttttcttgaactacttcactgaagattagctttttgagcatccattttaatttctcagtatataaggatcggtttatcacaactgtattgttttccctggccttgttagattatattttcatatcatgtagaaaaataggtgtattcgttctcccttgaagtcctttgtctcccaaaggaaatggttgcaatacagatgtgtcacctcttccacaggtaaagtggaatggagaagtagccagttaaatagtgcatgctcaatttggaacatttagagcatacaggaaagttatttatttggtaaatattttttaagcatttactatgtttcatgcattgtactagttgtagaggatataattgaatacaactacatgtagcccttgactttatggaactagtctagtataaagatttaagattgcctggcatggtggctcacgccactaatcccagcactttgagaggccaaggcaggattgcttgaggccagaagtttaagagtagcttggtcaacataatgagactccatctctaaaataaatagatagatagatagatagatagatagatagatagatagatagaagtagttagacaacacaaagcagtttcactcatcttgtggcaaggagttatgtatttctaatcaaatttggcaactcaagcattttcaacaaaatctacatgttttttcagaataaagtgaccaacacagaatgttacctgtaaaaatcagagcaataattgctatctaaaataattttgaaaattaagtggtactgaaaggctcatatagcaaaaatatggcctcctgtcattgtactttcctacttcccagactcaccattttcaacattttttagtagtttattttgccattttatagcatagtacctgacattttatttattcaacagacatttcttaagtacctaatacatgccattccttgtttgaagggatgctaaggatacagtggtgaacaaggcgttgtggggttgtatagagggtattcattcctaaccttgaaccaaatatttctttctgttggataatgcattaaaaattgcaaacagtttacaaacttttggagcaatggtggccttgatcataaagtagggactgcttctaccgtatacatgcttggtggtgtatttgtgatatctggctaaagtttctacatggaaattgactgactttagttttgagacttctgggaaccagtcaggcaaaatagtgaaactgtgtatcctgtttccaagagttgtcttttaaggttatctgcttcattcatttggcctgacttgctaggcaaatgcctagggtaaatatgatttgattaactataacaacaacagcaacaacaacaactttattttttagagcagtttgaggttcacagcaaaattgagcagaatgtacagagattttccctatacccgcttcccctacgcatgtgcggcctcccctactatcaacatcccccaccagagtggtttgttacaattaatgaacctacattgacacatcattatcactcaaggtccgtagtttacattagagtccactcttggtgttgtgtatgggtttggtcgattttataatgacatttatccaccattatagtgtcatacatagtaattttgctaccctaaaaatccagtgtgctccacctgttcctccttccctcctccctcatccctggcaaccactgaactttttaacatctccatagttttgccttttccagaatgtcatatcattggaatcacacagtatgcagccttttcaaatgggcttctttccgttagtaataggcatttaagtttcatcctcatcttttcatggcttgatagctcatttctttccctccctcttttcttccctgtcttccttccttcctcttctttcctgtttcctctttcttcttccttttttaagagacaaggtgtctcactctgttgcccaggctggagtgcagtggcccaatcatagctcattgcagccttgaattcctgggctcaagtgatcctcctgcgttagcctcctgagtagctgggatcacaggctccagtcattttagtgctgaataatatttcattatctggatgtaccgcctattcattcacctactgaagaatatcttggttgcttctaagttttggcaattatgagtgaagttactataaacattgtatacaagttttatgtggatgtatgttgtcatctcccttgggcagataccaaggagtgccattgttggatcatatggtaaatatatctttagttttgtacagaattctaggttggtatttttttctctctcagtcctttattttatttggagacagtctcgctatgtcgcccaggctgccatacagtggtgccatctgggctcactgaaacctccacctcccaggttcaagcgattcttgtgccttggcctcccaagtagctgggattacaggagtgcgccaccacgcctgctaatttttgtatttttagtagagacagggttttgccatgttgcccaggctggtctcaaactcctgaccttaagtgattcacccacctcaatctcccaaaatcctgggattacaggcctgagctactgtgcctgatctctctcagtactttaaagaaatatttcattccacttttcttttttttcttctttttgagatggagtctcactctgtcgcctgggctggagtgcagtggcgcgatctcagctcactgccacctccgcctcctgggttcaagtgattctcctgcctcagcctcctgaatagctgagattacaggcgcccaccaccatgcccagctaattttttgcatttttagtagagacgggggttccaccatgttggccaggctggtctcgaactcctgacctcgtgattcgcacatctcggcctcccaaattgctgggattacaggtgtgagctaccacgcctggcccactcttcttgcttacatagtttctgaggagatgtcagatgtaatttttatttttgctcttctgtaggcaagttgagttttttccccctctagcttctctcaggatttttttctttatctttgattttcagtagtttgaaaattatatgcctagctgtcagggttttttgcttgtttgtttttgttttctcaggtgtgactccagaaaggttctaaagaggagctttacaatctcttctctggggtttatggagacttcctttacccttctgtgttagccccttaaagcactgcgtcaaccttaaaagggcacaggaaagggtgtctatgccatttttatgccatttatcctgcttggtgttttctgagctttcttcatctgcggtttaatgtctcacattaatttgtagaaattctctgtcattgtttcaaatttttcttcagttcttttctctgtttcttcttctggtgttcccattatgcttttgtggttgtcgtacagttattggatattttgttccaggcttttttttttccagtctttttttccttttgcttctcggttttgtaggtgtctgttgagatactctcaagtgcagatattctttcctcagctttgtctagtttactaataagcccattaaaggcagtcttcatttctgttacagtctttttgatcagtagcatttcttttttattctttcttaaaatttctgtctttctgcttacattgcccatctgttcttgcatggtttctactttgtccattagagttcttaggatatttatcataattatttcaaatttctggtgtaacaattccaacatccctgcaacatccaagtctagtttcgatgcttactgtgtctcttccagctgtgttttttcctatttaatatgtcttataattttttcttgatagccatacatgatgcattaggtaacagaaactgctgtgagtggacctttagtaatgtggtggtaaggtgtgcatggaggggaaacattttcagtctgttagtgaacttttgtcaacttcacatgtgcttctcaagtccatcctgtaagtgggagagtagggctagagaggactgaagttgggtatatattaaatactttctcctacaaagaagcctagaggggacgcattaggggattttttttcccccagtattcactgtgatgacccttattgagctcctggaggtaaaactcacaaaactgtggttctcccccctgcccatattactacatgtccctggagtttatatctttcagacttgtctgcactgagcttccaccaatttgtcaaatacagatcaggtttccctaccacccgtgcagttgaaaacccacatacaacttttgactcctccagagcttaactactcatagcctgctattgactggaagccttgccaataacataaacagttgattaatacatattttatatgttttctgtattatatattgtattcttacaataaagagaaaagaagatgttattaagaaaatcataaggaagataaaatatatttactgttcattaagtggttcccatgggtgctggttcccatggaggttgccccttgtgagtttttgctcagggaagttgtgattctctatatttgcctgttggtctcctaatttgggagtcatcagttttccctgtgacctcacttctcttacagagttaagaacagttgttggtttttcagtttgttcagtgttttacatgttgttagaacacagtggtacttctaagtttcttaacatgctagatcagaaacctgaagtctcacctaatttggctttttatattttttcttcttttttttcttccattgctaccaaagcatttttcatctgtgtctggggtgacattagagcagaatgtgatttctaggtaaacattattgggctccctagcagaaaaatttttgaaagtagtacatgaattctgtataattaaaattttcttttcatcttaataggtataggtaataggcacggcctattttttttttgctcaacagtctaaaatagtaatttaatcacctaatagccttagttatatagttgaaagaagagttggaaatctgattcatgggttggaaatcacctgtcacatatgagttttaggcactggtcactttattttgaaacagctttggggttttttcctttttcaactcataataggctttaacagcttttagttttgtttctgtttttttaacagcatgagttgccaaatttggttatagcttcttggtacaagatgggtaaatttgctttgtgttgtgtaattactttttattttaaatgctacctcttttatgaacactaactttacactaagattaggaaaatgagaattgcatgtctgcaacaaatagctatctgtagtattaaattgtgaaaatgtagactttggattggagctggcatctcttaatatgtaattgtaacatagagtaaataagtattttgtcccttgtagggtcaaacagtacagtgcatgggcagaattagagatgtaggcttttttttttttttttttttttactggcttagagaaccgtttgatcagctaatatggaattaagtccctagggctgcccaggcacaacattaactgctattaaaggaaaatttaaaagagtattagtgaaggttaaatactgaccatggacatctggcaaaattgatgttttttttcccctccaccattgtttatagtttattgttatttatcagagaattaatgtttattttcagaatctattaccataagaaatctgtttgaggacttcgtatgtgccaggaattctactaaataatgatataatgctgaacagaattagataggatcctcacttcgttaagcttacagtctagtggtatagatcaacattaatcaaagaataacacaaatagaaagcagagcagtggttcatgggattgactgtagagaagcatgagggaagttcccaggtgatggaaaatactttatttcttaatcgtggtggttacatgtgtgcatatgtttatgaaaatatattgtacatttaaagtggatacattttatcacatgtaaattatgactctataaagttaattaaaaagaataactcaggtaaggtggtgtgtgcgcctgtagtcccagctatttctgaggcaggaagatcacttgagcccaggagtttgagttcagcatgggcaacatgagacctgtgagactttgtctctaaaaaaatttaaataaataactaagataaatgtaaaattacagctgtagtaagttctacaaaggagagttacatgggctatgacgatgtaagatagcaagaactgacattggcagggaggaaatgatgatgagtagaagtaaataagtgaagtgtggggattgatgtcaaggggacagtataaaagaaataacagcatgcgccaaggccctaaaattggaaagtccttggcaaattaaaggagtttgaaaaaggccattgtgtgcaaagcagaaaataggtactacaaggtaaaagatggagctaagcggtaggtaaggctaaaccttgtcagccattgttaaatattgaattgtatcctaagcacaactcagtggaaagcagttaaagttctttaattgggggaggcaatgaaggggtaataaaattggttatagaaatactgctctggctctagtgttgagaatgaattggagtagccagagtagattcaagaagactttagtaagattattccaacaggccaggacctgttatagggtggtggcaatggagagagatggacagaatggagagtgtatttaggaggtaaaaatgacagaacttggtgatgcactgaatgtgaaatggggaaggtgtctaggaggactactaggtttatggtttgcgtattagggtggatgatagcagtttcatttactgagacagggagccctggcagagtacccagcttttagagtgggtagggggaaggggagagtgcatctggtgttgggcattttgaagtgatttacatacaacaaactgaaggtatctttaacactgagtccagcaggttagcatatttattcagcaagcattgcacctttttttgttgtttttggggtcttcaactcctggcctcgaatcctccctccttcccccgcctctcccagcctccgcctcccaaagtgctgggatttcaggagtgagccaccgcgcctggccagcatcgcgctgtttgtgcagtgtgccctgtgctaggtcttgcagtgggtaccagtagagacataaaagtacaaaagataattggacgtttagtagagtcctgaaagggggcgggataggaagatacctaaccataagaaaaaccagcaagagcggaaaaggagctagtcctccagatcaataagttaatcacttatgtttgtgattccctgcattttgggtgattctctgtcgaggtcctcttaagtccagacttttgatataatctgcagtttgcgccatttggattcctgaagcatctttacaagccacctacattccttatggagctgtggcacaacagcaagcccacgatgtctcaccggattaataaaaatataggcgctcacgcttttgtttaccgatatagtatctcctcctcccctcactccatcaacccccacgcgacacaactttccggaagtaagcaaaatccgttatcaaggtgaaactccggggaccaggctccacagctgccataaactggatggcacgttagaagccggtgggtgtaggtgaggcacgctggcgcccgcgggcccttctccagccgctacccagtgggaatccgcggggctgaagccccgaaaccaggctgagcgtcccagagcgcaacctccctttcccccagcagcgccggcgccgcagaagccgcgtgtccccaggcgcactcccccaaggtgaacccccgccccccacggaggcggctgggtcgcgggtctgggcggggcgctccggacgccctcccgccgctgcgcacccctcccgcgagctgccagctccctcggcctctccacccaaaactggcccaaccgccaatcgtctgcctctcacctcctacagcaggtgacccatggccaatcgccaggggtctctttgccaggagccgccagggccagccaatcggggcgacccctccgccggggaggggacgggaaaggggtggggggtgaagggggtgaagggggtgtcccgggggacgggctgaacctcagtcaggaccgcctgcaccgcagtccggggatcgggtcgaggggagaagaaaaaggggtgctcgggagcagcccccggctacctcccctggaggcacagagggcgggggccttggcgaatggctttcttgctggccacttgcggagtgagtagaccccgagggtctgggagaggggccggcccctacccctgagtccccggggtcccggccgccaggccggagcgcgaatgtcgtgctcaccctgcctccttcccgccgccccctgggctttttgatgacaagcttcaaaactgcaaagaagatgaacagagaaagaaaattgaaactctcaaagagacaacaaatagcatggtagaatcaattaaacactgcattgtgttgctgcagattgccaaaagtactattaatcccgtagatgcaatatatcaacctagtcctttggaacctgtgatcagcacaatgccttcccagactgtgttacctccagaacctgttcagttgtgtaagtcagagcagcgtccatcttccctaccagttggacctgtgttggctaccttgggacatcatcagactcctacaccaaatagtacaggcagtggccattcaccaccgagtagcagtctcacttctccaagccacgtgaacttgtctccaaatacagtcccagagttctcttactccagcagtgaagatgaattttatgatgctgatgaattccatcaaagtggctcatccccaaagcgcttaatagattcttctggatctgcctcagtcctgacacacagcagctcgggaaatagtctaaaacgcccagataccacagaatcacttaattcttccttgtccaatggaacaagtgatgctgacctgtttgattcacatgatgacagagatgatgatgcggaggcagggtctgtggaggagcacaagagcgttatcatgcatctcttgtcgcaggttagacttggaatggatcttactaaggtagttcttccaacgtttattcttgaaagaagatctcttttagaaatgtatgcagacttttttgcacatccggacctgtttgtgagcattagtgaccagaaggatcccaaggatcgaatggttcaggttgtgaaatggtacctctcagcctttcatgcgggaaggaaaggatcagttgccaaaaagccatacaatcccattttgggcgagatttttcagtgtcattggacattaccaaatgatactgaagagaacacagaactagtttcagaaggaccagttccctgggtttccaaaaacagtgtaacatttgtggctgagcaggtttcccatcatccacccatttcagccttttatgctgagtgttttaacaagaagatacaattcaatgctcatatctggaccaaatcaaaattccttgggatgtcaattggggtgcacaacatagggcagggctgtgtctcatgtctagactatgatgaacattacattctcacattccccaatggctatggaaggtctatcctcacagtgccctgggtggaattaggaggagaatgcaatattaattgttccaaaacaggctatagtgcaaatatcatcttccacactaaacccttctatgggggcaagaagcacagaattactgccgagattttttctccaaatgacaagaagtctttttgctcaattgaaggggaatggaatggtgtgatgtatgcaaaatatgcaacaggggaaaatacagtctttgtagataccaagaagttgcctataatcaagaagaaagtgaggaagttggaagatcagaacgagtatgaatcccgcagcctttggaaggatgtcactttcaacttaaaaatcagagacattgatgcagcaactgaagcaaagcacaggcttgaagaaagacaaagagcagaagcccgagaaaggaaggagaaggaaattcagtgggagacaaggttatttcatgaagatggagaatgctgggtttatgatgaaccattactgaaacgtcttggtgctgccaagcattaggttggaagatgcaaagtttatacctgatgatcagggcagtaggcataattcagcaacaaacaatcttcctttgggagaaacctgttcattccaatcttctaattacagtggttcctatctcagggatactggactttctgacgcagatgaacaattaaggggaaaagcttcccttttccctctgtggcagttacgattttgacttcagtcctgagaaaaacttcaggttttgaaaatcagatgatgtcttctccttttccaaacaccacacgttgaaagcatttataaatccaagtctgaaactctgcgctctagtactgctgttaagatacacaacttgtttcttagttcatataatctcgggatacacacacacacacacatatatatacacacacatacgtatacacacacatacatatatataaatatacctgatgccagatttttttcataaatattctgcctactgtaaatatgggttcctctgagttgttttagaaaattagcgcaatgtattaaaatcaagtgttaggaaatttcatggtcttacctacaataacttttattttggaattgaactattattaaattgtatctaatcctggaaaaaaaacaaaaatgctagtaaaatgataatgtaccgaaattggagaaatattcaattgtaactcacttttaaaaataataaaaccttagggggggtcccggtacaaatttccccttatagagggcggttttaaatttaattggcggcttttaacaacgtt

SEQ ID NO: 735143 - DNA, 18363 bp, Homo sapiens
  misc_feature (18287)..(18287): n is a, c, g, or t
  misc_feature (18298)..(18298): n is a, c, g, or t
  misc_feature (18303)..(18303): n is a, c, g, or t
  misc_feature (18306)..(18306): n is a, c, g, or t
  misc_feature (18308)..(18308): n is a, c, g, or t
gtaagggtctttacatggtttccagatagttcattagttgttgctttctttttttgtctgttttctgttttttttttttaaataactgtggtatgatgtaataggaacttataatttctgagttgcttatttttcctttacagttatagtaaagttatactcatttattttctcctgctttctgcagagtaaaatactgatttttgtctagaaacaagacagtgcaagacaatgttgaaagtgaaattctatgttaaaatatgccagatttattttaagaatttaatatctgtagtcagttatcaatacaaccaaattacataattatgcatgataataggtaaatactgagaagttcacctcattttcttgttaaaggatttggctattaccgtatgtgtcagttagtactcttttgtatggtagtgaaagaaaactcaacccaaactgattcatgaagaagaaagtaaatctggttagatgtggtttgaattaggtaattcatgtcatgaggactcagatctcccatctctatttctacgttccacttttgcattggcttcattttcggttaggttctcccttggtggtggtaaggtggttgtagcaatgtcagcctcccatttttggaaccgagtccataggaggctattctttctagaccttaataggagtaacacaattattgctcatcaccctagctttggccatgtgtcaaatcctgaccagtcacaatttcacagtcatagattctaccctggagctgggatgttactggcctcactagaaacacattgctgatagggtagaaggtgtgttcatcctacccaacccgacccgcaccaaagtcagaatagggaaaaacagatgttgggtgacatgcaactaacgtctgccgtactacactgaagatatttttctatgtttattctccagtgaaagagcttatatttgtggtacataggggattttgttttaatttagaaaatttaattgtagaaaacatgttttataaccctttctctgtactttgttctatatcaggaattgacttgattagataaggtgacatagggtatcttaggccctacaagatagtaaaccccccatcacttgaaagtattcagtagaggcttaaaaaacattattaaaggatgtggttattaggggactttaagaaatgaatatgaaattgaagtaggaaatctttaagctactctgtgagttatgccttttaaaagcaatttgtaattcctgtagatttcttttaaatttaggcagtttcataaatgactatagcatcattttagcaaatttgtgatcctgtaagaggaggataagtgttttttgtttgtttgtttgttttttgtttttttgagacagagtctcactttgtaccccagaaagtaaatctagttagatgtggtttgtctcggctcactgcaacctccaccccgtgcgttctagcaattctcctgcctcagccaccacacctggcctaagaggggaggataagtgttttagtgatcatattagactgaatgtggcagatgagatttcccgcccccccattgttggttagactgacattcaacattcaacaagagccacctgcccttgtaggcatttctgccactatacccctacataaacctagagtgctattgcttacttgctttccttcaaatacattttttcatttgtggcctccacattcttgtgtgtgatgtcctttctctgtgaaatgtcttctaccctttttttcaaagcctagtttagaactgacctcttctatgaaccctctgccgactggcctttccttccccagtcccccaagttcaaaatgatctctttcctttgaatactatagtatttgcacaattcactatctccttatcatattcttcttgtttatttgttatcagctgatgttgacatcataagttcaggttcctaactagatccaatattggaatttttcagcttttgctaagaagagagcttgtatgtctttgggaataatgggcagaaaaagataactttgagaagtcttagacttctaatagctttgatatttaaaagtacatgtaatacaagaggtttttttcctacatttaatgcatggagaagataggacatttagaaatatggaattaatgttcatttgactggcaaaagattattttctcagatgtagtgaagtgtggtaaagaacttcactctagagccagaatgtctgtgtttgtatcccagagcccaccacttacatttaaccattaacattcaacttactgtctctgagtttcagtggcctcatctataaaatgaggataataagagtacctacttcatagagttgttttagtggttaaataaactaacgtaaacttgctagaacttgataaactaatattggatgagaactggttgaaataatgcctggctatagtaaaaacttggtaaatgttagttgccattacaatgcaactactgttcctaccattccctctgccagtgcctggtattcagtagcactcagtaaatgttagttaaatgaagaaataactgaaggaatgaatgaacaaatggttgatgtagagattgcttttccattgttgtttattgaatattttgagatgtataacatactgtctgttaggcactgtgggatgggcactcacggagctgtcttccaaaggggtataggagaggagacgcagtgatctcagcaacctacctttaaaacatatcctagtatctactgccatgttaggttctcttcttttgctttttttaaaaaaaaattctcacaaaactccccccacccacttcagtttatagatgaggaagctcctactacataatagtgcttcccagtctaattcttgacctcattgtatttatatgtcctttttttttttgacagagtctcactcattgcagtggcacaatcacagctcactgcaacctctgcctcccctgctcaagtgatcctcccacctcaacctcctgagtagctgggactacaggcatgcaccaccacgcctggctaatttttgtatttttttgtagagatgcggttttgccatgttggccaggctggtctcgaactcctgggctcaagccatctgcccactttggcctctgagagtgctgagattataggcatgagccaccattcccagccatgttttcctttttcattgaactttatctactttagccattaaactccactccattggtcttgtcattactaagagctgaaccacctgcaaaatattaagttaaaaagcgttttctttgacaacagttttcttttcttcatcttcctctatcactttacttctgaacttttattctctcattttgatctgacccctacttctctgtttttcctggccatttagtactttcttgttttgctcatcccatttcccagtggagaccttctggtctgctgctttatcactggttttgttagaagacatacaaatggcaaggaggtatatgaaaaggtgcctaacatcattgatcatcagagaaatgcagaccaaaactacaatgagatatcatttcaccccagttaaaatggctttttttttttttttccaaaagacaggcaataacaaagtactggtgaggatgtggagtaaagggaacccacatacactattagtaggaatgtaaattagtacagccactgtggagaacagtttgaaggttcctcaaaaaactaaaaatagagctaccatataatccagcaatcccactgctaggtatatatccaaaagaaaggcaatcaatatacggaagagatacctgcacacccaggtttattgcagcactattcacaatagccaagatttggaagcaacccaggtgtccaacagatgaatggataaagaaaacatggtatataaacacaatggaatactattcagctgtgaaaaagaatgaaatcctgtcatttgcaatcctgtcttgaatagaactggaggtcatgatgttaagtgaaataagacaggcacaaacttcacatgttctcacttatttgtgggagctaaaaattaaaacaatcgaactcatggagctagagaatagaattatggttaccagaggctggaagggtggttgggcgtataagtgtagggggagtggggatggttaatgggtacaaaaaaatgagaacgaataagatctacttgataacacaacagggtgactatagtcaacagtaattatacatttaaaaataactagaagagtataattagattgtaacacaaaagataaatgcttgaggtgatggatacctatttaccctgatgtgattattacttatttcatgcctatatcaaaatatttatactccaaaaatatatatacctactatgtacccacaaaaatttaaaaatttatatattgtttttgctatcacctttagaatttcttgtcattggatagttcgtctgtataccattctggtcttcattccccagggcccccgttgtctgatttttctgcttctagaactgttagaggtcacaaaagcaagatggttgtatctatcacaatttttgtctgactttaactgggtatctgttacgatttagtagtcatcttactgacttcttgttggtttccaattgaatcctcacagtagactgttttcattgtaatcagtatcgaattatagcctgttcccttcttcataaatgaaggctttcttcttcaacagttcttagtgacttcacctgtactttatttctctgctttgaatatttcgaagaaaacatattcttgctctttcccaaggttaacactacatacattaccttgaccacaggatgttttcttgcagattgtgacctaattccatcacccttcagcagcccccaccgttttcatggattcagctaaaccttctgtaagatgactctttttccccctaatctttatatctcttttgatatgtagctttagtctcactttttttccttttggattttgccagttagatgtctccctggaattccacttcagcatggctaagactaagcttgtcttctctttcctccccaaagcaaattgtaattaggatagactgaaggtgacagaagataactaagatcttcttcatcctttcggctcttatggaagctgaattccagtagtcattctaaatttgttgtatgtcagcttatggtatcttttcatgtctttacattcagccaaagaggaagttccttgaaggggagaccagagggcgtgctgtgcttcttaatcctctctttcttaaccagtaagaggcattcagtagatatctgatgatactgattaatagaggggaacttttcagattcttttttttttttaaccctagtaagctttagtacaaactaaatgctgagagattatcaagtaagggattgatcatcacaagaagactcaggatgttacatcctgtaggttttatagtttcctatattgtaaaaaatatgagttatagcagcttgtctggatgtcatacaggtataaaaatcagttttataaacttgagtaaattggggcccattttagaaaaaactcttgcaggctgtgaatgccaatatataagtaaagtattaagtataatgttatttaatgtgggcaaacataaagccaggtgtaaattttttaggtttaaaatcttatagaactatacatccaaaagaaaatttcaagttaaacataatacaaagcaatacaatctaaattaacattaatttaatgtgatgaatgatattgccttgctaaaagtgggtcactacttacaatgtgcaaatggtactcatcgttagggtatagattcttttaaactatgacatacgtacactaccatgtggaacgtgatgatgtgttctctgttctaactactgggaagacttccttggcatagcacatgccatggggtcagttggctttgacttcatatagatatgccatttacttggtcagtgtcacttctatgacaagtagtatgttgtgccagtttgattataagtacaaatatgggcaatgaagtaacttggttttaaggttgttactaagctgagtaacagtgtgtggctatacaaatttttataggctatcaggaatgaaaacacaggagattgttgtagattcaagtattttagattcaagtttgaagatgctcatgcagatgtttaactgagttgtatagacctttatgtttctttctttttctctttttttttttttgagacagagtcttgctctgtcacccaagctggagtgcaatggtgtgatctcggcttactgcaacctccgcctcccaggttcaagcaattctcctgcctcagcctcccaagtagctgggattacagatgtgcaccacgacgcccagctgattttttgtattttagtagaggcggggtctcaccatgttgtcaagatggtctcaatctcctgaccttgtgatccacccacctctgcctcccaaagtgctgtgattacaggcgtgagccaccgcgcctgactgacctttatgtttcttaactttatgctatacatcagttgatatttcaaaaatttaaatggtttctatgattattctttgggctaagaaattgggcattaattgtcctcatatgtatggtttttgtggctacttcatgtagattttatttttggtggttatcaaattggaatttttttttttttttttttttttgagacggagtctcattctgtttcccaggttggagtacagtggtgcaatctcagctcactgcagcctcgacctcccaggctcaagcagtcctctcacctcagccttctaagtagctgggactacaggcacgcaccaccacacctggctagttttttgtgtttttagtagagatggggttttaccctgttggccaggctggtcttgaactcctggcctcaagtgatccacctgcctcagcctcccaaagtgctgggattagaggcatgagccaccacacctggctgaaattggaatttcattggtactgcctgtaattttatgttaatttttttttttttttgtcgtcactagcttttatctaaagcccctagagagaaaggccatgataccttgtatacaaggttataagagtatacaagggaaagggagggctgaagggaacagggtgggctggtacaagcctcattagaaataccattgagtctgtgagtaaaacatcattatatgaaaaggagatgtggttttagggtggtccaattacttttgcaccagcctaataaaattacaagtcattatcaatagagacattgtaaaacctttttttttcccaaaagaagtatcaggtatgataattacatgtctgcccaactttcgttatagattaacataacttaattgtatttaaggtacaatttaggagagttgctgaaaaatgaatctttagtattgggatgccttgattctaccctcaatagctataatggattatgtgtctgagtagattaataaaaatcttttgagcatttttcttgaactacttcactgaagattagctttttgagcatccattttaatttctcagtatataaggatcggtttatcacaactgtattgttttccctggccttgttagattatattttcatatcatgtagaaaaataggtgtattcgttctcccttgaagtcctttgtctcccaaaggaaatggttgcaatacagatgtgtcacctcttccacaggtaaagtggaatggagaagtagccagttaaatagtgcatgctcaatttggaacatttagagcatacaggaaagttatttatttggtaaatattttttaagcatttactatgtttcatgcattgtactagttgtagaggatataattgaatacaactacatgtagcccttgactttatggaactagtctagtataaagatttaagattgcctggcatggtggctcacgccactaatcccagcactttgagaggccaaggcaggattgcttgaggccagaagtttaagagtagcttggtcaacataatgagactccatctctaaaataaatagatagatagatagatagatagatagatagatagatagatagaagtagttagacaacacaaagcagtttcactcatcttgtggcaaggagttatgtatttctaatcaaatttggcaactcaagcattttcaacaaaatctacatgttttttcagaataaagtgaccaacacagaatgttacctgtaaaaatcagagcaataattgctatctaaaataattttgaaaattaagtggtactgaaaggctcatatagcaaaaatatggcctcctgtcattgtactttcctacttcccagactcaccattttcaacattttttagtagtttattttgccattttatagcatagtacctgacattttatttattcaacagacatttcttaagtacctaatacatgccattccttgtttgaagggatgctaaggatacagtggtgaacaaggcgttgtggggttgtatagagggtattcattcctaaccttgaaccaaatatttctttctgttggataatgcattaaaaattgcaaacagtttacaaacttttggagcaatggtggccttgatcataaagtagggactgcttctaccgtatacatgcttggtggtgtatttgtgatatctggctaaagtttctacatggaaattgactgactttagttttgagacttctgggaaccagtcaggcaaaatagtgaaactgtgtatcctgtttccaagagttgtcttttaaggttatctgcttcattcatttggcctgacttgctaggcaaatgcctagggtaaatatgatttgattaactataacaacaacagcaacaacaacaactttattttttagagcagtttgaggttcacagcaaaattgagcagaatgtacagagattttccctatacccgcttcccctacgcatgtgcggcctcccctactatcaacatcccccaccagagtggtttgttacaattaatgaacctacattgacacatcattatcactcaaggtccgtagtttacattagagtccactcttggtgttgtgtatgggtttggtcgattttataatgacatttatccaccattatagtgtcatacatagtaattttgctaccctaaaaatccagtgtgctccacctgttcctccttccctcctccctcatccctggcaaccactgaactttttaacatctccatagttttgccttttccagaatgtcatatcattggaatcacacagtatgcagccttttcaaatgggcttctttccgttagtaataggcatttaagtttcatcctcatcttttcatggcttgatagctcatttctttccctccctcttttcttccctgtcttccttccttcctcttctttcctgtttcctctttcttcttccttttttaagagacaaggtgtctcactctgttgcccaggctggagtgcagtggcccaatcatagctcattgcagccttgaattcctgggctcaagtgatcctcctgcgttagcctcctgagtagctgggatcacaggctccagtcattttagtgctgaataatatttcattatctggatgtaccgcctattcattcacctactgaagaatatcttggttgcttctaagttttggcaattatgagtgaagttactataaacattgtatacaagttttatgtggatgtatgttgtcatctcccttgggcagataccaaggagtgccattgttggatcatatggtaaatatatctttagttttgtacagaattctaggttggtatttttttctctctcagtcctttattttatttggagacagtctcgctatgtcgcccaggctgccatacagtggtgccatctgggctcactgaaacctccacctcccaggttcaagcgattcttgtgccttggcctcccaagtagctgggattacaggagtgcgccaccacgcctgctaatttttgtatttttagtagagacagggttttgccatgttgcccaggctggtctcaaactcctgaccttaagtgattcacccacctcaatctcccaaaatcctgggattacaggcctgagctactgtgcctgatctctctcagtactttaaagaaatatttcattccacttttcttttttttcttctttttgagatggagtctcactctgtcgcctgggctggagtgcagtggcgcgatctcagctcactgccacctccgcctcctgggttcaagtgattctcctgcctcagcctcctgaatagctgagattacaggcgcccaccaccatgcccagctaattttttgcatttttagtagagacgggggttccaccatgttggccaggctggtctcgaactcctgacctcgtgattcgcacatctcggcctcccaaattgctgggattacaggtgtgagctaccacgcctggcccactcttcttgcttacatagtttctgaggagatgtcagatgtaatttttatttttgctcttctgtaggcaagttgagttttttccccctctagcttctctcaggatttttttctttatctttgattttcagtagtttgaaaattatatgcctagctgtcagggttttttgcttgtttgtttttgttttctcaggtgtgactccagaaaggttctaaagaggagctttacaatctcttctctggggtttatggagacttcctttacccttctgtgttagccccttaaagcactgcgtcaaccttaaaagggcacaggaaagggtgtctatgccatttttatgccatttatcctgcttggtgttttctgagctttcttcatctgcggtttaatgtctcacattaatttgtagaaattctctgtcattgtttcaaatttttcttcagttcttttctctgtttcttcttctggtgttcccattatgcttttgtggttgtcgtacagttattggatattttgttccaggcttttttttttccagtctttttttccttttgcttctcggttttgtaggtgtctgttgagatactctcaagtgcagatattctttcctcagctttgtctagtttactaataagcccattaaaggcagtcttcatttctgttacagtctttttgatcagtagcatttcttttttattctttcttaaaatttctgtctttctgcttacattgcccatctgttcttgcatggtttctactttgtccattagagttcttaggatatttatcataattatttcaaatttctggtgtaacaattccaacatccctgcaacatccaagtctagtttcgatgcttactgtgtctcttccagctgtgttttttcctatttaatatgtcttataattttttcttgatagccatacatgatgcattaggtaacagaaactgctgtgagtggacctttagtaatgtggtggtaaggtgtgcatggaggggaaacattttcagtctgttagtgaacttttgtcaacttcacatgtgcttctcaagtccatcctgtaagtgggagagtagggctagagaggactgaagttgggtatatattaaatactttctcctacaaagaagcctagaggggacgcattaggggattttttttcccccagtattcactgtgatgacccttattgagctcctggaggtaaaactcacaaaactgtggttctcccccctgcccatattactacatgtccctggagtttatatctttcagacttgtctgcactgagcttccaccaatttgtcaaatacagatcaggtttccctaccacccgtgcagttgaaaacccacatacaacttttgactcctccagagcttaactactcatagcctgctattgactggaagccttgccaataacataaacagttgattaatacatattttatatgttttctgtattatatattgtattcttacaataaagagaaaagaagatgttattaagaaaatcataaggaagataaaatatatttactgttcattaagtggttcccatgggtgctggttcccatggaggttgccccttgtgagtttttgctcagggaagttgtgattctctatatttgcctgttggtctcctaatttgggagtcatcagttttccctgtgacctcacttctcttacagagttaagaacagttgttggtttttcagtttgttcagtgttttacatgttgttagaacacagtggtacttctaagtttcttaacatgctagatcagaaacctgaagtctcacctaatttggctttttatattttttcttcttttttttcttccattgctaccaaagcatttttcatctgtgtctggggtgacattagagcagaatgtgatttctaggtaaacattattgggctccctagcagaaaaatttttgaaagtagtacatgaattctgtataattaaaattttcttttcatcttaataggtataggtaataggcacggcctattttttttttgctcaacagtctaaaatagtaatttaatcacctaatagccttagttatatagttgaaagaagagttggaaatctgattcatgggttggaaatcacctgtcacatatgagttttaggcactggtcactttattttgaaacagctttggggttttttcctttttcaactcataataggctttaacagcttttagttttgtttctgtttttttaacagcatgagttgccaaatttggttatagcttcttggtacaagatgggtaaatttgctttgtgttgtgtaattactttttattttaaatgctacctcttttatgaacactaactttacactaagattaggaaaatgagaattgcatgtctgcaacaaatagctatctgtagtattaaattgtgaaaatgtagactttggattggagctggcatctcttaatatgtaattgtaacatagagtaaataagtattttgtcccttgtagggtcaaacagtacagtgcatgggcagaattagagatgtaggcttttttttttttttttttttttactggcttagagaaccgtttgatcagctaatatggaattaagtccctagggctgcccaggcacaacattaactgctattaaaggaaaatttaaaagagtattagtgaaggttaaatactgaccatggacatctggcaaaattgatgttttttttcccctccaccattgtttatagtttattgttatttatcagagaattaatgtttattttcagaatctattaccataagaaatctgtttgaggacttcgtatgtgccaggaattctactaaataatgatataatgctgaacagaattagataggatcctcacttcgttaagcttacagtctagtggtatagatcaacattaatcaaagaataacacaaatagaaagcagagcagtggttcatgggattgactgtagagaagcatgagggaagttcccaggtgatggaaaatactttatttcttaatcgtggtggttacatgtgtgcatatgtttatgaaaatatattgtacatttaaagtggatacattttatcacatgtaaattatgactctataaagttaattaaaaagaataactcaggtaaggtggtgtgtgcgcctgtagtcccagctatttctgaggcaggaagatcacttgagcccaggagtttgagttcagcatgggcaacatgagacctgtgagactttgtctctaaaaaaatttaaataaataactaagataaatgtaaaattacagctgtagtaagttctacaaaggagagttacatgggctatgacgatgtaagatagcaagaactgacattggcagggaggaaatgatgatgagtagaagtaaataagtgaagtgtggggattgatgtcaaggggacagtataaaagaaataacagcatgcgccaaggccctaaaattggaaagtccttggcaaattaaaggagtttgaaaaaggccattgtgtgcaaagcagaaaataggtactacaaggtaaaagatggagctaagcggtaggtaaggctaaaccttgtcagccattgttaaatattgaattgtatcctaagcacaactcagtggaaagcagttaaagttctttaattgggggaggcaatgaaggggtaataaaattggttatagaaatactgctctggctctagtgttgagaatgaattggagtagccagagtagattcaagaagactttagtaagattattccaacaggccaggacctgttatagggtggtggcaatggagagagatggacagaatggagagtgtatttaggaggtaaaaatgacagaacttggtgatgcactgaatgtgaaatggggaaggtgtctaggaggactactaggtttatggtttgcgtattagggtggatgatagcagtttcatttactgagacagggagccctggcagagtacccagcttttagagtgggtagggggaaggggagagtgcatctggtgttgggcattttgaagtgatttacatacaacaaactgaaggtatctttaacactgagtccagcaggttagcatatttattcagcaagcattgcacctttttttgttgtttttggggtcttcaactcctggcctcgaatcctccctccttcccccgcctctcccagcctccgcctcccaaagtgctgggatttcaggagtgagccaccgcgcctggccagcatcgcgctgtttgtgcagtgtgccctgtgctaggtcttgcagtgggtaccagtagagacataaaagtacaaaagataattggacgtttagtagagtcctgaaagggggcgggataggaagatacctaaccataagaaaaaccagcaagagcggaaaaggagctagtcctccagatcaataagttaatcacttatgtttgtgattccctgcattttgggtgattctctgtcgaggtcctcttaagtccagacttttgatataatctgcagtttgcgccatttggattcctgaagcatctttacaagccacctacattccttatggagctgtggcacaacagcaagcccacgatgtctcaccggattaataaaaatataggcgctcacgcttttgtttaccgatatagtatctcctcctcccctcactccatcaacccccacgcgacacaactttccggaagtaagcaaaatccgttatcaaggtgaaactccggggaccaggctccacagctgccataaactggatggcacgttagaagccggtgggtgtaggtgaggcacgctggcgcccgcgggcccttctccagccgctacccagtgggaatccgcggggctgaagccccgaaaccaggctgagcgtcccagagcgcaacctccctttcccccagcagcgccggcgccgcagaagccgcgtgtccccaggcgcactcccccaaggtgaacccccgccccccacggaggcggctgggtcgcgggtctgggcggggcgctccggacgccctcccgccgctgcgcacccctcccgcgagctgccagctccctcggcctctccacccaaaactggcccaaccgccaatcgtctgcctctcacctcctacagcaggtgacccatggccaatcgccaggggtctctttgccaggagccgccagggccagccaatcggggcgacccctccgccggggaggggacgggaaaggggtggggggtgaagggggtgaagggggtgtcccgggggacgggctgaacctcagtcaggaccgcctgcaccgcagtccggggatcgggtcgaggggagaagaaaaaggggtgctcgggagcagcccccggctacctcccctggaggcacagagggcgggggccttggcgaatggctttcttgctggccacttgcggagtgagtagaccccgagggtctgggagaggggccggcccctacccctgagtccccggggtcccggccgccaggccggagcgcgaatgtcgtgctcaccctgcctccttcccgccgccccctgggctttttgatgacaagcttcaaaactgcaaagaagatgaacagagaaagaaaattgaaactctcaaagagacaacaaatagcatggtagaatcaattaaacactgcattgtgttgctgcagattgccaaaagtactattaatcccgtagatgcaatatatcaacctagtcctttggaacctgtgatcagcacaatgccttcccagactgtgttacctccagaacctgttcagttgtgtaagtcagagcagcgtccatcttccctaccagttggacctgtgttggctaccttgggacatcatcagactcctacaccaaatagtacaggcagtggccattcaccaccgagtagcagtctcacttctccaagccacgtgaacttgtctccaaatacagtcccagagttctcttactccagcagtgaagatgaattttatgatgctgatgaattccatcaaagtggctcatccccaaagcgcttaatagattcttctggatctgcctcagtcctgacacacagcagctcgggaaatagtctaaaacgcccagataccacagaatcacttaattcttccttgtccaatggaacaagtgatgctgacctgtttgattcacatgatgacagagatgatgatgcggaggcagggtctgtggaggagcacaagagcgttatcatgcatctcttgtcgcaggttagacttggaatggatcttactaaggtagttcttccaacgtttattcttgaaagaagatctcttttagaaatgtatgcagacttttttgcacatccggacctgtttgtgagcattagtgaccagaaggatcccaaggatcgaatggttcaggttgtgaaatggtacctctcagcctttcatgcgggaaggaaaggatcagttgccaaaaagccatacaatcccattttgggcgagatttttcagtgtcattggacattaccaaatgatactgaagagaacacagaactagtttcagaaggaccagttccctgggtttccaaaaacagtgtaacatttgtggctgagcaggtttcccatcatccacccatttcagccttttatgctgagtgttttaacaagaagatacaattcaatgctcatatctggaccaaatcaaaattccttgggatgtcaattggggtgcacaacatagggcagggctgtgtctcatgtctagactatgatgaacattacattctcacattccccaatggctatggaaggtctatcctcacagtgccctgggtggaattaggaggagaatgcaatattaattgttccaaaacaggctatagtgcaaatatcatcttccacactaaacccttctatgggggcaagaagcacagaattactgccgagattttttctccaaatgacaagaagtctttttgctcaattgaaggggaatggaatggtgtgatgtatgcaaaatatgcaacaggggaaaatacagtctttgtagataccaagaagttgcctataatcaagaagaaagtgaggaagttggaagatcagaacgagtatgaatcccgcagcctttggaaggatgtcactttcaacttaaaaatcagagacattgatgcagcaactgaagcaaagcacaggcttgaagaaagacaaagagcagaagcccgagaaaggaaggagaaggaaattcagtgggagacaaggttatttcatgaagatggagaatgctgggtttatgatgaaccattactgaaacgtcttggtgctgccaagcattaggttggaagatgcaaagtttatacctgatgatcagggcagtaggcataattcagcaacaaacaatcttcctttgggagaaacctgttcattccaatcttctaattacagtggttcctatctcagggatactggactttctgacgcagatgaacaattaaggggaaaagcttcccttttccctctgtggcagttacgattttgacttcagtcctgagaaaaacttcaggttttgaaaatcagatgatgtcttctccttttccaaacaccacacgttgaaagcatttataaatccaagtctgaaactctgcgctctagtactgctgttaagatacacaacttgtttcttagttcatataatctcgggatacacacacacacacacatatatatacacacacatacgtatacacacacatacatatatataaatatacctgatgccagatttttttcataaatattctgcctactgtaaatatggggnccccgggtggntaaanatngngccggtttaacccggggggaattcggggtaccacacaaaaccattgggaggcaca

SEQ ID NO: 735144 - DNA, 17182 bp, Homo sapiens
gtaagggtctttacatggtttccagatagttcattagttgttgctttctttttttgtctgttttctgttttttttttttaaataactgtggtatgatgtaataggaacttataatttctgagttgcttatttttcctttacagttatagtaaagttatactcatttattttctcctgctttctgcagagtaaaatactgatttttgtctagaaacaagacagtgcaagacaatgttgaaagtgaaattctatgttaaaatatgccagatttattttaagaatttaatatctgtagtcagttatcaatacaaccaaattacataattatgcatgataataggtaaatactgagaagttcacctcattttcttgttaaaggatttggctattaccgtatgtgtcagttagtactcttttgtatggtagtgaaagaaaactcaacccaaactgattcatgaagaagaaagtaaatctggttagatgtggtttgaattaggtaattcatgtcatgaggactcagatctcccatctctatttctacgttccacttttgcattggcttcattttcggttaggttctcccttggtggtggtaaggtggttgtagcaatgtcagcctcccatttttggaaccgagtccataggaggctattctttctagaccttaataggagtaacacaattattgctcatcaccctagctttggccatgtgtcaaatcctgaccagtcacaatttcacagtcatagattctaccctggagctgggatgttactggcctcactagaaacacattgctgatagggtagaaggtgtgttcatcctacccaacccgacccgcaccaaagtcagaatagggaaaaacagatgttgggtgacatgcaactaacgtctgccgtactacactgaagatatttttctatgtttattctccagtgaaagagcttatatttgtggtacataggggattttgttttaatttagaaaatttaattgtagaaaacatgttttataaccctttctctgtactttgttctatatcaggaattgacttgattagataaggtgacatagggtatcttaggccctacaagatagtaaaccccccatcacttgaaagtattcagtagaggcttaaaaaacattattaaaggatgtggttattaggggactttaagaaatgaatatgaaattgaagtaggaaatctttaagctactctgtgagttatgccttttaaaagcaatttgtaattcctgtagatttcttttaaatttaggcagtttcataaatgactatagcatcattttagcaaatttgtgatcctgtaagaggaggataagtgttttttgtttgtttgtttgttttttgtttttttgagacagagtctcactttgtaccccagaaagtaaatctagttagatgtggtttgtctcggctcactgcaacctccaccccgtgcgttctagcaattctcctgcctcagccaccacacctggcctaagaggggaggataagtgttttagtgatcatattagactgaatgtggcagatgagatttcccgcccccccattgttggttagactgacattcaacattcaacaagagccacctgcccttgtaggcatttctgccactatacccctacataaacctagagtgctattgcttacttgctttccttcaaatacattttttcatttgtggcctccacattcttgtgtgtgatgtcctttctctgtgaaatgtcttctaccctttttttcaaagcctagtttagaactgacctcttctatgaaccctctgccgactggcctttccttccccagtcccccaagttcaaaatgatctctttcctttgaatactatagtatttgcacaattcactatctccttatcatattcttcttgtttatttgttatcagctgatgttgacatcataagttcaggttcctaactagatccaatattggaatttttcagcttttgctaagaagagagcttgtatgtctttgggaataatgggcagaaaaagataactttgagaagtcttagacttctaatagctttgatatttaaaagtacatgtaatacaagaggtttttttcctacatttaatgcatggagaagataggacatttagaaatatggaattaatgttcatttgactggcaaaagattattttctcagatgtagtgaagtgtggtaaagaacttcactctagagccagaatgtctgtgtttgtatcccagagcccaccacttacatttaaccattaacattcaacttactgtctctgagtttcagtggcctcatctataaaatgaggataataagagtacctacttcatagagttgttttagtggttaaataaactaacgtaaacttgctagaacttgataaactaatattggatgagaactggttgaaataatgcctggctatagtaaaaacttggtaaatgttagttgccattacaatgcaactactgttcctaccattccctctgccagtgcctggtattcagtagcactcagtaaatgttagttaaatgaagaaataactgaaggaatgaatgaacaaatggttgatgtagagattgcttttccattgttgtttattgaatattttgagatgtataacatactgtctgttaggcactgtgggatgggcactcacggagctgtcttccaaaggggtataggagaggagacgcagtgatctcagcaacctacctttaaaacatatcctagtatctactgccatgttaggttctcttcttttgctttttttaaaaaaaaattctcacaaaactccccccacccacttcagtttatagatgaggaagctcctactacataatagtgcttcccagtctaattcttgacctcattgtatttatatgtcctttttttttttgacagagtctcactcattgcagtggcacaatcacagctcactgcaacctctgcctcccctgctcaagtgatcctcccacctcaacctcctgagtagctgggactacaggcatgcaccaccacgcctggctaatttttgtatttttttgtagagatgcggttttgccatgttggccaggctggtctcgaactcctgggctcaagccatctgcccactttggcctctgagagtgctgagattataggcatgagccaccattcccagccatgttttcctttttcattgaactttatctactttagccattaaactccactccattggtcttgtcattactaagagctgaaccacctgcaaaatattaagttaaaaagcgttttctttgacaacagttttcttttcttcatcttcctctatcactttacttctgaacttttattctctcattttgatctgacccctacttctctgtttttcctggccatttagtactttcttgttttgctcatcccatttcccagtggagaccttctggtctgctgctttatcactggttttgttagaagacatacaaatggcaaggaggtatatgaaaaggtgcctaacatcattgatcatcagagaaatgcagaccaaaactacaatgagatatcatttcaccccagttaaaatggctttttttttttttttccaaaagacaggcaataacaaagtactggtgaggatgtggagtaaagggaacccacatacactattagtaggaatgtaaattagtacagccactgtggagaacagtttgaaggttcctcaaaaaactaaaaatagagctaccatataatccagcaatcccactgctaggtatatatccaaaagaaaggcaatcaatatacggaagagatacctgcacacccaggtttattgcagcactattcacaatagccaagatttggaagcaacccaggtgtccaacagatgaatggataaagaaaacatggtatataaacacaatggaatactattcagctgtgaaaaagaatgaaatcctgtcatttgcaatcctgtcttgaatagaactggaggtcatgatgttaagtgaaataagacaggcacaaacttcacatgttctcacttatttgtgggagctaaaaattaaaacaatcgaactcatggagctagagaatagaattatggttaccagaggctggaagggtggttgggcgtataagtgtagggggagtggggatggttaatgggtacaaaaaaatgagaacgaataagatctacttgataacacaacagggtgactatagtcaacagtaattatacatttaaaaataactagaagagtataattagattgtaacacaaaagataaatgcttgaggtgatggatacctatttaccctgatgtgattattacttatttcatgcctatatcaaaatatttatactccaaaaatatatatacctactatgtacccacaaaaatttaaaaatttatatattgtttttgctatcacctttagaatttcttgtcattggatagttcgtctgtataccattctggtcttcattccccagggcccccgttgtctgatttttctgcttctagaactgttagaggtcacaaaagcaagatggttgtatctatcacaatttttgtctgactttaactgggtatctgttacgatttagtagtcatcttactgacttcttgttggtttccaattgaatcctcacagtagactgttttcattgtaatcagtatcgaattatagcctgttcccttcttcataaatgaaggctttcttcttcaacagttcttagtgacttcacctgtactttatttctctgctttgaatatttcgaagaaaacatattcttgctctttcccaaggttaacactacatacattaccttgaccacaggatgttttcttgcagattgtgacctaattccatcacccttcagcagcccccaccgttttcatggattcagctaaaccttctgtaagatgactctttttccccctaatctttatatctcttttgatatgtagctttagtctcactttttttccttttggattttgccagttagatgtctccctggaattccacttcagcatggctaagactaagcttgtcttctctttcctccccaaagcaaattgtaattaggatagactgaaggtgacagaagataactaagatcttcttcatcctttcggctcttatggaagctgaattccagtagtcattctaaatttgttgtatgtcagcttatggtatcttttcatgtctttacattcagccaaagaggaagttccttgaaggggagaccagagggcgtgctgtgcttcttaatcctctctttcttaaccagtaagaggcattcagtagatatctgatgatactgattaatagaggggaacttttcagattcttttttttttttaaccctagtaagctttagtacaaactaaatgctgagagattatcaagtaagggattgatcatcacaagaagactcaggatgttacatcctgtaggttttatagtttcctatattgtaaaaaatatgagttatagcagcttgtctggatgtcatacaggtataaaaatcagttttataaacttgagtaaattggggcccattttagaaaaaactcttgcaggctgtgaatgccaatatataagtaaagtattaagtataatgttatttaatgtgggcaaacataaagccaggtgtaaattttttaggtttaaaatcttatagaactatacatccaaaagaaaatttcaagttaaacataatacaaagcaatacaatctaaattaacattaatttaatgtgatgaatgatattgccttgctaaaagtgggtcactacttacaatgtgcaaatggtactcatcgttagggtatagattcttttaaactatgacatacgtacactaccatgtggaacgtgatgatgtgttctctgttctaactactgggaagacttccttggcatagcacatgccatggggtcagttggctttgacttcatatagatatgccatttacttggtcagtgtcacttctatgacaagtagtatgttgtgccagtttgattataagtacaaatatgggcaatgaagtaacttggttttaaggttgttactaagctgagtaacagtgtgtggctatacaaatttttataggctatcaggaatgaaaacacaggagattgttgtagattcaagtattttagattcaagtttgaagatgctcatgcagatgtttaactgagttgtatagacctttatgtttctttctttttctctttttttttttttgagacagagtcttgctctgtcacccaagctggagtgcaatggtgtgatctcggcttactgcaacctccgcctcccaggttcaagcaattctcctgcctcagcctcccaagtagctgggattacagatgtgcaccacgacgcccagctgattttttgtattttagtagaggcggggtctcaccatgttgtcaagatggtctcaatctcctgaccttgtgatccacccacctctgcctcccaaagtgctgtgattacaggcgtgagccaccgcgcctgactgacctttatgtttcttaactttatgctatacatcagttgatatttcaaaaatttaaatggtttctatgattattctttgggctaagaaattgggcattaattgtcctcatatgtatggtttttgtggctacttcatgtagattttatttttggtggttatcaaattggaatttttttttttttttttttttttgagacggagtctcattctgtttcccaggttggagtacagtggtgcaatctcagctcactgcagcctcgacctcccaggctcaagcagtcctctcacctcagccttctaagtagctgggactacaggcacgcaccaccacacctggctagttttttgtgtttttagtagagatggggttttaccctgttggccaggctggtcttgaactcctggcctcaagtgatccacctgcctcagcctcccaaagtgctgggattagaggcatgagccaccacacctggctgaaattggaatttcattggtactgcctgtaattttatgttaatttttttttttttttgtcgtcactagcttttatctaaagcccctagagagaaaggccatgataccttgtatacaaggttataagagtatacaagggaaagggagggctgaagggaacagggtgggctggtacaagcctcattagaaataccattgagtctgtgagtaaaacatcattatatgaaaaggagatgtggttttagggtggtccaattacttttgcaccagcctaataaaattacaagtcattatcaatagagacattgtaaaacctttttttttcccaaaagaagtatcaggtatgataattacatgtctgcccaactttcgttatagattaacataacttaattgtatttaaggtacaatttaggagagttgctgaaaaatgaatctttagtattgggatgccttgattctaccctcaatagctataatggattatgtgtctgagtagattaataaaaatcttttgagcatttttcttgaactacttcactgaagattagctttttgagcatccattttaatttctcagtatataaggatcggtttatcacaactgtattgttttccctggccttgttagattatattttcatatcatgtagaaaaataggtgtattcgttctcccttgaagtcctttgtctcccaaaggaaatggttgcaatacagatgtgtcacctcttccacaggtaaagtggaatggagaagtagccagttaaatagtgcatgctcaatttggaacatttagagcatacaggaaagttatttatttggtaaatattttttaagcatttactatgtttcatgcattgtactagttgtagaggatataattgaatacaactacatgtagcccttgactttatggaactagtctagtataaagatttaagattgcctggcatggtggctcacgccactaatcccagcactttgagaggccaaggcaggattgcttgaggccagaagtttaagagtagcttggtcaacataatgagactccatctctaaaataaatagatagatagatagatagatagatagatagatagatagatagaagtagttagacaacacaaagcagtttcactcatcttgtggcaaggagttatgtatttctaatcaaatttggcaactcaagcattttcaacaaaatctacatgttttttcagaataaagtgaccaacacagaatgttacctgtaaaaatcagagcaataattgctatctaaaataattttgaaaattaagtggtactgaaaggctcatatagcaaaaatatggcctcctgtcattgtactttcctacttcccagactcaccattttcaacattttttagtagtttattttgccattttatagcatagtacctgacattttatttattcaacagacatttcttaagtacctaatacatgccattccttgtttgaagggatgctaaggatacagtggtgaacaaggcgttgtggggttgtatagagggtattcattcctaaccttgaaccaaatatttctttctgttggataatgcattaaaaattgcaaacagtttacaaacttttggagcaatggtggccttgatcataaagtagggactgcttctaccgtatacatgcttggtggtgtatttgtgatatctggctaaagtttctacatggaaattgactgactttagttttgagacttctgggaaccagtcaggcaaaatagtgaaactgtgtatcctgtttccaagagttgtcttttaaggttatctgcttcattcatttggcctgacttgctaggcaaatgcctagggtaaatatgatttgattaactataacaacaacagcaacaacaacaactttattttttagagcagtttgaggttcacagcaaaattgagcagaatgtacagagattttccctatacccgcttcccctacgcatgtgcggcctcccctactatcaacatcccccaccagagtggtttgttacaattaatgaacctacattgacacatcattatcactcaaggtccgtagtttacattagagtccactcttggtgttgtgtatgggtttggtcgattttataatgacatttatccaccattatagtgtcatacatagtaattttgctaccctaaaaatccagtgtgctccacctgttcctccttccctcctccctcatccctggcaaccactgaactttttaacatctccatagttttgccttttccagaatgtcatatcattggaatcacacagtatgcagccttttcaaatgggcttctttccgttagtaataggcatttaagtttcatcctcatcttttcatggcttgatagctcatttctttccctccctcttttcttccctgtcttccttccttcctcttctttcctgtttcctctttcttcttccttttttaagagacaaggtgtctcactctgttgcccaggctggagtgcagtggcccaatcatagctcattgcagccttgaattcctgggctcaagtgatcctcctgcgttagcctcctgagtagctgggatcacaggctccagtcattttagtgctgaataatatttcattatctggatgtaccgcctattcattcacctactgaagaatatcttggttgcttctaagttttggcaattatgagtgaagttactataaacattgtatacaagttttatgtggatgtatgttgtcatctcccttgggcagataccaaggagtgccattgttggatcatatggtaaatatatctttagttttgtacagaattctaggttggtatttttttctctctcagtcctttattttatttggagacagtctcgctatgtcgcccaggctgccatacagtggtgccatctgggctcactgaaacctccacctcccaggttcaagcgattcttgtgccttggcctcccaagtagctgggattacaggagtgcgccaccacgcctgctaatttttgtatttttagtagagacagggttttgccatgttgcccaggctggtctcaaactcctgaccttaagtgattcacccacctcaatctcccaaaatcctgggattacaggcctgagctactgtgcctgatctctctcagtactttaaagaaatatttcattccacttttcttttttttcttctttttgagatggagtctcactctgtcgcctgggctggagtgcagtggcgcgatctcagctcactgccacctccgcctcctgggttcaagtgattctcctgcctcagcctcctgaatagctgagattacaggcgcccaccaccatgcccagctaattttttgcatttttagtagagacgggggttccaccatgttggccaggctggtctcgaactcctgacctcgtgattcgcacatctcggcctcccaaattgctgggattacaggtgtgagctaccacgcctggcccactcttcttgcttacatagtttctgaggagatgtcagatgtaatttttatttttgctcttctgtaggcaagttgagttttttccccctctagcttctctcaggatttttttctttatctttgattttcagtagtttgaaaattatatgcctagctgtcagggttttttgcttgtttgtttttgttttctcaggtgtgactccagaaaggttctaaagaggagctttacaatctcttctctggggtttatggagacttcctttacccttctgtgttagccccttaaagcactgcgtcaaccttaaaagggcacaggaaagggtgtctatgccatttttatgccatttatcctgcttggtgttttctgagctttcttcatctgcggtttaatgtctcacattaatttgtagaaattctctgtcattgtttcaaatttttcttcagttcttttctctgtttcttcttctggtgttcccattatgcttttgtggttgtcgtacagttattggatattttgttccaggcttttttttttccagtctttttttccttttgcttctcggttttgtaggtgtctgttgagatactctcaagtgcagatattctttcctcagctttgtctagtttactaataagcccattaaaggcagtcttcatttctgttacagtctttttgatcagtagcatttcttttttattctttcttaaaatttctgtctttctgcttacattgcccatctgttcttgcatggtttctactttgtccattagagttcttaggatatttatcataattatttcaaatttctggtgtaacaattccaacatccctgcaacatccaagtctagtttcgatgcttactgtgtctcttccagctgtgttttttcctatttaatatgtcttataattttttcttgatagccatacatgatgcattaggtaacagaaactgctgtgagtggacctttagtaatgtggtggtaaggtgtgcatggaggggaaacattttcagtctgttagtgaacttttgtcaacttcacatgtgcttctcaagtccatcctgtaagtgggagagtagggctagagaggactgaagttgggtatatattaaatactttctcctacaaagaagcctagaggggacgcattaggggattttttttcccccagtattcactgtgatgacccttattgagctcctggaggtaaaactcacaaaactgtggttctcccccctgcccatattactacatgtccctggagtttatatctttcagacttgtctgcactgagcttccaccaatttgtcaaatacagatcaggtttccctaccacccgtgcagttgaaaacccacatacaacttttgactcctccagagcttaactactcatagcctgctattgactggaagccttgccaataacataaacagttgattaatacatattttatatgttttctgtattatatattgtattcttacaataaagagaaaagaagatgttattaagaaaatcataaggaagataaaatatatttactgttcattaagtggttcccatgggtgctggttcccatggaggttgccccttgtgagtttttgctcagggaagttgtgattctctatatttgcctgttggtctcctaatttgggagtcatcagttttccctgtgacctcacttctcttacagagttaagaacagttgttggtttttcagtttgttcagtgttttacatgttgttagaacacagtggtacttctaagtttcttaacatgctagatcagaaacctgaagtctcacctaatttggctttttatattttttcttcttttttttcttccattgctaccaaagcatttttcatctgtgtctggggtgacattagagcagaatgtgatttctaggtaaacattattgggctccctagcagaaaaatttttgaaagtagtacatgaattctgtataattaaaattttcttttcatcttaataggtataggtaataggcacggcctattttttttttgctcaacagtctaaaatagtaatttaatcacctaatagccttagttatatagttgaaagaagagttggaaatctgattcatgggttggaaatcacctgtcacatatgagttttaggcactggtcactttattttgaaacagctttggggttttttcctttttcaactcataataggctttaacagcttttagttttgtttctgtttttttaacagcatgagttgccaaatttggttatagcttcttggtacaagatgggtaaatttgctttgtgttgtgtaattactttttattttaaatgctacctcttttatgaacactaactttacactaagattaggaaaatgagaattgcatgtctgcaacaaatagctatctgtagtattaaattgtgaaaatgtagactttggattggagctggcatctcttaatatgtaattgtaacatagagtaaataagtattttgtcccttgtagggtcaaacagtacagtgcatgggcagaattagagatgtaggcttttttttttttttttttttttactggcttagagaaccgtttgatcagctaatatggaattaagtccctagggctgcccaggcacaacattaactgctattaaaggaaaatttaaaagagtattagtgaaggttaaatactgaccatggacatctggcaaaattgatgttttttttcccctccaccattgtttatagtttattgttatttatcagagaattaatgtttattttcagaatctattaccataagaaatctgtttgaggacttcgtatgtgccaggaattctactaaataatgatataatgctgaacagaattagataggatcctcacttcgttaagcttacagtctagtggtatagatcaacattaatcaaagaataacacaaatagaaagcagagcagtggttcatgggattgactgtagagaagcatgagggaagttcccaggtgatggaaaatactttatttcttaatcgtggtggttacatgtgtgcatatgtttatgaaaatatattgtacatttaaagtggatacattttatcacatgtaaattatgactctataaagttaattaaaaagaataactcaggtaaggtggtgtgtgcgcctgtagtcccagctatttctgaggcaggaagatcacttgagcccaggagtttgagttcagcatgggcaacatgagacctgtgagactttgtctctaaaaaaatttaaataaataactaagataaatgtaaaattacagctgtagtaagttctacaaaggagagttacatgggctatgacgatgtaagatagcaagaactgacattggcagggaggaaatgatgatgagtagaagtaaataagtgaagtgtggggattgatgtcaaggggacagtataaaagaaataacagcatgcgccaaggccctaaaattggaaagtccttggcaaattaaaggagtttgaaaaaggccattgtgtgcaaagcagaaaataggtactacaaggtaaaagatggagctaagcggtaggtaaggctaaaccttgtcagccattgttaaatattgaattgtatcctaagcacaactcagtggaaagcagttaaagttctttaattgggggaggcaatgaaggggtaataaaattggttatagaaatactgctctggctctagtgttgagaatgaattggagtagccagagtagattcaagaagactttagtaagattattccaacaggccaggacctgttatagggtggtggcaatggagagagatggacagaatggagagtgtatttaggaggtaaaaatgacagaacttggtgatgcactgaatgtgaaatggggaaggtgtctaggaggactactaggtttatggtttgcgtattagggtggatgatagcagtttcatttactgagacagggagccctggcagagtacccagcttttagagtgggtagggggaaggggagagtgcatctggtgttgggcattttgaagtgatttacatacaacaaactgaaggtatctttaacactgagtccagcaggttagcatatttattcagcaagcattgcacctttttttgttgtttttggggtcttcaactcctggcctcgaatcctccctccttcccccgcctctcccagcctccgcctcccaaagtgctgggatttcaggagtgagccaccgcgcctggccagcatcgcgctgtttgtgcagtgtgccctgtgctaggtcttgcagtgggtaccagtagagacataaaagtacaaaagataattggacgtttagtagagtcctgaaagggggcgggataggaagatacctaaccataagaaaaaccagcaagagcggaaaaggagctagtcctccagatcaataagttaatcacttatgtttgtgattccctgcattttgggtgattctctgtcgaggtcctcttaagtccagacttttgatataatctgcagtttgcgccatttggattcctgaagcatctttacaagccacctacattccttatggagctgtggcacaacagcaagcccacgatgtctcaccggattaataaaaatataggcgctcacgcttttgtttaccgatatagtatctcctcctcccctcactccatcaacccccacgcgacacaactttccggaagtaagcaaaatccgttatcaaggtgaaactccggggaccaggctccacagctgccataaactggatggcacgttagaagccggtgggtgtaggtgaggcacgctggcgcccgcgggcccttctccagccgctacccagtgggaatccgcggggctgaagccccgaaaccaggctgagcgtcccagagcgcaacctccctttcccccagcagcgccggcgccgcagaagccgcgtgtccccaggcgcactcccccaaggtgaacccccgccccccacggaggcggctgggtcgcgggtctgggcggggcgctccggacgccctcccgccgctgcgcacccctcccgcgagctgccagctccctcggcctctccacccaaaactggcccaaccgccaatcgtctgcctctcacctcctacagcaggtgacccatggccaatcgccaggggtctctttgccaggagccgccagggccagccaatcggggcgacccctccgccggggaggggacgggaaaggggtggggggtgaagggggtgaagggggtgtcccgggggacgggctgaacctcagtcaggaccgcctgcaccgcagtccggggatcgggtcgaggggagaagaaaaaggggtgctcgggagcagcccccggctacctcccctggaggcacagagggcgggggccttggcgaatggctttcttgctggccacttgcggagtgagtagaccccgagggtctgggagaggggccggcccctacccctgagtccccggggtcccggccgccaggccggagcgcgaatgtcgtgctcaccctgcctccttcccgccgccccctgggctttttgatgacaagcttcaaaactgcaaagaagatgaacagagaaagaaaattgaaactctcaaagagacaacaaatagcatggtagaatcaattaaacactgcattgtgttgctgcagattgccaaaagtactattaatcccgtagatgcaatatatcaacctagtcctttggaacctgtgatcagcacaatgccttcccagactgtgttacctccagaacctgttcagttgtgtaagtcagagcagcgtccatcttccctaccagttggacctgtgttggctaccttgggacatcatcagactcctacaccaaatagtacaggcagtggccattcaccaccgagtagcagtctcacttctccaagccacgtgaacttgtctccaaatacagtcccagagttctcttactccagcagtgaagatgaattttatgatgctgatgaattccatcaaagtggctcatccccaaagcgcttaatagattcttctggatctgcctcagtcctgacacacagcagctcgggaaatagtctaaaacgcccagataccacagaatcacttaattcttccttgtccaatggaacaagtgatgctgacctgtttgattcacatgatgacagagatgatgatgcggaggcagggtctgtggaggagcacaagagcgttatcatgcatctcttgtcgcaggttagacttggaatggatcttactaaggtagttcttccaacgtttattcttgaaagaagatctcttttagaaatgtatgcagacttttttgcacatccggacctgtttgtgagcattagtgaccagaaggatcccaaggatcgaatggttcaggttgtgaaatggtacctctcagcctttcatgcgggaaggaaaggatcagttgccaaaaagccatacaatcccattttgggcgagatttttcagtgtcattggacattaccaaatgatactgaagagaacacagaactagtttcagaaggaccagttccctgggtttccaaaaacagtgtaacatttggtccagatatgagcattgaattgtatcttcttgttaaaacactcagcataaaaggctgaaatgggtggatgatgggaaacctgctcagccacaaatgttagtcgagc

SEQ ID NO: 735145 - DNA, 16718 bp, Homo sapiens
gtaagggtctttacatggtttccagatagttcattagttgttgctttctttttttgtctgttttctgttttttttttttaaataactgtggtatgatgtaataggaacttataatttctgagttgcttatttttcctttacagttatagtaaagttatactcatttattttctcctgctttctgcagagtaaaatactgatttttgtctagaaacaagacagtgcaagacaatgttgaaagtgaaattctatgttaaaatatgccagatttattttaagaatttaatatctgtagtcagttatcaatacaaccaaattacataattatgcatgataataggtaaatactgagaagttcacctcattttcttgttaaaggatttggctattaccgtatgtgtcagttagtactcttttgtatggtagtgaaagaaaactcaacccaaactgattcatgaagaagaaagtaaatctggttagatgtggtttgaattaggtaattcatgtcatgaggactcagatctcccatctctatttctacgttccacttttgcattggcttcattttcggttaggttctcccttggtggtggtaaggtggttgtagcaatgtcagcctcccatttttggaaccgagtccataggaggctattctttctagaccttaataggagtaacacaattattgctcatcaccctagctttggccatgtgtcaaatcctgaccagtcacaatttcacagtcatagattctaccctggagctgggatgttactggcctcactagaaacacattgctgatagggtagaaggtgtgttcatcctacccaacccgacccgcaccaaagtcagaatagggaaaaacagatgttgggtgacatgcaactaacgtctgccgtactacactgaagatatttttctatgtttattctccagtgaaagagcttatatttgtggtacataggggattttgttttaatttagaaaatttaattgtagaaaacatgttttataaccctttctctgtactttgttctatatcaggaattgacttgattagataaggtgacatagggtatcttaggccctacaagatagtaaaccccccatcacttgaaagtattcagtagaggcttaaaaaacattattaaaggatgtggttattaggggactttaagaaatgaatatgaaattgaagtaggaaatctttaagctactctgtgagttatgccttttaaaagcaatttgtaattcctgtagatttcttttaaatttaggcagtttcataaatgactatagcatcattttagcaaatttgtgatcctgtaagaggaggataagtgttttttgtttgtttgtttgttttttgtttttttgagacagagtctcactttgtaccccagaaagtaaatctagttagatgtggtttgtctcggctcactgcaacctccaccccgtgcgttctagcaattctcctgcctcagccaccacacctggcctaagaggggaggataagtgttttagtgatcatattagactgaatgtggcagatgagatttcccgcccccccattgttggttagactgacattcaacattcaacaagagccacctgcccttgtaggcatttctgccactatacccctacataaacctagagtgctattgcttacttgctttccttcaaatacattttttcatttgtggcctccacattcttgtgtgtgatgtcctttctctgtgaaatgtcttctaccctttttttcaaagcctagtttagaactgacctcttctatgaaccctctgccgactggcctttccttccccagtcccccaagttcaaaatgatctctttcctttgaatactatagtatttgcacaattcactatctccttatcatattcttcttgtttatttgttatcagctgatgttgacatcataagttcaggttcctaactagatccaatattggaatttttcagcttttgctaagaagagagcttgtatgtctttgggaataatgggcagaaaaagataactttgagaagtcttagacttctaatagctttgatatttaaaagtacatgtaatacaagaggtttttttcctacatttaatgcatggagaagataggacatttagaaatatggaattaatgttcatttgactggcaaaagattattttctcagatgtagtgaagtgtggtaaagaacttcactctagagccagaatgtctgtgtttgtatcccagagcccaccacttacatttaaccattaacattcaacttactgtctctgagtttcagtggcctcatctataaaatgaggataataagagtacctacttcatagagttgttttagtggttaaataaactaacgtaaacttgctagaacttgataaactaatattggatgagaactggttgaaataatgcctggctatagtaaaaacttggtaaatgttagttgccattacaatgcaactactgttcctaccattccctctgccagtgcctggtattcagtagcactcagtaaatgttagttaaatgaagaaataactgaaggaatgaatgaacaaatggttgatgtagagattgcttttccattgttgtttattgaatattttgagatgtataacatactgtctgttaggcactgtgggatgggcactcacggagctgtcttccaaaggggtataggagaggagacgcagtgatctcagcaacctacctttaaaacatatcctagtatctactgccatgttaggttctcttcttttgctttttttaaaaaaaaattctcacaaaactccccccacccacttcagtttatagatgaggaagctcctactacataatagtgcttcccagtctaattcttgacctcattgtatttatatgtcctttttttttttgacagagtctcactcattgcagtggcacaatcacagctcactgcaacctctgcctcccctgctcaagtgatcctcccacctcaacctcctgagtagctgggactacaggcatgcaccaccacgcctggctaatttttgtatttttttgtagagatgcggttttgccatgttggccaggctggtctcgaactcctgggctcaagccatctgcccactttggcctctgagagtgctgagattataggcatgagccaccattcccagccatgttttcctttttcattgaactttatctactttagccattaaactccactccattggtcttgtcattactaagagctgaaccacctgcaaaatattaagttaaaaagcgttttctttgacaacagttttcttttcttcatcttcctctatcactttacttctgaacttttattctctcattttgatctgacccctacttctctgtttttcctggccatttagtactttcttgttttgctcatcccatttcccagtggagaccttctggtctgctgctttatcactggttttgttagaagacatacaaatggcaaggaggtatatgaaaaggtgcctaacatcattgatcatcagagaaatgcagaccaaaactacaatgagatatcatttcaccccagttaaaatggctttttttttttttttccaaaagacaggcaataacaaagtactggtgaggatgtggagtaaagggaacccacatacactattagtaggaatgtaaattagtacagccactgtggagaacagtttgaaggttcctcaaaaaactaaaaatagagctaccatataatccagcaatcccactgctaggtatatatccaaaagaaaggcaatcaatatacggaagagatacctgcacacccaggtttattgcagcactattcacaatagccaagatttggaagcaacccaggtgtccaacagatgaatggataaagaaaacatggtatataaacacaatggaatactattcagctgtgaaaaagaatgaaatcctgtcatttgcaatcctgtcttgaatagaactggaggtcatgatgttaagtgaaataagacaggcacaaacttcacatgttctcacttatttgtgggagctaaaaattaaaacaatcgaactcatggagctagagaatagaattatggttaccagaggctggaagggtggttgggcgtataagtgtagggggagtggggatggttaatgggtacaaaaaaatgagaacgaataagatctacttgataacacaacagggtgactatagtcaacagtaattatacatttaaaaataactagaagagtataattagattgtaacacaaaagataaatgcttgaggtgatggatacctatttaccctgatgtgattattacttatttcatgcctatatcaaaatatttatactccaaaaatatatatacctactatgtacccacaaaaatttaaaaatttatatattgtttttgctatcacctttagaatttcttgtcattggatagttcgtctgtataccattctggtcttcattccccagggcccccgttgtctgatttttctgcttctagaactgttagaggtcacaaaagcaagatggttgtatctatcacaatttttgtctgactttaactgggtatctgttacgatttagtagtcatcttactgacttcttgttggtttccaattgaatcctcacagtagactgttttcattgtaatcagtatcgaattatagcctgttcccttcttcataaatgaaggctttcttcttcaacagttcttagtgacttcacctgtactttatttctctgctttgaatatttcgaagaaaacatattcttgctctttcccaaggttaacactacatacattaccttgaccacaggatgttttcttgcagattgtgacctaattccatcacccttcagcagcccccaccgttttcatggattcagctaaaccttctgtaagatgactctttttccccctaatctttatatctcttttgatatgtagctttagtctcactttttttccttttggattttgccagttagatgtctccctggaattccacttcagcatggctaagactaagcttgtcttctctttcctccccaaagcaaattgtaattaggatagactgaaggtgacagaagataactaagatcttcttcatcctttcggctcttatggaagctgaattccagtagtcattctaaatttgttgtatgtcagcttatggtatcttttcatgtctttacattcagccaaagaggaagttccttgaaggggagaccagagggcgtgctgtgcttcttaatcctctctttcttaaccagtaagaggcattcagtagatatctgatgatactgattaatagaggggaacttttcagattcttttttttttttaaccctagtaagctttagtacaaactaaatgctgagagattatcaagtaagggattgatcatcacaagaagactcaggatgttacatcctgtaggttttatagtttcctatattgtaaaaaatatgagttatagcagcttgtctggatgtcatacaggtataaaaatcagttttataaacttgagtaaattggggcccattttagaaaaaactcttgcaggctgtgaatgccaatatataagtaaagtattaagtataatgttatttaatgtgggcaaacataaagccaggtgtaaattttttaggtttaaaatcttatagaactatacatccaaaagaaaatttcaagttaaacataatacaaagcaatacaatctaaattaacattaatttaatgtgatgaatgatattgccttgctaaaagtgggtcactacttacaatgtgcaaatggtactcatcgttagggtatagattcttttaaactatgacatacgtacactaccatgtggaacgtgatgatgtgttctctgttctaactactgggaagacttccttggcatagcacatgccatggggtcagttggctttgacttcatatagatatgccatttacttggtcagtgtcacttctatgacaagtagtatgttgtgccagtttgattataagtacaaatatgggcaatgaagtaacttggttttaaggttgttactaagctgagtaacagtgtgtggctatacaaatttttataggctatcaggaatgaaaacacaggagattgttgtagattcaagtattttagattcaagtttgaagatgctcatgcagatgtttaactgagttgtatagacctttatgtttctttctttttctctttttttttttttgagacagagtcttgctctgtcacccaagctggagtgcaatggtgtgatctcggcttactgcaacctccgcctcccaggttcaagcaattctcctgcctcagcctcccaagtagctgggattacagatgtgcaccacgacgcccagctgattttttgtattttagtagaggcggggtctcaccatgttgtcaagatggtctcaatctcctgaccttgtgatccacccacctctgcctcccaaagtgctgtgattacaggcgtgagccaccgcgcctgactgacctttatgtttcttaactttatgctatacatcagttgatatttcaaaaatttaaatggtttctatgattattctttgggctaagaaattgggcattaattgtcctcatatgtatggtttttgtggctacttcatgtagattttatttttggtggttatcaaattggaatttttttttttttttttttttttgagacggagtctcattctgtttcccaggttggagtacagtggtgcaatctcagctcactgcagcctcgacctcccaggctcaagcagtcctctcacctcagccttctaagtagctgggactacaggcacgcaccaccacacctggctagttttttgtgtttttagtagagatggggttttaccctgttggccaggctggtcttgaactcctggcctcaagtgatccacctgcctcagcctcccaaagtgctgggattagaggcatgagccaccacacctggctgaaattggaatttcattggtactgcctgtaattttatgttaatttttttttttttttgtcgtcactagcttttatctaaagcccctagagagaaaggccatgataccttgtatacaaggttataagagtatacaagggaaagggagggctgaagggaacagggtgggctggtacaagcctcattagaaataccattgagtctgtgagtaaaacatcattatatgaaaaggagatgtggttttagggtggtccaattacttttgcaccagcctaataaaattacaagtcattatcaatagagacattgtaaaacctttttttttcccaaaagaagtatcaggtatgataattacatgtctgcccaactttcgttatagattaacataacttaattgtatttaaggtacaatttaggagagttgctgaaaaatgaatctttagtattgggatgccttgattctaccctcaatagctataatggattatgtgtctgagtagattaataaaaatcttttgagcatttttcttgaactacttcactgaagattagctttttgagcatccattttaatttctcagtatataaggatcggtttatcacaactgtattgttttccctggccttgttagattatattttcatatcatgtagaaaaataggtgtattcgttctcccttgaagtcctttgtctcccaaaggaaatggttgcaatacagatgtgtcacctcttccacaggtaaagtggaatggagaagtagccagttaaatagtgcatgctcaatttggaacatttagagcatacaggaaagttatttatttggtaaatattttttaagcatttactatgtttcatgcattgtactagttgtagaggatataattgaatacaactacatgtagcccttgactttatggaactagtctagtataaagatttaagattgcctggcatggtggctcacgccactaatcccagcactttgagaggccaaggcaggattgcttgaggccagaagtttaagagtagcttggtcaacataatgagactccatctctaaaataaatagatagatagatagatagatagatagatagatagatagatagaagtagttagacaacacaaagcagtttcactcatcttgtggcaaggagttatgtatttctaatcaaatttggcaactcaagcattttcaacaaaatctacatgttttttcagaataaagtgaccaacacagaatgttacctgtaaaaatcagagcaataattgctatctaaaataattttgaaaattaagtggtactgaaaggctcatatagcaaaaatatggcctcctgtcattgtactttcctacttcccagactcaccattttcaacattttttagtagtttattttgccattttatagcatagtacctgacattttatttattcaacagacatttcttaagtacctaatacatgccattccttgtttgaagggatgctaaggatacagtggtgaacaaggcgttgtggggttgtatagagggtattcattcctaaccttgaaccaaatatttctttctgttggataatgcattaaaaattgcaaacagtttacaaacttttggagcaatggtggccttgatcataaagtagggactgcttctaccgtatacatgcttggtggtgtatttgtgatatctggctaaagtttctacatggaaattgactgactttagttttgagacttctgggaaccagtcaggcaaaatagtgaaactgtgtatcctgtttccaagagttgtcttttaaggttatctgcttcattcatttggcctgacttgctaggcaaatgcctagggtaaatatgatttgattaactataacaacaacagcaacaacaacaactttattttttagagcagtttgaggttcacagcaaaattgagcagaatgtacagagattttccctatacccgcttcccctacgcatgtgcggcctcccctactatcaacatcccccaccagagtggtttgttacaattaatgaacctacattgacacatcattatcactcaaggtccgtagtttacattagagtccactcttggtgttgtgtatgggtttggtcgattttataatgacatttatccaccattatagtgtcatacatagtaattttgctaccctaaaaatccagtgtgctccacctgttcctccttccctcctccctcatccctggcaaccactgaactttttaacatctccatagttttgccttttccagaatgtcatatcattggaatcacacagtatgcagccttttcaaatgggcttctttccgttagtaataggcatttaagtttcatcctcatcttttcatggcttgatagctcatttctttccctccctcttttcttccctgtcttccttccttcctcttctttcctgtttcctctttcttcttccttttttaagagacaaggtgtctcactctgttgcccaggctggagtgcagtggcccaatcatagctcattgcagccttgaattcctgggctcaagtgatcctcctgcgttagcctcctgagtagctgggatcacaggctccagtcattttagtgctgaataatatttcattatctggatgtaccgcctattcattcacctactgaagaatatcttggttgcttctaagttttggcaattatgagtgaagttactataaacattgtatacaagttttatgtggatgtatgttgtcatctcccttgggcagataccaaggagtgccattgttggatcatatggtaaatatatctttagttttgtacagaattctaggttggtatttttttctctctcagtcctttattttatttggagacagtctcgctatgtcgcccaggctgccatacagtggtgccatctgggctcactgaaacctccacctcccaggttcaagcgattcttgtgccttggcctcccaagtagctgggattacaggagtgcgccaccacgcctgctaatttttgtatttttagtagagacagggttttgccatgttgcccaggctggtctcaaactcctgaccttaagtgattcacccacctcaatctcccaaaatcctgggattacaggcctgagctactgtgcctgatctctctcagtactttaaagaaatatttcattccacttttcttttttttcttctttttgagatggagtctcactctgtcgcctgggctggagtgcagtggcgcgatctcagctcactgccacctccgcctcctgggttcaagtgattctcctgcctcagcctcctgaatagctgagattacaggcgcccaccaccatgcccagctaattttttgcatttttagtagagacgggggttccaccatgttggccaggctggtctcgaactcctgacctcgtgattcgcacatctcggcctcccaaattgctgggattacaggtgtgagctaccacgcctggcccactcttcttgcttacatagtttctgaggagatgtcagatgtaatttttatttttgctcttctgtaggcaagttgagttttttccccctctagcttctctcaggatttttttctttatctttgattttcagtagtttgaaaattatatgcctagctgtcagggttttttgcttgtttgtttttgttttctcaggtgtgactccagaaaggttctaaagaggagctttacaatctcttctctggggtttatggagacttcctttacccttctgtgttagccccttaaagcactgcgtcaaccttaaaagggcacaggaaagggtgtctatgccatttttatgccatttatcctgcttggtgttttctgagctttcttcatctgcggtttaatgtctcacattaatttgtagaaattctctgtcattgtttcaaatttttcttcagttcttttctctgtttcttcttctggtgttcccattatgcttttgtggttgtcgtacagttattggatattttgttccaggcttttttttttccagtctttttttccttttgcttctcggttttgtaggtgtctgttgagatactctcaagtgcagatattctttcctcagctttgtctagtttactaataagcccattaaaggcagtcttcatttctgttacagtctttttgatcagtagcatttcttttttattctttcttaaaatttctgtctttctgcttacattgcccatctgttcttgcatggtttctactttgtccattagagttcttaggatatttatcataattatttcaaatttctggtgtaacaattccaacatccctgcaacatccaagtctagtttcgatgcttactgtgtctcttccagctgtgttttttcctatttaatatgtcttataattttttcttgatagccatacatgatgcattaggtaacagaaactgctgtgagtggacctttagtaatgtggtggtaaggtgtgcatggaggggaaacattttcagtctgttagtgaacttttgtcaacttcacatgtgcttctcaagtccatcctgtaagtgggagagtagggctagagaggactgaagttgggtatatattaaatactttctcctacaaagaagcctagaggggacgcattaggggattttttttcccccagtattcactgtgatgacccttattgagctcctggaggtaaaactcacaaaactgtggttctcccccctgcccatattactacatgtccctggagtttatatctttcagacttgtctgcactgagcttccaccaatttgtcaaatacagatcaggtttccctaccacccgtgcagttgaaaacccacatacaacttttgactcctccagagcttaactactcatagcctgctattgactggaagccttgccaataacataaacagttgattaatacatattttatatgttttctgtattatatattgtattcttacaataaagagaaaagaagatgttattaagaaaatcataaggaagataaaatatatttactgttcattaagtggttcccatgggtgctggttcccatggaggttgccccttgtgagtttttgctcagggaagttgtgattctctatatttgcctgttggtctcctaatttgggagtcatcagttttccctgtgacctcacttctcttacagagttaagaacagttgttggtttttcagtttgttcagtgttttacatgttgttagaacacagtggtacttctaagtttcttaacatgctagatcagaaacctgaagtctcacctaatttggctttttatattttttcttcttttttttcttccattgctaccaaagcatttttcatctgtgtctggggtgacattagagcagaatgtgatttctaggtaaacattattgggctccctagcagaaaaatttttgaaagtagtacatgaattctgtataattaaaattttcttttcatcttaataggtataggtaataggcacggcctattttttttttgctcaacagtctaaaatagtaatttaatcacctaatagccttagttatatagttgaaagaagagttggaaatctgattcatgggttggaaatcacctgtcacatatgagttttaggcactggtcactttattttgaaacagctttggggttttttcctttttcaactcataataggctttaacagcttttagttttgtttctgtttttttaacagcatgagttgccaaatttggttatagcttcttggtacaagatgggtaaatttgctttgtgttgtgtaattactttttattttaaatgctacctcttttatgaacactaactttacactaagattaggaaaatgagaattgcatgtctgcaacaaatagctatctgtagtattaaattgtgaaaatgtagactttggattggagctggcatctcttaatatgtaattgtaacatagagtaaataagtattttgtcccttgtagggtcaaacagtacagtgcatgggcagaattagagatgtaggcttttttttttttttttttttttactggcttagagaaccgtttgatcagctaatatggaattaagtccctagggctgcccaggcacaacattaactgctattaaaggaaaatttaaaagagtattagtgaaggttaaatactgaccatggacatctggcaaaattgatgttttttttcccctccaccattgtttatagtttattgttatttatcagagaattaatgtttattttcagaatctattaccataagaaatctgtttgaggacttcgtatgtgccaggaattctactaaataatgatataatgctgaacagaattagataggatcctcacttcgttaagcttacagtctagtggtatagatcaacattaatcaaagaataacacaaatagaaagcagagcagtggttcatgggattgactgtagagaagcatgagggaagttcccaggtgatggaaaatactttatttcttaatcgtggtggttacatgtgtgcatatgtttatgaaaatatattgtacatttaaagtggatacattttatcacatgtaaattatgactctataaagttaattaaaaagaataactcaggtaaggtggtgtgtgcgcctgtagtcccagctatttctgaggcaggaagatcacttgagcccaggagtttgagttcagcatgggcaacatgagacctgtgagactttgtctctaaaaaaatttaaataaataactaagataaatgtaaaattacagctgtagtaagttctacaaaggagagttacatgggctatgacgatgtaagatagcaagaactgacattggcagggaggaaatgatgatgagtagaagtaaataagtgaagtgtggggattgatgtcaaggggacagtataaaagaaataacagcatgcgccaaggccctaaaattggaaagtccttggcaaattaaaggagtttgaaaaaggccattgtgtgcaaagcagaaaataggtactacaaggtaaaagatggagctaagcggtaggtaaggctaaaccttgtcagccattgttaaatattgaattgtatcctaagcacaactcagtggaaagcagttaaagttctttaattgggggaggcaatgaaggggtaataaaattggttatagaaatactgctctggctctagtgttgagaatgaattggagtagccagagtagattcaagaagactttagtaagattattccaacaggccaggacctgttatagggtggtggcaatggagagagatggacagaatggagagtgtatttaggaggtaaaaatgacagaacttggtgatgcactgaatgtgaaatggggaaggtgtctaggaggactactaggtttatggtttgcgtattagggtggatgatagcagtttcatttactgagacagggagccctggcagagtacccagcttttagagtgggtagggggaaggggagagtgcatctggtgttgggcattttgaagtgatttacatacaacaaactgaaggtatctttaacactgagtccagcaggttagcatatttattcagcaagcattgcacctttttttgttgtttttggggtcttcaactcctggcctcgaatcctccctccttcccccgcctctcccagcctccgcctcccaaagtgctgggatttcaggagtgagccaccgcgcctggccagcatcgcgctgtttgtgcagtgtgccctgtgctaggtcttgcagtgggtaccagtagagacataaaagtacaaaagataattggacgtttagtagagtcctgaaagggggcgggataggaagatacctaaccataagaaaaaccagcaagagcggaaaaggagctagtcctccagatcaataagttaatcacttatgtttgtgattccctgcattttgggtgattctctgtcgaggtcctcttaagtccagacttttgatataatctgcagtttgcgccatttggattcctgaagcatctttacaagccacctacattccttatggagctgtggcacaacagcaagcccacgatgtctcaccggattaataaaaatataggcgctcacgcttttgtttaccgatatagtatctcctcctcccctcactccatcaacccccacgcgacacaactttccggaagtaagcaaaatccgttatcaaggtgaaactccggggaccaggctccacagctgccataaactggatggcacgttagaagccggtgggtgtaggtgaggcacgctggcgcccgcgggcccttctccagccgctacccagtgggaatccgcggggctgaagccccgaaaccaggctgagcgtcccagagcgcaacctccctttcccccagcagcgccggcgccgcagaagccgcgtgtccccaggcgcactcccccaaggtgaacccccgccccccacggaggcggctgggtcgcgggtctgggcggggcgctccggacgccctcccgccgctgcgcacccctcccgcgagctgccagctccctcggcctctccacccaaaactggcccaaccgccaatcgtctgcctctcacctcctacagcaggtgacccatggccaatcgccaggggtctctttgccaggagccgccagggccagccaatcggggcgacccctccgccggggaggggacgggaaaggggtggggggtgaagggggtgaagggggtgtcccgggggacgggctgaacctcagtcaggaccgcctgcaccgcagtccggggatcgggtcgaggggagaagaaaaaggggtgctcgggagcagcccccggctacctcccctggaggcacagagggcgggggccttggcgaatggctttcttgctggccacttgcggagtgagtagaccccgagggtctgggagaggggccggcccctacccctgagtccccggggtcccggccgccaggccggagcgcgaatgtcgtgctcaccctgcctccttcccgccgccccctgggctttttgatgacaagcttcaaaactgcaaagaagatgaacagagaaagaaaattgaaactctcaaagagacaacaaatagcatggtagaatcaattaaacactgcattgtgttgctgcagattgccaaaagtactattaatcccgtagatgcaatatatcaacctagtcctttggaacctgtgatcagcacaatgccttcccagactgtgttacctccagaacctgttcagttgtgtaagtcagagcagcgtccatcttccctaccagttggacctgtgttggctaccttgggacatcatcagactcctacaccaaatagtacaggcagtggccattcaccaccgagtagcagtctcacttctccaagccacgtgaacttgtctccaaatacagtcccagagttctcttactccagcagtgaagatgaattttatgatgctgatgaattccatcaaagtggctcatccccaaagcgcttaatagattcttctggatctgcctcagtcctgacacacagcagctcgggaaatagtctaaaacgcccagataccacagaatcacttaattcttccttgtccaatggaacaagtgatgctgacctgtttgattcacatgatgacagagatgatgatgcggaggcagggtctgcttcagtttcgtcgacgcggccgc

SEQ ID NO: 735146 - DNA, 18772 bp, Homo sapiens
gtaagggtctttacatggtttccagatagttcattagttgttgctttctttttttgtctgttttctgttttttttttttaaataactgtggtatgatgtaataggaacttataatttctgagttgcttatttttcctttacagttatagtaaagttatactcatttattttctcctgctttctgcagagtaaaatactgatttttgtctagaaacaagacagtgcaagacaatgttgaaagtgaaattctatgttaaaatatgccagatttattttaagaatttaatatctgtagtcagttatcaatacaaccaaattacataattatgcatgataataggtaaatactgagaagttcacctcattttcttgttaaaggatttggctattaccgtatgtgtcagttagtactcttttgtatggtagtgaaagaaaactcaacccaaactgattcatgaagaagaaagtaaatctggttagatgtggtttgaattaggtaattcatgtcatgaggactcagatctcccatctctatttctacgttccacttttgcattggcttcattttcggttaggttctcccttggtggtggtaaggtggttgtagcaatgtcagcctcccatttttggaaccgagtccataggaggctattctttctagaccttaataggagtaacacaattattgctcatcaccctagctttggccatgtgtcaaatcctgaccagtcacaatttcacagtcatagattctaccctggagctgggatgttactggcctcactagaaacacattgctgatagggtagaaggtgtgttcatcctacccaacccgacccgcaccaaagtcagaatagggaaaaacagatgttgggtgacatgcaactaacgtctgccgtactacactgaagatatttttctatgtttattctccagtgaaagagcttatatttgtggtacataggggattttgttttaatttagaaaatttaattgtagaaaacatgttttataaccctttctctgtactttgttctatatcaggaattgacttgattagataaggtgacatagggtatcttaggccctacaagatagtaaaccccccatcacttgaaagtattcagtagaggcttaaaaaacattattaaaggatgtggttattaggggactttaagaaatgaatatgaaattgaagtaggaaatctttaagctactctgtgagttatgccttttaaaagcaatttgtaattcctgtagatttcttttaaatttaggcagtttcataaatgactatagcatcattttagcaaatttgtgatcctgtaagaggaggataagtgttttttgtttgtttgtttgttttttgtttttttgagacagagtctcactttgtaccccagaaagtaaatctagttagatgtggtttgtctcggctcactgcaacctccaccccgtgcgttctagcaattctcctgcctcagccaccacacctggcctaagaggggaggataagtgttttagtgatcatattagactgaatgtggcagatgagatttcccgcccccccattgttggttagactgacattcaacattcaacaagagccacctgcccttgtaggcatttctgccactatacccctacataaacctagagtgctattgcttacttgctttccttcaaatacattttttcatttgtggcctccacattcttgtgtgtgatgtcctttctctgtgaaatgtcttctaccctttttttcaaagcctagtttagaactgacctcttctatgaaccctctgccgactggcctttccttccccagtcccccaagttcaaaatgatctctttcctttgaatactatagtatttgcacaattcactatctccttatcatattcttcttgtttatttgttatcagctgatgttgacatcataagttcaggttcctaactagatccaatattggaatttttcagcttttgctaagaagagagcttgtatgtctttgggaataatgggcagaaaaagataactttgagaagtcttagacttctaatagctttgatatttaaaagtacatgtaatacaagaggtttttttcctacatttaatgcatggagaagataggacatttagaaatatggaattaatgttcatttgactggcaaaagattattttctcagatgtagtgaagtgtggtaaagaacttcactctagagccagaatgtctgtgtttgtatcccagagcccaccacttacatttaaccattaacattcaacttactgtctctgagtttcagtggcctcatctataaaatgaggataataagagtacctacttcatagagttgttttagtggttaaataaactaacgtaaacttgctagaacttgataaactaatattggatgagaactggttgaaataatgcctggctatagtaaaaacttggtaaatgttagttgccattacaatgcaactactgttcctaccattccctctgccagtgcctggtattcagtagcactcagtaaatgttagttaaatgaagaaataactgaaggaatgaatgaacaaatggttgatgtagagattgcttttccattgttgtttattgaatattttgagatgtataacatactgtctgttaggcactgtgggatgggcactcacggagctgtcttccaaaggggtataggagaggagacgcagtgatctcagcaacctacctttaaaacatatcctagtatctactgccatgttaggttctcttcttttgctttttttaaaaaaaaattctcacaaaactccccccacccacttcagtttatagatgaggaagctcctactacataatagtgcttcccagtctaattcttgacctcattgtatttatatgtcctttttttttttgacagagtctcactcattgcagtggcacaatcacagctcactgcaacctctgcctcccctgctcaagtgatcctcccacctcaacctcctgagtagctgggactacaggcatgcaccaccacgcctggctaatttttgtatttttttgtagagatgcggttttgccatgttggccaggctggtctcgaactcctgggctcaagccatctgcccactttggcctctgagagtgctgagattataggcatgagccaccattcccagccatgttttcctttttcattgaactttatctactttagccattaaactccactccattggtcttgtcattactaagagctgaaccacctgcaaaatattaagttaaaaagcgttttctttgacaacagttttcttttcttcatcttcctctatcactttacttctgaacttttattctctcattttgatctgacccctacttctctgtttttcctggccatttagtactttcttgttttgctcatcccatttcccagtggagaccttctggtctgctgctttatcactggttttgttagaagacatacaaatggcaaggaggtatatgaaaaggtgcctaacatcattgatcatcagagaaatgcagaccaaaactacaatgagatatcatttcaccccagttaaaatggctttttttttttttttccaaaagacaggcaataacaaagtactggtgaggatgtggagtaaagggaacccacatacactattagtaggaatgtaaattagtacagccactgtggagaacagtttgaaggttcctcaaaaaactaaaaatagagctaccatataatccagcaatcccactgctaggtatatatccaaaagaaaggcaatcaatatacggaagagatacctgcacacccaggtttattgcagcactattcacaatagccaagatttggaagcaacccaggtgtccaacagatgaatggataaagaaaacatggtatataaacacaatggaatactattcagctgtgaaaaagaatgaaatcctgtcatttgcaatcctgtcttgaatagaactggaggtcatgatgttaagtgaaataagacaggcacaaacttcacatgttctcacttatttgtgggagctaaaaattaaaacaatcgaactcatggagctagagaatagaattatggttaccagaggctggaagggtggttgggcgtataagtgtagggggagtggggatggttaatgggtacaaaaaaatgagaacgaataagatctacttgataacacaacagggtgactatagtcaacagtaattatacatttaaaaataactagaagagtataattagattgtaacacaaaagataaatgcttgaggtgatggatacctatttaccctgatgtgattattacttatttcatgcctatatcaaaatatttatactccaaaaatatatatacctactatgtacccacaaaaatttaaaaatttatatattgtttttgctatcacctttagaatttcttgtcattggatagttcgtctgtataccattctggtcttcattccccagggcccccgttgtctgatttttctgcttctagaactgttagaggtcacaaaagcaagatggttgtatctatcacaatttttgtctgactttaactgggtatctgttacgatttagtagtcatcttactgacttcttgttggtttccaattgaatcctcacagtagactgttttcattgtaatcagtatcgaattatagcctgttcccttcttcataaatgaaggctttcttcttcaacagttcttagtgacttcacctgtactttatttctctgctttgaatatttcgaagaaaacatattcttgctctttcccaaggttaacactacatacattaccttgaccacaggatgttttcttgcagattgtgacctaattccatcacccttcagcagcccccaccgttttcatggattcagctaaaccttctgtaagatgactctttttccccctaatctttatatctcttttgatatgtagctttagtctcactttttttccttttggattttgccagttagatgtctccctggaattccacttcagcatggctaagactaagcttgtcttctctttcctccccaaagcaaattgtaattaggatagactgaaggtgacagaagataactaagatcttcttcatcctttcggctcttatggaagctgaattccagtagtcattctaaatttgttgtatgtcagcttatggtatcttttcatgtctttacattcagccaaagaggaagttccttgaaggggagaccagagggcgtgctgtgcttcttaatcctctctttcttaaccagtaagaggcattcagtagatatctgatgatactgattaatagaggggaacttttcagattcttttttttttttaaccctagtaagctttagtacaaactaaatgctgagagattatcaagtaagggattgatcatcacaagaagactcaggatgttacatcctgtaggttttatagtttcctatattgtaaaaaatatgagttatagcagcttgtctggatgtcatacaggtataaaaatcagttttataaacttgagtaaattggggcccattttagaaaaaactcttgcaggctgtgaatgccaatatataagtaaagtattaagtataatgttatttaatgtgggcaaacataaagccaggtgtaaattttttaggtttaaaatcttatagaactatacatccaaaagaaaatttcaagttaaacataatacaaagcaatacaatctaaattaacattaatttaatgtgatgaatgatattgccttgctaaaagtgggtcactacttacaatgtgcaaatggtactcatcgttagggtatagattcttttaaactatgacatacgtacactaccatgtggaacgtgatgatgtgttctctgttctaactactgggaagacttccttggcatagcacatgccatggggtcagttggctttgacttcatatagatatgccatttacttggtcagtgtcacttctatgacaagtagtatgttgtgccagtttgattataagtacaaatatgggcaatgaagtaacttggttttaaggttgttactaagctgagtaacagtgtgtggctatacaaatttttataggctatcaggaatgaaaacacaggagattgttgtagattcaagtattttagattcaagtttgaagatgctcatgcagatgtttaactgagttgtatagacctttatgtttctttctttttctctttttttttttttgagacagagtcttgctctgtcacccaagctggagtgcaatggtgtgatctcggcttactgcaacctccgcctcccaggttcaagcaattctcctgcctcagcctcccaagtagctgggattacagatgtgcaccacgacgcccagctgattttttgtattttagtagaggcggggtctcaccatgttgtcaagatggtctcaatctcctgaccttgtgatccacccacctctgcctcccaaagtgctgtgattacaggcgtgagccaccgcgcctgactgacctttatgtttcttaactttatgctatacatcagttgatatttcaaaaatttaaatggtttctatgattattctttgggctaagaaattgggcattaattgtcctcatatgtatggtttttgtggctacttcatgtagattttatttttggtggttatcaaattggaatttttttttttttttttttttttgagacggagtctcattctgtttcccaggttggagtacagtggtgcaatctcagctcactgcagcctcgacctcccaggctcaagcagtcctctcacctcagccttctaagtagctgggactacaggcacgcaccaccacacctggctagttttttgtgtttttagtagagatggggttttaccctgttggccaggctggtcttgaactcctggcctcaagtgatccacctgcctcagcctcccaaagtgctgggattagaggcatgagccaccacacctggctgaaattggaatttcattggtactgcctgtaattttatgttaatttttttttttttttgtcgtcactagcttttatctaaagcccctagagagaaaggccatgataccttgtatacaaggttataagagtatacaagggaaagggagggctgaagggaacagggtgggctggtacaagcctcattagaaataccattgagtctgtgagtaaaacatcattatatgaaaaggagatgtggttttagggtggtccaattacttttgcaccagcctaataaaattacaagtcattatcaatagagacattgtaaaacctttttttttcccaaaagaagtatcaggtatgataattacatgtctgcccaactttcgttatagattaacataacttaattgtatttaaggtacaatttaggagagttgctgaaaaatgaatctttagtattgggatgccttgattctaccctcaatagctataatggattatgtgtctgagtagattaataaaaatcttttgagcatttttcttgaactacttcactgaagattagctttttgagcatccattttaatttctcagtatataaggatcggtttatcacaactgtattgttttccctggccttgttagattatattttcatatcatgtagaaaaataggtgtattcgttctcccttgaagtcctttgtctcccaaaggaaatggttgcaatacagatgtgtcacctcttccacaggtaaagtggaatggagaagtagccagttaaatagtgcatgctcaatttggaacatttagagcatacaggaaagttatttatttggtaaatattttttaagcatttactatgtttcatgcattgtactagttgtagaggatataattgaatacaactacatgtagcccttgactttatggaactagtctagtataaagatttaagattgcctggcatggtggctcacgccactaatcccagcactttgagaggccaaggcaggattgcttgaggccagaagtttaagagtagcttggtcaacataatgagactccatctctaaaataaatagatagatagatagatagatagatagatagatagatagatagaagtagttagacaacacaaagcagtttcactcatcttgtggcaaggagttatgtatttctaatcaaatttggcaactcaagcattttcaacaaaatctacatgttttttcagaataaagtgaccaacacagaatgttacctgtaaaaatcagagcaataattgctatctaaaataattttgaaaattaagtggtactgaaaggctcatatagcaaaaatatggcctcctgtcattgtactttcctacttcccagactcaccattttcaacattttttagtagtttattttgccattttatagcatagtacctgacattttatttattcaacagacatttcttaagtacctaatacatgccattccttgtttgaagggatgctaaggatacagtggtgaacaaggcgttgtggggttgtatagagggtattcattcctaaccttgaaccaaatatttctttctgttggataatgcattaaaaattgcaaacagtttacaaacttttggagcaatggtggccttgatcataaagtagggactgcttctaccgtatacatgcttggtggtgtatttgtgatatctggctaaagtttctacatggaaattgactgactttagttttgagacttctgggaaccagtcaggcaaaatagtgaaactgtgtatcctgtttccaagagttgtcttttaaggttatctgcttcattcatttggcctgacttgctaggcaaatgcctagggtaaatatgatttgattaactataacaacaacagcaacaacaacaactttattttttagagcagtttgaggttcacagcaaaattgagcagaatgtacagagattttccctatacccgcttcccctacgcatgtgcggcctcccctactatcaacatcccccaccagagtggtttgttacaattaatgaacctacattgacacatcattatcactcaaggtccgtagtttacattagagtccactcttggtgttgtgtatgggtttggtcgattttataatgacatttatccaccattatagtgtcatacatagtaattttgctaccctaaaaatccagtgtgctccacctgttcctccttccctcctccctcatccctggcaaccactgaactttttaacatctccatagttttgccttttccagaatgtcatatcattggaatcacacagtatgcagccttttcaaatgggcttctttccgttagtaataggcatttaagtttcatcctcatcttttcatggcttgatagctcatttctttccctccctcttttcttccctgtcttccttccttcctcttctttcctgtttcctctttcttcttccttttttaagagacaaggtgtctcactctgttgcccaggctggagtgcagtggcccaatcatagctcattgcagccttgaattcctgggctcaagtgatcctcctgcgttagcctcctgagtagctgggatcacaggctccagtcattttagtgctgaataatatttcattatctggatgtaccgcctattcattcacctactgaagaatatcttggttgcttctaagttttggcaattatgagtgaagttactataaacattgtatacaagttttatgtggatgtatgttgtcatctcccttgggcagataccaaggagtgccattgttggatcatatggtaaatatatctttagttttgtacagaattctaggttggtatttttttctctctcagtcctttattttatttggagacagtctcgctatgtcgcccaggctgccatacagtggtgccatctgggctcactgaaacctccacctcccaggttcaagcgattcttgtgccttggcctcccaagtagctgggattacaggagtgcgccaccacgcctgctaatttttgtatttttagtagagacagggttttgccatgttgcccaggctggtctcaaactcctgaccttaagtgattcacccacctcaatctcccaaaatcctgggattacaggcctgagctactgtgcctgatctctctcagtactttaaagaaatatttcattccacttttcttttttttcttctttttgagatggagtctcactctgtcgcctgggctggagtgcagtggcgcgatctcagctcactgccacctccgcctcctgggttcaagtgattctcctgcctcagcctcctgaatagctgagattacaggcgcccaccaccatgcccagctaattttttgcatttttagtagagacgggggttccaccatgttggccaggctggtctcgaactcctgacctcgtgattcgcacatctcggcctcccaaattgctgggattacaggtgtgagctaccacgcctggcccactcttcttgcttacatagtttctgaggagatgtcagatgtaatttttatttttgctcttctgtaggcaagttgagttttttccccctctagcttctctcaggatttttttctttatctttgattttcagtagtttgaaaattatatgcctagctgtcagggttttttgcttgtttgtttttgttttctcaggtgtgactccagaaaggttctaaagaggagctttacaatctcttctctggggtttatggagacttcctttacccttctgtgttagccccttaaagcactgcgtcaaccttaaaagggcacaggaaagggtgtctatgccatttttatgccatttatcctgcttggtgttttctgagctttcttcatctgcggtttaatgtctcacattaatttgtagaaattctctgtcattgtttcaaatttttcttcagttcttttctctgtttcttcttctggtgttcccattatgcttttgtggttgtcgtacagttattggatattttgttccaggcttttttttttccagtctttttttccttttgcttctcggttttgtaggtgtctgttgagatactctcaagtgcagatattctttcctcagctttgtctagtttactaataagcccattaaaggcagtcttcatttctgttacagtctttttgatcagtagcatttcttttttattctttcttaaaatttctgtctttctgcttacattgcccatctgttcttgcatggtttctactttgtccattagagttcttaggatatttatcataattatttcaaatttctggtgtaacaattccaacatccctgcaacatccaagtctagtttcgatgcttactgtgtctcttccagctgtgttttttcctatttaatatgtcttataattttttcttgatagccatacatgatgcattaggtaacagaaactgctgtgagtggacctttagtaatgtggtggtaaggtgtgcatggaggggaaacattttcagtctgttagtgaacttttgtcaacttcacatgtgcttctcaagtccatcctgtaagtgggagagtagggctagagaggactgaagttgggtatatattaaatactttctcctacaaagaagcctagaggggacgcattaggggattttttttcccccagtattcactgtgatgacccttattgagctcctggaggtaaaactcacaaaactgtggttctcccccctgcccatattactacatgtccctggagtttatatctttcagacttgtctgcactgagcttccaccaatttgtcaaatacagatcaggtttccctaccacccgtgcagttgaaaacccacatacaacttttgactcctccagagcttaactactcatagcctgctattgactggaagccttgccaataacataaacagttgattaatacatattttatatgttttctgtattatatattgtattcttacaataaagagaaaagaagatgttattaagaaaatcataaggaagataaaatatatttactgttcattaagtggttcccatgggtgctggttcccatggaggttgccccttgtgagtttttgctcagggaagttgtgattctctatatttgcctgttggtctcctaatttgggagtcatcagttttccctgtgacctcacttctcttacagagttaagaacagttgttggtttttcagtttgttcagtgttttacatgttgttagaacacagtggtacttctaagtttcttaacatgctagatcagaaacctgaagtctcacctaatttggctttttatattttttcttcttttttttcttccattgctaccaaagcatttttcatctgtgtctggggtgacattagagcagaatgtgatttctaggtaaacattattgggctccctagcagaaaaatttttgaaagtagtacatgaattctgtataattaaaattttcttttcatcttaataggtataggtaataggcacggcctattttttttttgctcaacagtctaaaatagtaatttaatcacctaatagccttagttatatagttgaaagaagagttggaaatctgattcatgggttggaaatcacctgtcacatatgagttttaggcactggtcactttattttgaaacagctttggggttttttcctttttcaactcataataggctttaacagcttttagttttgtttctgtttttttaacagcatgagttgccaaatttggttatagcttcttggtacaagatgggtaaatttgctttgtgttgtgtaattactttttattttaaatgctacctcttttatgaacactaactttacactaagattaggaaaatgagaattgcatgtctgcaacaaatagctatctgtagtattaaattgtgaaaatgtagactttggattggagctggcatctcttaatatgtaattgtaacatagagtaaataagtattttgtcccttgtagggtcaaacagtacagtgcatgggcagaattagagatgtaggcttttttttttttttttttttttactggcttagagaaccgtttgatcagctaatatggaattaagtccctagggctgcccaggcacaacattaactgctattaaaggaaaatttaaaagagtattagtgaaggttaaatactgaccatggacatctggcaaaattgatgttttttttcccctccaccattgtttatagtttattgttatttatcagagaattaatgtttattttcagaatctattaccataagaaatctgtttgaggacttcgtatgtgccaggaattctactaaataatgatataatgctgaacagaattagataggatcctcacttcgttaagcttacagtctagtggtatagatcaacattaatcaaagaataacacaaatagaaagcagagcagtggttcatgggattgactgtagagaagcatgagggaagttcccaggtgatggaaaatactttatttcttaatcgtggtggttacatgtgtgcatatgtttatgaaaatatattgtacatttaaagtggatacattttatcacatgtaaattatgactctataaagttaattaaaaagaataactcaggtaaggtggtgtgtgcgcctgtagtcccagctatttctgaggcaggaagatcacttgagcccaggagtttgagttcagcatgggcaacatgagacctgtgagactttgtctctaaaaaaatttaaataaataactaagataaatgtaaaattacagctgtagtaagttctacaaaggagagttacatgggctatgacgatgtaagatagcaagaactgacattggcagggaggaaatgatgatgagtagaagtaaataagtgaagtgtggggattgatgtcaaggggacagtataaaagaaataacagcatgcgccaaggccctaaaattggaaagtccttggcaaattaaaggagtttgaaaaaggccattgtgtgcaaagcagaaaataggtactacaaggtaaaagatggagctaagcggtaggtaaggctaaaccttgtcagccattgttaaatattgaattgtatcctaagcacaactcagtggaaagcagttaaagttctttaattgggggaggcaatgaaggggtaataaaattggttatagaaatactgctctggctctagtgttgagaatgaattggagtagccagagtagattcaagaagactttagtaagattattccaacaggccaggacctgttatagggtggtggcaatggagagagatggacagaatggagagtgtatttaggaggtaaaaatgacagaacttggtgatgcactgaatgtgaaatggggaaggtgtctaggaggactactaggtttatggtttgcgtattagggtggatgatagcagtttcatttactgagacagggagccctggcagagtacccagcttttagagtgggtagggggaaggggagagtgcatctggtgttgggcattttgaagtgatttacatacaacaaactgaaggtatctttaacactgagtccagcaggttagcatatttattcagcaagcattgcacctttttttgttgtttttggggtcttcaactcctggcctcgaatcctccctccttcccccgcctctcccagcctccgcctcccaaagtgctgggatttcaggagtgagccaccgcgcctggccagcatcgcgctgtttgtgcagtgtgccctgtgctaggtcttgcagtgggtaccagtagagacataaaagtacaaaagataattggacgtttagtagagtcctgaaagggggcgggataggaagatacctaaccataagaaaaaccagcaagagcggaaaaggagctagtcctccagatcaataagttaatcacttatgtttgtgattccctgcattttgggtgattctctgtcgaggtcctcttaagtccagacttttgatataatctgcagtttgcgccatttggattcctgaagcatctttacaagccacctacattccttatggagctgtggcacaacagcaagcccacgatgtctcaccggattaataaaaatataggcgctcacgcttttgtttaccgatatagtatctcctcctcccctcactccatcaacccccacgcgacacaactttccggaagtaagcaaaatccgttatcaaggtgaaactccggggaccaggctccacagctgccataaactggatggcacgttagaagccggtgggtgtaggtgaggcacgctggcgcccgcgggcccttctccagccgctacccagtgggaatccgcggggctgaagccccgaaaccaggctgagcgtcccagagcgcaacctccctttcccccagcagcgccggcgccgcagaagccgcgtgtccccaggcgcactcccccaaggtgaacccccgccccccacggaggcggctgggtcgcgggtctgggcggggcgctccggacgccctcccgccgctgcgcacccctcccgcgagctgccagctccctcggcctctccacccaaaactggcccaaccgccaatcgtctgcctctcacctcctacagcaggtgacccatggccaatcgccaggggtctctttgccaggagccgccagggccagccaatcggggcgacccctccgccggggaggggacgggaaaggggtggggggtgaagggggtgaagggggtgtcccgggggacgggctgaacctcagtcaggaccgcctgcaccgcagtccggggatcgggtcgaggggagaagaaaaaggggtgctcgggagcagcccccggctacctcccctggaggcacagagggcgggggccttggcgaatggctttcttgctggccacttgcggaggtttggattcaggatttgttcctagtgtccaagattttgataagaaacttacagaagctgatgcttacctacaaatcttgattgaacaattaaagctttttgatgacaagcttcaaaactgcaaagaagatgaacagagaaagaaaattgaaactctcaaagagacaacaaatagcatggtagaatcaattaaacactgcattgtgttgctgcagattgccaaagaccagagtaatgcggagaagcacgcagatggaatgataagtactattaatcccgtagatgcaatatatcaacctagtcctttggaacctgtgatcagcacaatgccttcccagactgtgttacctccagaacctgttcagttgtgtaagtcagagcagcgtccatcttccctaccagttggacctgtgttggctaccttgggacatcatcagactcctacaccaaatagtacaggcagtggccattcaccaccgagtagcagtctcacttctccaagccacgtgaacttgtctccaaatacagtcccagagttctcttactccagcagtgaagatgaattttatgatgctgatgaattccatcaaagtggctcatccccaaagcgcttaatagattcttctggatctgcctcagtcctgacacacagcagctcgggaaatagtctaaaacgcccagataccacagaatcacttaattcttccttgtccaatggaacaagtgatgctgacctgtttgattcacatgatgacagagatgatgatgcggaggcagggtctgtggaggagcacaagagcgttatcatgcatctcttgtcgcaggttagacttggaatggatcttactaaggtagttcttccaacgtttattcttgaaagaagatctcttttagaaatgtatgcagacttttttgcacatccggacctgtttgtgagcattagtgaccagaaggatcccaaggatcgaatggttcaggttgtgaaatggtacctctcagcctttcatgcgggaaggaaaggatcagttgccaaaaagccatacaatcccattttgggcgagatttttcagtgtcattggacattaccaaatgatactgaagagaacacagaactagtttcagaaggaccagttccctgggtttccaaaaacagtgtaacatttgtggctgagcaggtttcccatcatccacccatttcagccttttatgctgagtgttttaacaagaagatacaattcaatgctcatatctggaccaaatcaaaattccttgggatgtcaattggggtgcacaacatagggcagggctgtgtctcatgtctagactatgatgaacattacattctcacattccccaatggctatggaaggcaagtgtgtccatttcctctgatcagcagtagactctgctgttccttgagacatgccccttccccctcttcctcttaactgtcaaccttacctaaaaacttttgattttgcaggtctatcctcacagtgccctgggtggaattaggaggagaatgcaatattaattgttccaaaacaggctatagtgcaaatatcatcttccacactaaacccttctatgggggcaagaagcacagaattactgccgagattttgtaggtattttttctgccttagagctcttatgcttttctgaaataactgccttttgtcttgaactacagcttctggattaggagtgtgaaagaatggttctgtctttgtaagcgtgtttcacattttatgtgtcatgtcttttgctgaagtcccatatcagaagaagacctaaaacatatattcagagcagtcagaggtcattgataggtttccttcctaaaaacctgacttgcaatgttgaactaaaagaggccttcctaggttgcctagctaaaccagattatggatccctaatttattcttgccagattgaatgatgagctggtccttacagcagactttgtgacccctgcagcactgcctcctggtcctcacagctatccctttttctgtgcctttgctggggaaaaacagtaaccatcacattttgcacgcatctggcttgcttccacttgacactcttgggtcacgtgcagatgactgtgccagtcagtggaaagtctatagtgatggcaccatgactctctctgcctctggaacccttaactgggggggaaggggacagtgggaaagaaagtttcaggcgttgatagcagctctcctccctctgccctggtcatgtctcccttttctggcctctttcaatcctgtttatgccttgcccttcctaaccaggcctttgctgtgttgcttatcttctcacattccatagttgtgtgtccaagtagaggtctgttacggcttttgcagaatggatccttgctcagggaaagtattcacaccatctggcacagaggtccctttcaacctgaggatgaaagcctgcattatattcttaagcaaagccttccctgacccccagtgcccatgtaagctcaccacagcacttaccacctagaatttcaatggtggttacgtctctctccactacgctgtgaacagcttgaggatagggaatttgccaactctgttatggtccttgcacccagaataggacgttcttgcccaaacccaccattcttgggatctcaagttcataagcgtcctgttgaaggccctcattcttatagttagccctggggagtccagttctgttaagatgctttcatcaaaaacttcacagttgctcttctgtgctctactctgtagttgggccacactgagcagattctttggtagaattttcaacttgagactaacacaagtatttccttttctgttcag

SEQ ID NO: 735147 - DNA, 19168 bp, Homo sapiens
gtaagggtctttacatggtttccagatagttcattagttgttgctttctttttttgtctgttttctgttttttttttttaaataactgtggtatgatgtaataggaacttataatttctgagttgcttatttttcctttacagttatagtaaagttatactcatttattttctcctgctttctgcagagtaaaatactgatttttgtctagaaacaagacagtgcaagacaatgttgaaagtgaaattctatgttaaaatatgccagatttattttaagaatttaatatctgtagtcagttatcaatacaaccaaattacataattatgcatgataataggtaaatactgagaagttcacctcattttcttgttaaaggatttggctattaccgtatgtgtcagttagtactcttttgtatggtagtgaaagaaaactcaacccaaactgattcatgaagaagaaagtaaatctggttagatgtggtttgaattaggtaattcatgtcatgaggactcagatctcccatctctatttctacgttccacttttgcattggcttcattttcggttaggttctcccttggtggtggtaaggtggttgtagcaatgtcagcctcccatttttggaaccgagtccataggaggctattctttctagaccttaataggagtaacacaattattgctcatcaccctagctttggccatgtgtcaaatcctgaccagtcacaatttcacagtcatagattctaccctggagctgggatgttactggcctcactagaaacacattgctgatagggtagaaggtgtgttcatcctacccaacccgacccgcaccaaagtcagaatagggaaaaacagatgttgggtgacatgcaactaacgtctgccgtactacactgaagatatttttctatgtttattctccagtgaaagagcttatatttgtggtacataggggattttgttttaatttagaaaatttaattgtagaaaacatgttttataaccctttctctgtactttgttctatatcaggaattgacttgattagataaggtgacatagggtatcttaggccctacaagatagtaaaccccccatcacttgaaagtattcagtagaggcttaaaaaacattattaaaggatgtggttattaggggactttaagaaatgaatatgaaattgaagtaggaaatctttaagctactctgtgagttatgccttttaaaagcaatttgtaattcctgtagatttcttttaaatttaggcagtttcataaatgactatagcatcattttagcaaatttgtgatcctgtaagaggaggataagtgttttttgtttgtttgtttgttttttgtttttttgagacagagtctcactttgtaccccagaaagtaaatctagttagatgtggtttgtctcggctcactgcaacctccaccccgtgcgttctagcaattctcctgcctcagccaccacacctggcctaagaggggaggataagtgttttagtgatcatattagactgaatgtggcagatgagatttcccgcccccccattgttggttagactgacattcaacattcaacaagagccacctgcccttgtaggcatttctgccactatacccctacataaacctagagtgctattgcttacttgctttccttcaaatacattttttcatttgtggcctccacattcttgtgtgtgatgtcctttctctgtgaaatgtcttctaccctttttttcaaagcctagtttagaactgacctcttctatgaaccctctgccgactggcctttccttccccagtcccccaagttcaaaatgatctctttcctttgaatactatagtatttgcacaattcactatctccttatcatattcttcttgtttatttgttatcagctgatgttgacatcataagttcaggttcctaactagatccaatattggaatttttcagcttttgctaagaagagagcttgtatgtctttgggaataatgggcagaaaaagataactttgagaagtcttagacttctaatagctttgatatttaaaagtacatgtaatacaagaggtttttttcctacatttaatgcatggagaagataggacatttagaaatatggaattaatgttcatttgactggcaaaagattattttctcagatgtagtgaagtgtggtaaagaacttcactctagagccagaatgtctgtgtttgtatcccagagcccaccacttacatttaaccattaacattcaacttactgtctctgagtttcagtggcctcatctataaaatgaggataataagagtacctacttcatagagttgttttagtggttaaataaactaacgtaaacttgctagaacttgataaactaatattggatgagaactggttgaaataatgcctggctatagtaaaaacttggtaaatgttagttgccattacaatgcaactactgttcctaccattccctctgccagtgcctggtattcagtagcactcagtaaatgttagttaaatgaagaaataactgaaggaatgaatgaacaaatggttgatgtagagattgcttttccattgttgtttattgaatattttgagatgtataacatactgtctgttaggcactgtgggatgggcactcacggagctgtcttccaaaggggtataggagaggagacgcagtgatctcagcaacctacctttaaaacatatcctagtatctactgccatgttaggttctcttcttttgctttttttaaaaaaaaattctcacaaaactccccccacccacttcagtttatagatgaggaagctcctactacataatagtgcttcccagtctaattcttgacctcattgtatttatatgtcctttttttttttgacagagtctcactcattgcagtggcacaatcacagctcactgcaacctctgcctcccctgctcaagtgatcctcccacctcaacctcctgagtagctgggactacaggcatgcaccaccacgcctggctaatttttgtatttttttgtagagatgcggttttgccatgttggccaggctggtctcgaactcctgggctcaagccatctgcccactttggcctctgagagtgctgagattataggcatgagccaccattcccagccatgttttcctttttcattgaactttatctactttagccattaaactccactccattggtcttgtcattactaagagctgaaccacctgcaaaatattaagttaaaaagcgttttctttgacaacagttttcttttcttcatcttcctctatcactttacttctgaacttttattctctcattttgatctgacccctacttctctgtttttcctggccatttagtactttcttgttttgctcatcccatttcccagtggagaccttctggtctgctgctttatcactggttttgttagaagacatacaaatggcaaggaggtatatgaaaaggtgcctaacatcattgatcatcagagaaatgcagaccaaaactacaatgagatatcatttcaccccagttaaaatggctttttttttttttttccaaaagacaggcaataacaaagtactggtgaggatgtggagtaaagggaacccacatacactattagtaggaatgtaaattagtacagccactgtggagaacagtttgaaggttcctcaaaaaactaaaaatagagctaccatataatccagcaatcccactgctaggtatatatccaaaagaaaggcaatcaatatacggaagagatacctgcacacccaggtttattgcagcactattcacaatagccaagatttggaagcaacccaggtgtccaacagatgaatggataaagaaaacatggtatataaacacaatggaatactattcagctgtgaaaaagaatgaaatcctgtcatttgcaatcctgtcttgaatagaactggaggtcatgatgttaagtgaaataagacaggcacaaacttcacatgttctcacttatttgtgggagctaaaaattaaaacaatcgaactcatggagctagagaatagaattatggttaccagaggctggaagggtggttgggcgtataagtgtagggggagtggggatggttaatgggtacaaaaaaatgagaacgaataagatctacttgataacacaacagggtgactatagtcaacagtaattatacatttaaaaataactagaagagtataattagattgtaacacaaaagataaatgcttgaggtgatggatacctatttaccctgatgtgattattacttatttcatgcctatatcaaaatatttatactccaaaaatatatatacctactatgtacccacaaaaatttaaaaatttatatattgtttttgctatcacctttagaatttcttgtcattggatagttcgtctgtataccattctggtcttcattccccagggcccccgttgtctgatttttctgcttctagaactgttagaggtcacaaaagcaagatggttgtatctatcacaatttttgtctgactttaactgggtatctgttacgatttagtagtcatcttactgacttcttgttggtttccaattgaatcctcacagtagactgttttcattgtaatcagtatcgaattatagcctgttcccttcttcataaatgaaggctttcttcttcaacagttcttagtgacttcacctgtactttatttctctgctttgaatatttcgaagaaaacatattcttgctctttcccaaggttaacactacatacattaccttgaccacaggatgttttcttgcagattgtgacctaattccatcacccttcagcagcccccaccgttttcatggattcagctaaaccttctgtaagatgactctttttccccctaatctttatatctcttttgatatgtagctttagtctcactttttttccttttggattttgccagttagatgtctccctggaattccacttcagcatggctaagactaagcttgtcttctctttcctccccaaagcaaattgtaattaggatagactgaaggtgacagaagataactaagatcttcttcatcctttcggctcttatggaagctgaattccagtagtcattctaaatttgttgtatgtcagcttatggtatcttttcatgtctttacattcagccaaagaggaagttccttgaaggggagaccagagggcgtgctgtgcttcttaatcctctctttcttaaccagtaagaggcattcagtagatatctgatgatactgattaatagaggggaacttttcagattcttttttttttttaaccctagtaagctttagtacaaactaaatgctgagagattatcaagtaagggattgatcatcacaagaagactcaggatgttacatcctgtaggttttatagtttcctatattgtaaaaaatatgagttatagcagcttgtctggatgtcatacaggtataaaaatcagttttataaacttgagtaaattggggcccattttagaaaaaactcttgcaggctgtgaatgccaatatataagtaaagtattaagtataatgttatttaatgtgggcaaacataaagccaggtgtaaattttttaggtttaaaatcttatagaactatacatccaaaagaaaatttcaagttaaacataatacaaagcaatacaatctaaattaacattaatttaatgtgatgaatgatattgccttgctaaaagtgggtcactacttacaatgtgcaaatggtactcatcgttagggtatagattcttttaaactatgacatacgtacactaccatgtggaacgtgatgatgtgttctctgttctaactactgggaagacttccttggcatagcacatgccatggggtcagttggctttgacttcatatagatatgccatttacttggtcagtgtcacttctatgacaagtagtatgttgtgccagtttgattataagtacaaatatgggcaatgaagtaacttggttttaaggttgttactaagctgagtaacagtgtgtggctatacaaatttttataggctatcaggaatgaaaacacaggagattgttgtagattcaagtattttagattcaagtttgaagatgctcatgcagatgtttaactgagttgtatagacctttatgtttctttctttttctctttttttttttttgagacagagtcttgctctgtcacccaagctggagtgcaatggtgtgatctcggcttactgcaacctccgcctcccaggttcaagcaattctcctgcctcagcctcccaagtagctgggattacagatgtgcaccacgacgcccagctgattttttgtattttagtagaggcggggtctcaccatgttgtcaagatggtctcaatctcctgaccttgtgatccacccacctctgcctcccaaagtgctgtgattacaggcgtgagccaccgcgcctgactgacctttatgtttcttaactttatgctatacatcagttgatatttcaaaaatttaaatggtttctatgattattctttgggctaagaaattgggcattaattgtcctcatatgtatggtttttgtggctacttcatgtagattttatttttggtggttatcaaattggaatttttttttttttttttttttttgagacggagtctcattctgtttcccaggttggagtacagtggtgcaatctcagctcactgcagcctcgacctcccaggctcaagcagtcctctcacctcagccttctaagtagctgggactacaggcacgcaccaccacacctggctagttttttgtgtttttagtagagatggggttttaccctgttggccaggctggtcttgaactcctggcctcaagtgatccacctgcctcagcctcccaaagtgctgggattagaggcatgagccaccacacctggctgaaattggaatttcattggtactgcctgtaattttatgttaatttttttttttttttgtcgtcactagcttttatctaaagcccctagagagaaaggccatgataccttgtatacaaggttataagagtatacaagggaaagggagggctgaagggaacagggtgggctggtacaagcctcattagaaataccattgagtctgtgagtaaaacatcattatatgaaaaggagatgtggttttagggtggtccaattacttttgcaccagcctaataaaattacaagtcattatcaatagagacattgtaaaacctttttttttcccaaaagaagtatcaggtatgataattacatgtctgcccaactttcgttatagattaacataacttaattgtatttaaggtacaatttaggagagttgctgaaaaatgaatctttagtattgggatgccttgattctaccctcaatagctataatggattatgtgtctgagtagattaataaaaatcttttgagcatttttcttgaactacttcactgaagattagctttttgagcatccattttaatttctcagtatataaggatcggtttatcacaactgtattgttttccctggccttgttagattatattttcatatcatgtagaaaaataggtgtattcgttctcccttgaagtcctttgtctcccaaaggaaatggttgcaatacagatgtgtcacctcttccacaggtaaagtggaatggagaagtagccagttaaatagtgcatgctcaatttggaacatttagagcatacaggaaagttatttatttggtaaatattttttaagcatttactatgtttcatgcattgtactagttgtagaggatataattgaatacaactacatgtagcccttgactttatggaactagtctagtataaagatttaagattgcctggcatggtggctcacgccactaatcccagcactttgagaggccaaggcaggattgcttgaggccagaagtttaagagtagcttggtcaacataatgagactccatctctaaaataaatagatagatagatagatagatagatagatagatagatagatagaagtagttagacaacacaaagcagtttcactcatcttgtggcaaggagttatgtatttctaatcaaatttggcaactcaagcattttcaacaaaatctacatgttttttcagaataaagtgaccaacacagaatgttacctgtaaaaatcagagcaataattgctatctaaaataattttgaaaattaagtggtactgaaaggctcatatagcaaaaatatggcctcctgtcattgtactttcctacttcccagactcaccattttcaacattttttagtagtttattttgccattttatagcatagtacctgacattttatttattcaacagacatttcttaagtacctaatacatgccattccttgtttgaagggatgctaaggatacagtggtgaacaaggcgttgtggggttgtatagagggtattcattcctaaccttgaaccaaatatttctttctgttggataatgcattaaaaattgcaaacagtttacaaacttttggagcaatggtggccttgatcataaagtagggactgcttctaccgtatacatgcttggtggtgtatttgtgatatctggctaaagtttctacatggaaattgactgactttagttttgagacttctgggaaccagtcaggcaaaatagtgaaactgtgtatcctgtttccaagagttgtcttttaaggttatctgcttcattcatttggcctgacttgctaggcaaatgcctagggtaaatatgatttgattaactataacaacaacagcaacaacaacaactttattttttagagcagtttgaggttcacagcaaaattgagcagaatgtacagagattttccctatacccgcttcccctacgcatgtgcggcctcccctactatcaacatcccccaccagagtggtttgttacaattaatgaacctacattgacacatcattatcactcaaggtccgtagtttacattagagtccactcttggtgttgtgtatgggtttggtcgattttataatgacatttatccaccattatagtgtcatacatagtaattttgctaccctaaaaatccagtgtgctccacctgttcctccttccctcctccctcatccctggcaaccactgaactttttaacatctccatagttttgccttttccagaatgtcatatcattggaatcacacagtatgcagccttttcaaatgggcttctttccgttagtaataggcatttaagtttcatcctcatcttttcatggcttgatagctcatttctttccctccctcttttcttccctgtcttccttccttcctcttctttcctgtttcctctttcttcttccttttttaagagacaaggtgtctcactctgttgcccaggctggagtgcagtggcccaatcatagctcattgcagccttgaattcctgggctcaagtgatcctcctgcgttagcctcctgagtagctgggatcacaggctccagtcattttagtgctgaataatatttcattatctggatgtaccgcctattcattcacctactgaagaatatcttggttgcttctaagttttggcaattatgagtgaagttactataaacattgtatacaagttttatgtggatgtatgttgtcatctcccttgggcagataccaaggagtgccattgttggatcatatggtaaatatatctttagttttgtacagaattctaggttggtatttttttctctctcagtcctttattttatttggagacagtctcgctatgtcgcccaggctgccatacagtggtgccatctgggctcactgaaacctccacctcccaggttcaagcgattcttgtgccttggcctcccaagtagctgggattacaggagtgcgccaccacgcctgctaatttttgtatttttagtagagacagggttttgccatgttgcccaggctggtctcaaactcctgaccttaagtgattcacccacctcaatctcccaaaatcctgggattacaggcctgagctactgtgcctgatctctctcagtactttaaagaaatatttcattccacttttcttttttttcttctttttgagatggagtctcactctgtcgcctgggctggagtgcagtggcgcgatctcagctcactgccacctccgcctcctgggttcaagtgattctcctgcctcagcctcctgaatagctgagattacaggcgcccaccaccatgcccagctaattttttgcatttttagtagagacgggggttccaccatgttggccaggctggtctcgaactcctgacctcgtgattcgcacatctcggcctcccaaattgctgggattacaggtgtgagctaccacgcctggcccactcttcttgcttacatagtttctgaggagatgtcagatgtaatttttatttttgctcttctgtaggcaagttgagttttttccccctctagcttctctcaggatttttttctttatctttgattttcagtagtttgaaaattatatgcctagctgtcagggttttttgcttgtttgtttttgttttctcaggtgtgactccagaaaggttctaaagaggagctttacaatctcttctctggggtttatggagacttcctttacccttctgtgttagccccttaaagcactgcgtcaaccttaaaagggcacaggaaagggtgtctatgccatttttatgccatttatcctgcttggtgttttctgagctttcttcatctgcggtttaatgtctcacattaatttgtagaaattctctgtcattgtttcaaatttttcttcagttcttttctctgtttcttcttctggtgttcccattatgcttttgtggttgtcgtacagttattggatattttgttccaggcttttttttttccagtctttttttccttttgcttctcggttttgtaggtgtctgttgagatactctcaagtgcagatattctttcctcagctttgtctagtttactaataagcccattaaaggcagtcttcatttctgttacagtctttttgatcagtagcatttcttttttattctttcttaaaatttctgtctttctgcttacattgcccatctgttcttgcatggtttctactttgtccattagagttcttaggatatttatcataattatttcaaatttctggtgtaacaattccaacatccctgcaacatccaagtctagtttcgatgcttactgtgtctcttccagctgtgttttttcctatttaatatgtcttataattttttcttgatagccatacatgatgcattaggtaacagaaactgctgtgagtggacctttagtaatgtggtggtaaggtgtgcatggaggggaaacattttcagtctgttagtgaacttttgtcaacttcacatgtgcttctcaagtccatcctgtaagtgggagagtagggctagagaggactgaagttgggtatatattaaatactttctcctacaaagaagcctagaggggacgcattaggggattttttttcccccagtattcactgtgatgacccttattgagctcctggaggtaaaactcacaaaactgtggttctcccccctgcccatattactacatgtccctggagtttatatctttcagacttgtctgcactgagcttccaccaatttgtcaaatacagatcaggtttccctaccacccgtgcagttgaaaacccacatacaacttttgactcctccagagcttaactactcatagcctgctattgactggaagccttgccaataacataaacagttgattaatacatattttatatgttttctgtattatatattgtattcttacaataaagagaaaagaagatgttattaagaaaatcataaggaagataaaatatatttactgttcattaagtggttcccatgggtgctggttcccatggaggttgccccttgtgagtttttgctcagggaagttgtgattctctatatttgcctgttggtctcctaatttgggagtcatcagttttccctgtgacctcacttctcttacagagttaagaacagttgttggtttttcagtttgttcagtgttttacatgttgttagaacacagtggtacttctaagtttcttaacatgctagatcagaaacctgaagtctcacctaatttggctttttatattttttcttcttttttttcttccattgctaccaaagcatttttcatctgtgtctggggtgacattagagcagaatgtgatttctaggtaaacattattgggctccctagcagaaaaatttttgaaagtagtacatgaattctgtataattaaaattttcttttcatcttaataggtataggtaataggcacggcctattttttttttgctcaacagtctaaaatagtaatttaatcacctaatagccttagttatatagttgaaagaagagttggaaatctgattcatgggttggaaatcacctgtcacatatgagttttaggcactggtcactttattttgaaacagctttggggttttttcctttttcaactcataataggctttaacagcttttagttttgtttctgtttttttaacagcatgagttgccaaatttggttatagcttcttggtacaagatgggtaaatttgctttgtgttgtgtaattactttttattttaaatgctacctcttttatgaacactaactttacactaagattaggaaaatgagaattgcatgtctgcaacaaatagctatctgtagtattaaattgtgaaaatgtagactttggattggagctggcatctcttaatatgtaattgtaacatagagtaaataagtattttgtcccttgtagggtcaaacagtacagtgcatgggcagaattagagatgtaggcttttttttttttttttttttttactggcttagagaaccgtttgatcagctaatatggaattaagtccctagggctgcccaggcacaacattaactgctattaaaggaaaatttaaaagagtattagtgaaggttaaatactgaccatggacatctggcaaaattgatgttttttttcccctccaccattgtttatagtttattgttatttatcagagaattaatgtttattttcagaatctattaccataagaaatctgtttgaggacttcgtatgtgccaggaattctactaaataatgatataatgctgaacagaattagataggatcctcacttcgttaagcttacagtctagtggtatagatcaacattaatcaaagaataacacaaatagaaagcagagcagtggttcatgggattgactgtagagaagcatgagggaagttcccaggtgatggaaaatactttatttcttaatcgtggtggttacatgtgtgcatatgtttatgaaaatatattgtacatttaaagtggatacattttatcacatgtaaattatgactctataaagttaattaaaaagaataactcaggtaaggtggtgtgtgcgcctgtagtcccagctatttctgaggcaggaagatcacttgagcccaggagtttgagttcagcatgggcaacatgagacctgtgagactttgtctctaaaaaaatttaaataaataactaagataaatgtaaaattacagctgtagtaagttctacaaaggagagttacatgggctatgacgatgtaagatagcaagaactgacattggcagggaggaaatgatgatgagtagaagtaaataagtgaagtgtggggattgatgtcaaggggacagtataaaagaaataacagcatgcgccaaggccctaaaattggaaagtccttggcaaattaaaggagtttgaaaaaggccattgtgtgcaaagcagaaaataggtactacaaggtaaaagatggagctaagcggtaggtaaggctaaaccttgtcagccattgttaaatattgaattgtatcctaagcacaactcagtggaaagcagttaaagttctttaattgggggaggcaatgaaggggtaataaaattggttatagaaatactgctctggctctagtgttgagaatgaattggagtagccagagtagattcaagaagactttagtaagattattccaacaggccaggacctgttatagggtggtggcaatggagagagatggacagaatggagagtgtatttaggaggtaaaaatgacagaacttggtgatgcactgaatgtgaaatggggaaggtgtctaggaggactactaggtttatggtttgcgtattagggtggatgatagcagtttcatttactgagacagggagccctggcagagtacccagcttttagagtgggtagggggaaggggagagtgcatctggtgttgggcattttgaagtgatttacatacaacaaactgaaggtatctttaacactgagtccagcaggttagcatatttattcagcaagcattgcacctttttttgttgtttttggggtcttcaactcctggcctcgaatcctccctccttcccccgcctctcccagcctccgcctcccaaagtgctgggatttcaggagtgagccaccgcgcctggccagcatcgcgctgtttgtgcagtgtgccctgtgctaggtcttgcagtgggtaccagtagagacataaaagtacaaaagataattggacgtttagtagagtcctgaaagggggcgggataggaagatacctaaccataagaaaaaccagcaagagcggaaaaggagctagtcctccagatcaataagttaatcacttatgtttgtgattccctgcattttgggtgattctctgtcgaggtcctcttaagtccagacttttgatataatctgcagtttgcgccatttggattcctgaagcatctttacaagccacctacattccttatggagctgtggcacaacagcaagcccacgatgtctcaccggattaataaaaatataggcgctcacgcttttgtttaccgatatagtatctcctcctcccctcactccatcaacccccacgcgacacaactttccggaagtaagcaaaatccgttatcaaggtgaaactccggggaccaggctccacagctgccataaactggatggcacgttagaagccggtgggtgtaggtgaggcacgctggcgcccgcgggcccttctccagccgctacccagtgggaatccgcggggctgaagccccgaaaccaggctgagcgtcccagagcgcaacctccctttcccccagcagcgccggcgccgcagaagccgcgtgtccccaggcgcactcccccaaggtgaacccccgccccccacggaggcggctgggtcgcgggtctgggcggggcgctccggacgccctcccgccgctgcgcacccctcccgcgagctgccagctccctcggcctctccacccaaaactggcccaaccgccaatcgtctgcctctcacctcctacagcaggtgacccatggccaatcgccaggggtctctttgccaggagccgccagggccagccaatcggggcgacccctccgccggggaggggacgggaaaggggtggggggtgaagggggtgaagggggtgtcccgggggacgggctgaacctcagtcaggaccgcctgcaccgcagtccggggatcgggtcgaggggagaagaaaaaggggtgctcgggagcagcccccggctacctcccctggaggcacagagggcgggggccttggcgaatggctttcttgctggccacttgcggaggtttggattcaggatttgttcctagtgtccaagattttgataagaaacttacagaagctgatgcttacctacaaatcttgattgaacaattaaagctttttgatgacaagcttcaaaactgcaaagaagatgaacagagaaagaaaattgaaactctcaaagagacaacaaatagcatggtagaatcaattaaacactgcattgtgttgctgcagattgccaaagaccagagtaatgcggagaagcacgcagatggaatgataagtactattaatcccgtagatgcaatatatcaacctagtcctttggaacctgtgatcagcacaatgccttcccagactgtgttacctccagaacctgttcagttgtgtaagtcagagcagcgtccatcttccctaccagttggacctgtgttggctaccttgggacatcatcagactcctacaccaaatagtacaggcagtggccattcaccaccgagtagcagtctcacttctccaagccacgtgaacttgtctccaaatacagtcccagagttctcttactccagcagtgaagatgaattttatgatgctgatgaattccatcaaagtggctcatccccaaagcgcttaatagattcttctggatctgcctcagtcctgacacacagcagctcgggaaatagtctaaaacgcccagataccacagaatcacttaattcttccttgtccaatggaacaagtgatgctgacctgtttgattcacatgatgacagagatgatgatgcggaggcagggtctgtggaggagcacaagagcgttatcatgcatctcttgtcgcaggttagacttggaatggatcttactaaggtagttcttccaacgtttattcttgaaagaagatctcttttagaaatgtatgcagacttttttgcacatccggacctgtttgtgagcattagtgaccagaaggatcccaaggatcgaatggttcaggttgtgaaatggtacctctcagcctttcatgcgggaaggaaaggatcagttgccaaaaagccatacaatcccattttgggcgagatttttcagtgtcattggacattaccaaatgatactgaagagaacacagaactagtttcagaaggaccagttccctgggtttccaaaaacagtgtaacatttgtggctgagcaggtttcccatcatccacccatttcagccttttatgctgagtgttttaacaagaagatacaattcaatgctcatatctggaccaaatcaaaattccttgggatgtcaattggggtgcacaacatagggcagggctgtgtctcatgtctagactatgatgaacattacattctcacattccccaatggctatggaaggcaagtgtgtccatttcctctgatcagcagtagactctgctgttccttgagacatgccccttccccctcttcctcttaactgtcaaccttacctaaaaacttttgattttgcaggtctatcctcacagtgccctgggtggaattaggaggagaatgcaatattaattgttccaaaacaggctatagtgcaaatatcatcttccacactaaacccttctatgggggcaagaagcacagaattactgccgagattttttctccaaatgacaagaagtctttttgctcaattgaaggggaatggaatggtgtgatgtatgcaaaatatgcaacaggggaaaatacagtctttgtagataccaagaagttgcctataatcaagaagaaagtgaggaagttggaagatcagaacgagtatgaatcccgcagcctttggaaggatgtcactttcaacttaaaaatcagagacattgatgcagcaactgaagcaaagcacaggcttgaagaaagacaaagagcagaagcccgagaaaggaaggagaaggaaattcagtgggagacaaggttatttcatgaagatggagaatgctgggtttatgatgaaccattactgaaacgtcttggtgctgccaagcattaggttggaagatgcaaagtttatacctgatgatcagggcagtaggcataattcagcaacaaacaatcttcctttgggagaaacctgttcattccaatcttctaattacagtggttcctatctcagggatactggactttctgacgcagatgaacaattaaggggaaaagcttcccttttccctctgtggcagttacgattttgacttcagtcctgagaaaaacttcaggttttgaaaatcagatgatgtcttctccttttccaaacaccacacgttgaaagcatttataaatccaagtctgaaactctgcgctctagtactgctgttaagatacacaacttgtttcttagttcatataatctcgggatacacacacacacacacatatatatacacacacatacgtatacacacacatacatatatataaatatacctgatgccagatttttttcataaatattctgcctactgtaaatatgggttcctctgagttgttttagaaaattagcgcaatgtattaaaatcaagtgttaggaaatttcatggtcttacctacaataacttttattttggaattgaactattattaaattgtatctaatcctggattacagtttaattaattattcttagtgcttaaggcttcataaagtaatttttccaacctttttttaaaaagagcatcttttattatcttttatggttaaacttggaagccaattatttggcaaccttgaatacaagagctagcttttcaaagaaagacacttgaaataatggaggatccattcttttcctctgtcagattgtatgttctgtctttagcccctgccaggcaattccccagaatcttcacttaactcatattgcacatgtagggctgcctaccaacattttatccaaaaatgttttattgccttagagggtttgggaagagtgtgtatttatagatccccaccccacagtgaacaaaaatagatagatagatagaataaaatgaatgccacagcagcagatggctcattctgaagggaaatacagaactatatctatctatctatctatcatcttttttatttaaaaatacattaaaaaaacaggtattagtacctagcatttagttagttattcaatatactggttacgtaaggcctttcaagaagtagattctcagtctgagaggacacaggccagggcttctcaaagtgctgctgcaggctttctggtctcgcttggcc

SEQ ID NO: 735148 - DNA, 19210 bp, Homo sapiens
  misc_feature (19210)..(19210): n is a, c, g, or t
gtaagggtctttacatggtttccagatagttcattagttgttgctttctttttttgtctgttttctgttttttttttttaaataactgtggtatgatgtaataggaacttataatttctgagttgcttatttttcctttacagttatagtaaagttatactcatttattttctcctgctttctgcagagtaaaatactgatttttgtctagaaacaagacagtgcaagacaatgttgaaagtgaaattctatgttaaaatatgccagatttattttaagaatttaatatctgtagtcagttatcaatacaaccaaattacataattatgcatgataataggtaaatactgagaagttcacctcattttcttgttaaaggatttggctattaccgtatgtgtcagttagtactcttttgtatggtagtgaaagaaaactcaacccaaactgattcatgaagaagaaagtaaatctggttagatgtggtttgaattaggtaattcatgtcatgaggactcagatctcccatctctatttctacgttccacttttgcattggcttcattttcggttaggttctcccttggtggtggtaaggtggttgtagcaatgtcagcctcccatttttggaaccgagtccataggaggctattctttctagaccttaataggagtaacacaattattgctcatcaccctagctttggccatgtgtcaaatcctgaccagtcacaatttcacagtcatagattctaccctggagctgggatgttactggcctcactagaaacacattgctgatagggtagaaggtgtgttcatcctacccaacccgacccgcaccaaagtcagaatagggaaaaacagatgttgggtgacatgcaactaacgtctgccgtactacactgaagatatttttctatgtttattctccagtgaaagagcttatatttgtggtacataggggattttgttttaatttagaaaatttaattgtagaaaacatgttttataaccctttctctgtactttgttctatatcaggaattgacttgattagataaggtgacatagggtatcttaggccctacaagatagtaaaccccccatcacttgaaagtattcagtagaggcttaaaaaacattattaaaggatgtggttattaggggactttaagaaatgaatatgaaattgaagtaggaaatctttaagctactctgtgagttatgccttttaaaagcaatttgtaattcctgtagatttcttttaaatttaggcagtttcataaatgactatagcatcattttagcaaatttgtgatcctgtaagaggaggataagtgttttttgtttgtttgtttgttttttgtttttttgagacagagtctcactttgtaccccagaaagtaaatctagttagatgtggtttgtctcggctcactgcaacctccaccccgtgcgttctagcaattctcctgcctcagccaccacacctggcctaagaggggaggataagtgttttagtgatcatattagactgaatgtggcagatgagatttcccgcccccccattgttggttagactgacattcaacattcaacaagagccacctgcccttgtaggcatttctgccactatacccctacataaacctagagtgctattgcttacttgctttccttcaaatacattttttcatttgtggcctccacattcttgtgtgtgatgtcctttctctgtgaaatgtcttctaccctttttttcaaagcctagtttagaactgacctcttctatgaaccctctgccgactggcctttccttccccagtcccccaagttcaaaatgatctctttcctttgaatactatagtatttgcacaattcactatctccttatcatattcttcttgtttatttgttatcagctgatgttgacatcataagttcaggttcctaactagatccaatattggaatttttcagcttttgctaagaagagagcttgtatgtctttgggaataatgggcagaaaaagataactttgagaagtcttagacttctaatagctttgatatttaaaagtacatgtaatacaagaggtttttttcctacatttaatgcatggagaagataggacatttagaaatatggaattaatgttcatttgactggcaaaagattattttctcagatgtagtgaagtgtggtaaagaacttcactctagagccagaatgtctgtgtttgtatcccagagcccaccacttacatttaaccattaacattcaacttactgtctctgagtttcagtggcctcatctataaaatgaggataataagagtacctacttcatagagttgttttagtggttaaataaactaacgtaaacttgctagaacttgataaactaatattggatgagaactggttgaaataatgcctggctatagtaaaaacttggtaaatgttagttgccattacaatgcaactactgttcctaccattccctctgccagtgcctggtattcagtagcactcagtaaatgttagttaaatgaagaaataactgaaggaatgaatgaacaaatggttgatgtagagattgcttttccattgttgtttattgaatattttgagatgtataacatactgtctgttaggcactgtgggatgggcactcacggagctgtcttccaaaggggtataggagaggagacgcagtgatctcagcaacctacctttaaaacatatcctagtatctactgccatgttaggttctcttcttttgctttttttaaaaaaaaattctcacaaaactccccccacccacttcagtttatagatgaggaagctcctactacataatagtgcttcccagtctaattcttgacctcattgtatttatatgtcctttttttttttgacagagtctcactcattgcagtggcacaatcacagctcactgcaacctctgcctcccctgctcaagtgatcctcccacctcaacctcctgagtagctgggactacaggcatgcaccaccacgcctggctaatttttgtatttttttgtagagatgcggttttgccatgttggccaggctggtctcgaactcctgggctcaagccatctgcccactttggcctctgagagtgctgagattataggcatgagccaccattcccagccatgttttcctttttcattgaactttatctactttagccattaaactccactccattggtcttgtcattactaagagctgaaccacctgcaaaatattaagttaaaaagcgttttctttgacaacagttttcttttcttcatcttcctctatcactttacttctgaacttttattctctcattttgatctgacccctacttctctgtttttcctggccatttagtactttcttgttttgctcatcccatttcccagtggagaccttctggtctgctgctttatcactggttttgttagaagacatacaaatggcaaggaggtatatgaaaaggtgcctaacatcattgatcatcagagaaatgcagaccaaaactacaatgagatatcatttcaccccagttaaaatggctttttttttttttttccaaaagacaggcaataacaaagtactggtgaggatgtggagtaaagggaacccacatacactattagtaggaatgtaaattagtacagccactgtggagaacagtttgaaggttcctcaaaaaactaaaaatagagctaccatataatccagcaatcccactgctaggtatatatccaaaagaaaggcaatcaatatacggaagagatacctgcacacccaggtttattgcagcactattcacaatagccaagatttggaagcaacccaggtgtccaacagatgaatggataaagaaaacatggtatataaacacaatggaatactattcagctgtgaaaaagaatgaaatcctgtcatttgcaatcctgtcttgaatagaactggaggtcatgatgttaagtgaaataagacaggcacaaacttcacatgttctcacttatttgtgggagctaaaaattaaaacaatcgaactcatggagctagagaatagaattatggttaccagaggctggaagggtggttgggcgtataagtgtagggggagtggggatggttaatgggtacaaaaaaatgagaacgaataagatctacttgataacacaacagggtgactatagtcaacagtaattatacatttaaaaataactagaagagtataattagattgtaacacaaaagataaatgcttgaggtgatggatacctatttaccctgatgtgattattacttatttcatgcctatatcaaaatatttatactccaaaaatatatatacctactatgtacccacaaaaatttaaaaatttatatattgtttttgctatcacctttagaatttcttgtcattggatagttcgtctgtataccattctggtcttcattccccagggcccccgttgtctgatttttctgcttctagaactgttagaggtcacaaaagcaagatggttgtatctatcacaatttttgtctgactttaactgggtatctgttacgatttagtagtcatcttactgacttcttgttggtttccaattgaatcctcacagtagactgttttcattgtaatcagtatcgaattatagcctgttcccttcttcataaatgaaggctttcttcttcaacagttcttagtgacttcacctgtactttatttctctgctttgaatatttcgaagaaaacatattcttgctctttcccaaggttaacactacatacattaccttgaccacaggatgttttcttgcagattgtgacctaattccatcacccttcagcagcccccaccgttttcatggattcagctaaaccttctgtaagatgactctttttccccctaatctttatatctcttttgatatgtagctttagtctcactttttttccttttggattttgccagttagatgtctccctggaattccacttcagcatggctaagactaagcttgtcttctctttcctccccaaagcaaattgtaattaggatagactgaaggtgacagaagataactaagatcttcttcatcctttcggctcttatggaagctgaattccagtagtcattctaaatttgttgtatgtcagcttatggtatcttttcatgtctttacattcagccaaagaggaagttccttgaaggggagaccagagggcgtgctgtgcttcttaatcctctctttcttaaccagtaagaggcattcagtagatatctgatgatactgattaatagaggggaacttttcagattcttttttttttttaaccctagtaagctttagtacaaactaaatgctgagagattatcaagtaagggattgatcatcacaagaagactcaggatgttacatcctgtaggttttatagtttcctatattgtaaaaaatatgagttatagcagcttgtctggatgtcatacaggtataaaaatcagttttataaacttgagtaaattggggcccattttagaaaaaactcttgcaggctgtgaatgccaatatataagtaaagtattaagtataatgttatttaatgtgggcaaacataaagccaggtgtaaattttttaggtttaaaatcttatagaactatacatccaaaagaaaatttcaagttaaacataatacaaagcaatacaatctaaattaacattaatttaatgtgatgaatgatattgccttgctaaaagtgggtcactacttacaatgtgcaaatggtactcatcgttagggtatagattcttttaaactatgacatacgtacactaccatgtggaacgtgatgatgtgttctctgttctaactactgggaagacttccttggcatagcacatgccatggggtcagttggctttgacttcatatagatatgccatttacttggtcagtgtcacttctatgacaagtagtatgttgtgccagtttgattataagtacaaatatgggcaatgaagtaacttggttttaaggttgttactaagctgagtaacagtgtgtggctatacaaatttttataggctatcaggaatgaaaacacaggagattgttgtagattcaagtattttagattcaagtttgaagatgctcatgcagatgtttaactgagttgtatagacctttatgtttctttctttttctctttttttttttttgagacagagtcttgctctgtcacccaagctggagtgcaatggtgtgatctcggcttactgcaacctccgcctcccaggttcaagcaattctcctgcctcagcctcccaagtagctgggattacagatgtgcaccacgacgcccagctgattttttgtattttagtagaggcggggtctcaccatgttgtcaagatggtctcaatctcctgaccttgtgatccacccacctctgcctcccaaagtgctgtgattacaggcgtgagccaccgcgcctgactgacctttatgtttcttaactttatgctatacatcagttgatatttcaaaaatttaaatggtttctatgattattctttgggctaagaaattgggcattaattgtcctcatatgtatggtttttgtggctacttcatgtagattttatttttggtggttatcaaattggaatttttttttttttttttttttttgagacggagtctcattctgtttcccaggttggagtacagtggtgcaatctcagctcactgcagcctcgacctcccaggctcaagcagtcctctcacctcagccttctaagtagctgggactacaggcacgcaccaccacacctggctagttttttgtgtttttagtagagatggggttttaccctgttggccaggctggtcttgaactcctggcctcaagtgatccacctgcctcagcctcccaaagtgctgggattagaggcatgagccaccacacctggctgaaattggaatttcattggtactgcctgtaattttatgttaatttttttttttttttgtcgtcactagcttttatctaaagcccctagagagaaaggccatgataccttgtatacaaggttataagagtatacaagggaaagggagggctgaagggaacagggtgggctggtacaagcctcattagaaataccattgagtctgtgagtaaaacatcattatatgaaaaggagatgtggttttagggtggtccaattacttttgcaccagcctaataaaattacaagtcattatcaatagagacattgtaaaacctttttttttcccaaaagaagtatcaggtatgataattacatgtctgcccaactttcgttatagattaacataacttaattgtatttaaggtacaatttaggagagttgctgaaaaatgaatctttagtattgggatgccttgattctaccctcaatagctataatggattatgtgtctgagtagattaataaaaatcttttgagcatttttcttgaactacttcactgaagattagctttttgagcatccattttaatttctcagtatataaggatcggtttatcacaactgtattgttttccctggccttgttagattatattttcatatcatgtagaaaaataggtgtattcgttctcccttgaagtcctttgtctcccaaaggaaatggttgcaatacagatgtgtcacctcttccacaggtaaagtggaatggagaagtagccagttaaatagtgcatgctcaatttggaacatttagagcatacaggaaagttatttatttggtaaatattttttaagcatttactatgtttcatgcattgtactagttgtagaggatataattgaatacaactacatgtagcccttgactttatggaactagtctagtataaagatttaagattgcctggcatggtggctcacgccactaatcccagcactttgagaggccaaggcaggattgcttgaggccagaagtttaagagtagcttggtcaacataatgagactccatctctaaaataaatagatagatagatagatagatagatagatagatagatagatagaagtagttagacaacacaaagcagtttcactcatcttgtggcaaggagttatgtatttctaatcaaatttggcaactcaagcattttcaacaaaatctacatgttttttcagaataaagtgaccaacacagaatgttacctgtaaaaatcagagcaataattgctatctaaaataattttgaaaattaagtggtactgaaaggctcatatagcaaaaatatggcctcctgtcattgtactttcctacttcccagactcaccattttcaacattttttagtagtttattttgccattttatagcatagtacctgacattttatttattcaacagacatttcttaagtacctaatacatgccattccttgtttgaagggatgctaaggatacagtggtgaacaaggcgttgtggggttgtatagagggtattcattcctaaccttgaaccaaatatttctttctgttggataatgcattaaaaattgcaaacagtttacaaacttttggagcaatggtggccttgatcataaagtagggactgcttctaccgtatacatgcttggtggtgtatttgtgatatctggctaaagtttctacatggaaattgactgactttagttttgagacttctgggaaccagtcaggcaaaatagtgaaactgtgtatcctgtttccaagagttgtcttttaaggttatctgcttcattcatttggcctgacttgctaggcaaatgcctagggtaaatatgatttgattaactataacaacaacagcaacaacaacaactttattttttagagcagtttgaggttcacagcaaaattgagcagaatgtacagagattttccctatacccgcttcccctacgcatgtgcggcctcccctactatcaacatcccccaccagagtggtttgttacaattaatgaacctacattgacacatcattatcactcaaggtccgtagtttacattagagtccactcttggtgttgtgtatgggtttggtcgattttataatgacatttatccaccattatagtgtcatacatagtaattttgctaccctaaaaatccagtgtgctccacctgttcctccttccctcctccctcatccctggcaaccactgaactttttaacatctccatagttttgccttttccagaatgtcatatcattggaatcacacagtatgcagccttttcaaatgggcttctttccgttagtaataggcatttaagtttcatcctcatcttttcatggcttgatagctcatttctttccctccctcttttcttccctgtcttccttccttcctcttctttcctgtttcctctttcttcttccttttttaagagacaaggtgtctcactctgttgcccaggctggagtgcagtggcccaatcatagctcattgcagccttgaattcctgggctcaagtgatcctcctgcgttagcctcctgagtagctgggatcacaggctccagtcattttagtgctgaataatatttcattatctggatgtaccgcctattcattcacctactgaagaatatcttggttgcttctaagttttggcaattatgagtgaagttactataaacattgtatacaagttttatgtggatgtatgttgtcatctcccttgggcagataccaaggagtgccattgttggatcatatggtaaatatatctttagttttgtacagaattctaggttggtatttttttctctctcagtcctttattttatttggagacagtctcgctatgtcgcccaggctgccatacagtggtgccatctgggctcactgaaacctccacctcccaggttcaagcgattcttgtgccttggcctcccaagtagctgggattacaggagtgcgccaccacgcctgctaatttttgtatttttagtagagacagggttttgccatgttgcccaggctggtctcaaactcctgaccttaagtgattcacccacctcaatctcccaaaatcctgggattacaggcctgagctactgtgcctgatctctctcagtactttaaagaaatatttcattccacttttcttttttttcttctttttgagatggagtctcactctgtcgcctgggctggagtgcagtggcgcgatctcagctcactgccacctccgcctcctgggttcaagtgattctcctgcctcagcctcctgaatagctgagattacaggcgcccaccaccatgcccagctaattttttgcatttttagtagagacgggggttccaccatgttggccaggctggtctcgaactcctgacctcgtgattcgcacatctcggcctcccaaattgctgggattacaggtgtgagctaccacgcctggcccactcttcttgcttacatagtttctgaggagatgtcagatgtaatttttatttttgctcttctgtaggcaagttgagttttttccccctctagcttctctcaggatttttttctttatctttgattttcagtagtttgaaaattatatgcctagctgtcagggttttttgcttgtttgtttttgttttctcaggtgtgactccagaaaggttctaaagaggagctttacaatctcttctctggggtttatggagacttcctttacccttctgtgttagccccttaaagcactgcgtcaaccttaaaagggcacaggaaagggtgtctatgccatttttatgccatttatcctgcttggtgttttctgagctttcttcatctgcggtttaatgtctcacattaatttgtagaaattctctgtcattgtttcaaatttttcttcagttcttttctctgtttcttcttctggtgttcccattatgcttttgtggttgtcgtacagttattggatattttgttccaggcttttttttttccagtctttttttccttttgcttctcggttttgtaggtgtctgttgagatactctcaagtgcagatattctttcctcagctttgtctagtttactaataagcccattaaaggcagtcttcatttctgttacagtctttttgatcagtagcatttcttttttattctttcttaaaatttctgtctttctgcttacattgcccatctgttcttgcatggtttctactttgtccattagagttcttaggatatttatcataattatttcaaatttctggtgtaacaattccaacatccctgcaacatccaagtctagtttcgatgcttactgtgtctcttccagctgtgttttttcctatttaatatgtcttataattttttcttgatagccatacatgatgcattaggtaacagaaactgctgtgagtggacctttagtaatgtggtggtaaggtgtgcatggaggggaaacattttcagtctgttagtgaacttttgtcaacttcacatgtgcttctcaagtccatcctgtaagtgggagagtagggctagagaggactgaagttgggtatatattaaatactttctcctacaaagaagcctagaggggacgcattaggggattttttttcccccagtattcactgtgatgacccttattgagctcctggaggtaaaactcacaaaactgtggttctcccccctgcccatattactacatgtccctggagtttatatctttcagacttgtctgcactgagcttccaccaatttgtcaaatacagatcaggtttccctaccacccgtgcagttgaaaacccacatacaacttttgactcctccagagcttaactactcatagcctgctattgactggaagccttgccaataacataaacagttgattaatacatattttatatgttttctgtattatatattgtattcttacaataaagagaaaagaagatgttattaagaaaatcataaggaagataaaatatatttactgttcattaagtggttcccatgggtgctggttcccatggaggttgccccttgtgagtttttgctcagggaagttgtgattctctatatttgcctgttggtctcctaatttgggagtcatcagttttccctgtgacctcacttctcttacagagttaagaacagttgttggtttttcagtttgttcagtgttttacatgttgttagaacacagtggtacttctaagtttcttaacatgctagatcagaaacctgaagtctcacctaatttggctttttatattttttcttcttttttttcttccattgctaccaaagcatttttcatctgtgtctggggtgacattagagcagaatgtgatttctaggtaaacattattgggctccctagcagaaaaatttttgaaagtagtacatgaattctgtataattaaaattttcttttcatcttaataggtataggtaataggcacggcctattttttttttgctcaacagtctaaaatagtaatttaatcacctaatagccttagttatatagttgaaagaagagttggaaatctgattcatgggttggaaatcacctgtcacatatgagttttaggcactggtcactttattttgaaacagctttggggttttttcctttttcaactcataataggctttaacagcttttagttttgtttctgtttttttaacagcatgagttgccaaatttggttatagcttcttggtacaagatgggtaaatttgctttgtgttgtgtaattactttttattttaaatgctacctcttttatgaacactaactttacactaagattaggaaaatgagaattgcatgtctgcaacaaatagctatctgtagtattaaattgtgaaaatgtagactttggattggagctggcatctcttaatatgtaattgtaacatagagtaaataagtattttgtcccttgtagggtcaaacagtacagtgcatgggcagaattagagatgtaggcttttttttttttttttttttttactggcttagagaaccgtttgatcagctaatatggaattaagtccctagggctgcccaggcacaacattaactgctattaaaggaaaatttaaaagagtattagtgaaggttaaatactgaccatggacatctggcaaaattgatgttttttttcccctccaccattgtttatagtttattgttatttatcagagaattaatgtttattttcagaatctattaccataagaaatctgtttgaggacttcgtatgtgccaggaattctactaaataatgatataatgctgaacagaattagataggatcctcacttcgttaagcttacagtctagtggtatagatcaacattaatcaaagaataacacaaatagaaagcagagcagtggttcatgggattgactgtagagaagcatgagggaagttcccaggtgatggaaaatactttatttcttaatcgtggtggttacatgtgtgcatatgtttatgaaaatatattgtacatttaaagtggatacattttatcacatgtaaattatgactctataaagttaattaaaaagaataactcaggtaaggtggtgtgtgcgcctgtagtcccagctatttctgaggcaggaagatcacttgagcccaggagtttgagttcagcatgggcaacatgagacctgtgagactttgtctctaaaaaaatttaaataaataactaagataaatgtaaaattacagctgtagtaagttctacaaaggagagttacatgggctatgacgatgtaagatagcaagaactgacattggcagggaggaaatgatgatgagtagaagtaaataagtgaagtgtggggattgatgtcaaggggacagtataaaagaaataacagcatgcgccaaggccctaaaattggaaagtccttggcaaattaaaggagtttgaaaaaggccattgtgtgcaaagcagaaaataggtactacaaggtaaaagatggagctaagcggtaggtaaggctaaaccttgtcagccattgttaaatattgaattgtatcctaagcacaactcagtggaaagcagttaaagttctttaattgggggaggcaatgaaggggtaataaaattggttatagaaatactgctctggctctagtgttgagaatgaattggagtagccagagtagattcaagaagactttagtaagattattccaacaggccaggacctgttatagggtggtggcaatggagagagatggacagaatggagagtgtatttaggaggtaaaaatgacagaacttggtgatgcactgaatgtgaaatggggaaggtgtctaggaggactactaggtttatggtttgcgtattagggtggatgatagcagtttcatttactgagacagggagccctggcagagtacccagcttttagagtgggtagggggaaggggagagtgcatctggtgttgggcattttgaagtgatttacatacaacaaactgaaggtatctttaacactgagtccagcaggttagcatatttattcagcaagcattgcacctttttttgttgtttttggggtcttcaactcctggcctcgaatcctccctccttcccccgcctctcccagcctccgcctcccaaagtgctgggatttcaggagtgagccaccgcgcctggccagcatcgcgctgtttgtgcagtgtgccctgtgctaggtcttgcagtgggtaccagtagagacataaaagtacaaaagataattggacgtttagtagagtcctgaaagggggcgggataggaagatacctaaccataagaaaaaccagcaagagcggaaaaggagctagtcctccagatcaataagttaatcacttatgtttgtgattccctgcattttgggtgattctctgtcgaggtcctcttaagtccagacttttgatataatctgcagtttgcgccatttggattcctgaagcatctttacaagccacctacattccttatggagctgtggcacaacagcaagcccacgatgtctcaccggattaataaaaatataggcgctcacgcttttgtttaccgatatagtatctcctcctcccctcactccatcaacccccacgcgacacaactttccggaagtaagcaaaatccgttatcaaggtgaaactccggggaccaggctccacagctgccataaactggatggcacgttagaagccggtgggtgtaggtgaggcacgctggcgcccgcgggcccttctccagccgctacccagtgggaatccgcggggctgaagccccgaaaccaggctgagcgtcccagagcgcaacctccctttcccccagcagcgccggcgccgcagaagccgcgtgtccccaggcgcactcccccaaggtgaacccccgccccccacggaggcggctgggtcgcgggtctgggcggggcgctccggacgccctcccgccgctgcgcacccctcccgcgagctgccagctccctcggcctctccacccaaaactggcccaaccgccaatcgtctgcctctcacctcctacagcaggtgacccatggccaatcgccaggggtctctttgccaggagccgccagggccagccaatcggggcgacccctccgccggggaggggacgggaaaggggtggggggtgaagggggtgaagggggtgtcccgggggacgggctgaacctcagtcaggaccgcctgcaccgcagtccggggatcgggtcgaggggagaagaaaaaggggtgctcgggagcagcccccggctacctcccctggaggcacagagggcgggggccttggcgaatggctttcttgctggccacttgcggaggtttggattcaggatttgttcctagtgtccaagattttgataagaaacttacagaagctgatgcttacctacaaatcttgattgaacaattaaagctttttgatgacaagcttcaaaactgcaaagaagatgaacagagaaagaaaattgaaactctcaaagagacaacaaatagcatggtagaatcaattaaacactgcattgtgttgctgcagattgccaaagaccagagtaatgcggagaagcacgcagatggaatgataagtactattaatcccgtagatgcaatatatcaacctagtcctttggaacctgtgatcagcacaatgccttcccagactgtgttacctccagaacctgttcagttgtgtaagtcagagcagcgtccatcttccctaccagttggacctgtgttggctaccttgggacatcatcagactcctacaccaaatagtacaggcagtggccattcaccaccgagtagcagtctcacttctccaagccacgtgaacttgtctccaaatacagtcccagagttctcttactccagcagtgaagatgaattttatgatgctgatgaattccatcaaagtggctcatccccaaagcgcttaatagattcttctggatctgcctcagtcctgacacacagcagctcgggaaatagtctaaaacgcccagataccacagaatcacttaattcttccttgtccaatggaacaagtgatgctgacctgtttgattcacatgatgacagagatgatgatgcggaggcagggtctgtggaggagcacaagagcgttatcatgcatctcttgtcgcaggttagacttggaatggatcttactaaggtagttcttccaacgtttattcttgaaagaagatctcttttagaaatgtatgcagacttttttgcacatccggacctgtttgtgagcattagtgaccagaaggatcccaaggatcgaatggttcaggttgtgaaatggtacctctcagcctttcatgcgggaaggaaaggatcagttgccaaaaagccatacaatcccattttgggcgagatttttcagtgtcattggacattaccaaatgatactgaagagaacacagaactagtttcagaaggaccagttccctgggtttccaaaaacagtgtaacatttgtggctgagcaggtttcccatcatccacccatttcagccttttatgctgagtgttttaacaagaagatacaattcaatgctcatatctggaccaaatcaaaattccttgggatgtcaattggggtgcacaacatagggcagggctgtgtctcatgtctagactatgatgaacattacattctcacattccccaatggctatggaaggcaagtgtgtccatttcctctgatcagcagtagactctgctgttccttgagacatgccccttccccctcttcctcttaactgtcaaccttacctaaaaacttttgattttgcaggtctatcctcacagtgccctgggtggaattaggaggagaatgcaatattaattgttccaaaacaggctatagtgcaaatatcatcttccacactaaacccttctatgggggcaagaagcacagaattactgccgagattttttctccaaatgacaagaagtctttttgctcaattgaaggggaatggaatggtgtgatgtatgcaaaatatgcaacaggggaaaatacagtctttgtagataccaagaagttgcctataatcaagaagaaagtgaggaagttggaagatcagaacgagtatgaatcccgcagcctttggaaggatgtcactttcaacttaaaaatcagagacattgatgcagcaactgaagcaaagcacaggcttgaagaaagacaaagagcagaagcccgagaaaggaaggagaaggaaattcagtgggagacaaggttatttcatgaagatggagaatgctgggtttatgatgaaccattactgaaacgtcttggtgctgccaagcattaggttggaagatgcaaagtttatacctgatgatcagggcagtaggcataattcagcaacaaacaatcttcctttgggagaaacctgttcattccaatcttctaattacagtggttcctatctcagggatactggactttctgacgcagatgaacaattaaggggaaaagcttcccttttccctctgtggcagttacgattttgacttcagtcctgagaaaaacttcaggttttgaaaatcagatgatgtcttctccttttccaaacaccacacgttgaaagcatttataaatccaagtctgaaactctgcgctctagtactgctgttaagatacacaacttgtttcttagttcatataatctcgggatacacacacacacacacatatatatacacacacatacgtatacacacacatacatatatataaatatacctgatgccagatttttttcataaatattctgcctactgtaaatatgggttcctctgagttgttttagaaaattagcgcaatgtattaaaatcaagtgttaggaaatttcatggtcttacctacaataacttttattttggaattgaactattattaaattgtatctaatcctggaaaaaaaaaaaaaaaaaaaaaaaaaaaaaaaacaaaaaaaagaacaaaataaaaaaaaagaaaacaacaaaaaaaaaaacaacaaaaaacaaaagagagggaggaggcgcaacaagcacaacgaagcactaccccgggagggggcacgccgcacacagaacgccggagcggcacgcccggaccccactatctagaaacgacaaagcgtgtgcccacacaaaacaaaagtaaaaagagcgcagacttatcaatcagacacacgccaagcgacgagacgcggccgcagatcctcaacaaacacagcacactgaatagcaaggtggagagaaacacaacctggtggctgacgcagcgacacacatcctgcgaaggaaaagacgagacactcacactaccatgggagagtggaggagcaaaacaacacacaggcgagaagaacaacaaaaacccagccacaccagcaaacataaacacgccaccatgacaacggcgacaacacaacaacgaccacgtctcaagcccgagtcactaactgagcacagacaacaccgcacacacaactacaatcagccgcggaacaaaggacaactaactacgaacgacaaccgactgatcagagcagagacaaacactcaactccaaccgagggagcgatcaaagaacaaataaggan

SEQ ID NO: 735149 - DNA, 18699 bp, Homo sapiens
gtaagggtctttacatggtttccagatagttcattagttgttgctttctttttttgtctgttttctgttttttttttttaaataactgtggtatgatgtaataggaacttataatttctgagttgcttatttttcctttacagttatagtaaagttatactcatttattttctcctgctttctgcagagtaaaatactgatttttgtctagaaacaagacagtgcaagacaatgttgaaagtgaaattctatgttaaaatatgccagatttattttaagaatttaatatctgtagtcagttatcaatacaaccaaattacataattatgcatgataataggtaaatactgagaagttcacctcattttcttgttaaaggatttggctattaccgtatgtgtcagttagtactcttttgtatggtagtgaaagaaaactcaacccaaactgattcatgaagaagaaagtaaatctggttagatgtggtttgaattaggtaattcatgtcatgaggactcagatctcccatctctatttctacgttccacttttgcattggcttcattttcggttaggttctcccttggtggtggtaaggtggttgtagcaatgtcagcctcccatttttggaaccgagtccataggaggctattctttctagaccttaataggagtaacacaattattgctcatcaccctagctttggccatgtgtcaaatcctgaccagtcacaatttcacagtcatagattctaccctggagctgggatgttactggcctcactagaaacacattgctgatagggtagaaggtgtgttcatcctacccaacccgacccgcaccaaagtcagaatagggaaaaacagatgttgggtgacatgcaactaacgtctgccgtactacactgaagatatttttctatgtttattctccagtgaaagagcttatatttgtggtacataggggattttgttttaatttagaaaatttaattgtagaaaacatgttttataaccctttctctgtactttgttctatatcaggaattgacttgattagataaggtgacatagggtatcttaggccctacaagatagtaaaccccccatcacttgaaagtattcagtagaggcttaaaaaacattattaaaggatgtggttattaggggactttaagaaatgaatatgaaattgaagtaggaaatctttaagctactctgtgagttatgccttttaaaagcaatttgtaattcctgtagatttcttttaaatttaggcagtttcataaatgactatagcatcattttagcaaatttgtgatcctgtaagaggaggataagtgttttttgtttgtttgtttgttttttgtttttttgagacagagtctcactttgtaccccagaaagtaaatctagttagatgtggtttgtctcggctcactgcaacctccaccccgtgcgttctagcaattctcctgcctcagccaccacacctggcctaagaggggaggataagtgttttagtgatcatattagactgaatgtggcagatgagatttcccgcccccccattgttggttagactgacattcaacattcaacaagagccacctgcccttgtaggcatttctgccactatacccctacataaacctagagtgctattgcttacttgctttccttcaaatacattttttcatttgtggcctccacattcttgtgtgtgatgtcctttctctgtgaaatgtcttctaccctttttttcaaagcctagtttagaactgacctcttctatgaaccctctgccgactggcctttccttccccagtcccccaagttcaaaatgatctctttcctttgaatactatagtatttgcacaattcactatctccttatcatattcttcttgtttatttgttatcagctgatgttgacatcataagttcaggttcctaactagatccaatattggaatttttcagcttttgctaagaagagagcttgtatgtctttgggaataatgggcagaaaaagataactttgagaagtcttagacttctaatagctttgatatttaaaagtacatgtaatacaagaggtttttttcctacatttaatgcatggagaagataggacatttagaaatatggaattaatgttcatttgactggcaaaagattattttctcagatgtagtgaagtgtggtaaagaacttcactctagagccagaatgtctgtgtttgtatcccagagcccaccacttacatttaaccattaacattcaacttactgtctctgagtttcagtggcctcatctataaaatgaggataataagagtacctacttcatagagttgttttagtggttaaataaactaacgtaaacttgctagaacttgataaactaatattggatgagaactggttgaaataatgcctggctatagtaaaaacttggtaaatgttagttgccattacaatgcaactactgttcctaccattccctctgccagtgcctggtattcagtagcactcagtaaatgttagttaaatgaagaaataactgaaggaatgaatgaacaaatggttgatgtagagattgcttttccattgttgtttattgaatattttgagatgtataacatactgtctgttaggcactgtgggatgggcactcacggagctgtcttccaaaggggtataggagaggagacgcagtgatctcagcaacctacctttaaaacatatcctagtatctactgccatgttaggttctcttcttttgctttttttaaaaaaaaattctcacaaaactccccccacccacttcagtttatagatgaggaagctcctactacataatagtgcttcccagtctaattcttgacctcattgtatttatatgtcctttttttttttgacagagtctcactcattgcagtggcacaatcacagctcactgcaacctctgcctcccctgctcaagtgatcctcccacctcaacctcctgagtagctgggactacaggcatgcaccaccacgcctggctaatttttgtatttttttgtagagatgcggttttgccatgttggccaggctggtctcgaactcctgggctcaagccatctgcccactttggcctctgagagtgctgagattataggcatgagccaccattcccagccatgttttcctttttcattgaactttatctactttagccattaaactccactccattggtcttgtcattactaagagctgaaccacctgcaaaatattaagttaaaaagcgttttctttgacaacagttttcttttcttcatcttcctctatcactttacttctgaacttttattctctcattttgatctgacccctacttctctgtttttcctggccatttagtactttcttgttttgctcatcccatttcccagtggagaccttctggtctgctgctttatcactggttttgttagaagacatacaaatggcaaggaggtatatgaaaaggtgcctaacatcattgatcatcagagaaatgcagaccaaaactacaatgagatatcatttcaccccagttaaaatggctttttttttttttttccaaaagacaggcaataacaaagtactggtgaggatgtggagtaaagggaacccacatacactattagtaggaatgtaaattagtacagccactgtggagaacagtttgaaggttcctcaaaaaactaaaaatagagctaccatataatccagcaatcccactgctaggtatatatccaaaagaaaggcaatcaatatacggaagagatacctgcacacccaggtttattgcagcactattcacaatagccaagatttggaagcaacccaggtgtccaacagatgaatggataaagaaaacatggtatataaacacaatggaatactattcagctgtgaaaaagaatgaaatcctgtcatttgcaatcctgtcttgaatagaactggaggtcatgatgttaagtgaaataagacaggcacaaacttcacatgttctcacttatttgtgggagctaaaaattaaaacaatcgaactcatggagctagagaatagaattatggttaccagaggctggaagggtggttgggcgtataagtgtagggggagtggggatggttaatgggtacaaaaaaatgagaacgaataagatctacttgataacacaacagggtgactatagtcaacagtaattatacatttaaaaataactagaagagtataattagattgtaacacaaaagataaatgcttgaggtgatggatacctatttaccctgatgtgattattacttatttcatgcctatatcaaaatatttatactccaaaaatatatatacctactatgtacccacaaaaatttaaaaatttatatattgtttttgctatcacctttagaatttcttgtcattggatagttcgtctgtataccattctggtcttcattccccagggcccccgttgtctgatttttctgcttctagaactgttagaggtcacaaaagcaagatggttgtatctatcacaatttttgtctgactttaactgggtatctgttacgatttagtagtcatcttactgacttcttgttggtttccaattgaatcctcacagtagactgttttcattgtaatcagtatcgaattatagcctgttcccttcttcataaatgaaggctttcttcttcaacagttcttagtgacttcacctgtactttatttctctgctttgaatatttcgaagaaaacatattcttgctctttcccaaggttaacactacatacattaccttgaccacaggatgttttcttgcagattgtgacctaattccatcacccttcagcagcccccaccgttttcatggattcagctaaaccttctgtaagatgactctttttccccctaatctttatatctcttttgatatgtagctttagtctcactttttttccttttggattttgccagttagatgtctccctggaattccacttcagcatggctaagactaagcttgtcttctctttcctccccaaagcaaattgtaattaggatagactgaaggtgacagaagataactaagatcttcttcatcctttcggctcttatggaagctgaattccagtagtcattctaaatttgttgtatgtcagcttatggtatcttttcatgtctttacattcagccaaagaggaagttccttgaaggggagaccagagggcgtgctgtgcttcttaatcctctctttcttaaccagtaagaggcattcagtagatatctgatgatactgattaatagaggggaacttttcagattcttttttttttttaaccctagtaagctttagtacaaactaaatgctgagagattatcaagtaagggattgatcatcacaagaagactcaggatgttacatcctgtaggttttatagtttcctatattgtaaaaaatatgagttatagcagcttgtctggatgtcatacaggtataaaaatcagttttataaacttgagtaaattggggcccattttagaaaaaactcttgcaggctgtgaatgccaatatataagtaaagtattaagtataatgttatttaatgtgggcaaacataaagccaggtgtaaattttttaggtttaaaatcttatagaactatacatccaaaagaaaatttcaagttaaacataatacaaagcaatacaatctaaattaacattaatttaatgtgatgaatgatattgccttgctaaaagtgggtcactacttacaatgtgcaaatggtactcatcgttagggtatagattcttttaaactatgacatacgtacactaccatgtggaacgtgatgatgtgttctctgttctaactactgggaagacttccttggcatagcacatgccatggggtcagttggctttgacttcatatagatatgccatttacttggtcagtgtcacttctatgacaagtagtatgttgtgccagtttgattataagtacaaatatgggcaatgaagtaacttggttttaaggttgttactaagctgagtaacagtgtgtggctatacaaatttttataggctatcaggaatgaaaacacaggagattgttgtagattcaagtattttagattcaagtttgaagatgctcatgcagatgtttaactgagttgtatagacctttatgtttctttctttttctctttttttttttttgagacagagtcttgctctgtcacccaagctggagtgcaatggtgtgatctcggcttactgcaacctccgcctcccaggttcaagcaattctcctgcctcagcctcccaagtagctgggattacagatgtgcaccacgacgcccagctgattttttgtattttagtagaggcggggtctcaccatgttgtcaagatggtctcaatctcctgaccttgtgatccacccacctctgcctcccaaagtgctgtgattacaggcgtgagccaccgcgcctgactgacctttatgtttcttaactttatgctatacatcagttgatatttcaaaaatttaaatggtttctatgattattctttgggctaagaaattgggcattaattgtcctcatatgtatggtttttgtggctacttcatgtagattttatttttggtggttatcaaattggaatttttttttttttttttttttttgagacggagtctcattctgtttcccaggttggagtacagtggtgcaatctcagctcactgcagcctcgacctcccaggctcaagcagtcctctcacctcagccttctaagtagctgggactacaggcacgcaccaccacacctggctagttttttgtgtttttagtagagatggggttttaccctgttggccaggctggtcttgaactcctggcctcaagtgatccacctgcctcagcctcccaaagtgctgggattagaggcatgagccaccacacctggctgaaattggaatttcattggtactgcctgtaattttatgttaatttttttttttttttgtcgtcactagcttttatctaaagcccctagagagaaaggccatgataccttgtatacaaggttataagagtatacaagggaaagggagggctgaagggaacagggtgggctggtacaagcctcattagaaataccattgagtctgtgagtaaaacatcattatatgaaaaggagatgtggttttagggtggtccaattacttttgcaccagcctaataaaattacaagtcattatcaatagagacattgtaaaacctttttttttcccaaaagaagtatcaggtatgataattacatgtctgcccaactttcgttatagattaacataacttaattgtatttaaggtacaatttaggagagttgctgaaaaatgaatctttagtattgggatgccttgattctaccctcaatagctataatggattatgtgtctgagtagattaataaaaatcttttgagcatttttcttgaactacttcactgaagattagctttttgagcatccattttaatttctcagtatataaggatcggtttatcacaactgtattgttttccctggccttgttagattatattttcatatcatgtagaaaaataggtgtattcgttctcccttgaagtcctttgtctcccaaaggaaatggttgcaatacagatgtgtcacctcttccacaggtaaagtggaatggagaagtagccagttaaatagtgcatgctcaatttggaacatttagagcatacaggaaagttatttatttggtaaatattttttaagcatttactatgtttcatgcattgtactagttgtagaggatataattgaatacaactacatgtagcccttgactttatggaactagtctagtataaagatttaagattgcctggcatggtggctcacgccactaatcccagcactttgagaggccaaggcaggattgcttgaggccagaagtttaagagtagcttggtcaacataatgagactccatctctaaaataaatagatagatagatagatagatagatagatagatagatagatagaagtagttagacaacacaaagcagtttcactcatcttgtggcaaggagttatgtatttctaatcaaatttggcaactcaagcattttcaacaaaatctacatgttttttcagaataaagtgaccaacacagaatgttacctgtaaaaatcagagcaataattgctatctaaaataattttgaaaattaagtggtactgaaaggctcatatagcaaaaatatggcctcctgtcattgtactttcctacttcccagactcaccattttcaacattttttagtagtttattttgccattttatagcatagtacctgacattttatttattcaacagacatttcttaagtacctaatacatgccattccttgtttgaagggatgctaaggatacagtggtgaacaaggcgttgtggggttgtatagagggtattcattcctaaccttgaaccaaatatttctttctgttggataatgcattaaaaattgcaaacagtttacaaacttttggagcaatggtggccttgatcataaagtagggactgcttctaccgtatacatgcttggtggtgtatttgtgatatctggctaaagtttctacatggaaattgactgactttagttttgagacttctgggaaccagtcaggcaaaatagtgaaactgtgtatcctgtttccaagagttgtcttttaaggttatctgcttcattcatttggcctgacttgctaggcaaatgcctagggtaaatatgatttgattaactataacaacaacagcaacaacaacaactttattttttagagcagtttgaggttcacagcaaaattgagcagaatgtacagagattttccctatacccgcttcccctacgcatgtgcggcctcccctactatcaacatcccccaccagagtggtttgttacaattaatgaacctacattgacacatcattatcactcaaggtccgtagtttacattagagtccactcttggtgttgtgtatgggtttggtcgattttataatgacatttatccaccattatagtgtcatacatagtaattttgctaccctaaaaatccagtgtgctccacctgttcctccttccctcctccctcatccctggcaaccactgaactttttaacatctccatagttttgccttttccagaatgtcatatcattggaatcacacagtatgcagccttttcaaatgggcttctttccgttagtaataggcatttaagtttcatcctcatcttttcatggcttgatagctcatttctttccctccctcttttcttccctgtcttccttccttcctcttctttcctgtttcctctttcttcttccttttttaagagacaaggtgtctcactctgttgcccaggctggagtgcagtggcccaatcatagctcattgcagccttgaattcctgggctcaagtgatcctcctgcgttagcctcctgagtagctgggatcacaggctccagtcattttagtgctgaataatatttcattatctggatgtaccgcctattcattcacctactgaagaatatcttggttgcttctaagttttggcaattatgagtgaagttactataaacattgtatacaagttttatgtggatgtatgttgtcatctcccttgggcagataccaaggagtgccattgttggatcatatggtaaatatatctttagttttgtacagaattctaggttggtatttttttctctctcagtcctttattttatttggagacagtctcgctatgtcgcccaggctgccatacagtggtgccatctgggctcactgaaacctccacctcccaggttcaagcgattcttgtgccttggcctcccaagtagctgggattacaggagtgcgccaccacgcctgctaatttttgtatttttagtagagacagggttttgccatgttgcccaggctggtctcaaactcctgaccttaagtgattcacccacctcaatctcccaaaatcctgggattacaggcctgagctactgtgcctgatctctctcagtactttaaagaaatatttcattccacttttcttttttttcttctttttgagatggagtctcactctgtcgcctgggctggagtgcagtggcgcgatctcagctcactgccacctccgcctcctgggttcaagtgattctcctgcctcagcctcctgaatagctgagattacaggcgcccaccaccatgcccagctaattttttgcatttttagtagagacgggggttccaccatgttggccaggctggtctcgaactcctgacctcgtgattcgcacatctcggcctcccaaattgctgggattacaggtgtgagctaccacgcctggcccactcttcttgcttacatagtttctgaggagatgtcagatgtaatttttatttttgctcttctgtaggcaagttgagttttttccccctctagcttctctcaggatttttttctttatctttgattttcagtagtttgaaaattatatgcctagctgtcagggttttttgcttgtttgtttttgttttctcaggtgtgactccagaaaggttctaaagaggagctttacaatctcttctctggggtttatggagacttcctttacccttctgtgttagccccttaaagcactgcgtcaaccttaaaagggcacaggaaagggtgtctatgccatttttatgccatttatcctgcttggtgttttctgagctttcttcatctgcggtttaatgtctcacattaatttgtagaaattctctgtcattgtttcaaatttttcttcagttcttttctctgtttcttcttctggtgttcccattatgcttttgtggttgtcgtacagttattggatattttgttccaggcttttttttttccagtctttttttccttttgcttctcggttttgtaggtgtctgttgagatactctcaagtgcagatattctttcctcagctttgtctagtttactaataagcccattaaaggcagtcttcatttctgttacagtctttttgatcagtagcatttcttttttattctttcttaaaatttctgtctttctgcttacattgcccatctgttcttgcatggtttctactttgtccattagagttcttaggatatttatcataattatttcaaatttctggtgtaacaattccaacatccctgcaacatccaagtctagtttcgatgcttactgtgtctcttccagctgtgttttttcctatttaatatgtcttataattttttcttgatagccatacatgatgcattaggtaacagaaactgctgtgagtggacctttagtaatgtggtggtaaggtgtgcatggaggggaaacattttcagtctgttagtgaacttttgtcaacttcacatgtgcttctcaagtccatcctgtaagtgggagagtagggctagagaggactgaagttgggtatatattaaatactttctcctacaaagaagcctagaggggacgcattaggggattttttttcccccagtattcactgtgatgacccttattgagctcctggaggtaaaactcacaaaactgtggttctcccccctgcccatattactacatgtccctggagtttatatctttcagacttgtctgcactgagcttccaccaatttgtcaaatacagatcaggtttccctaccacccgtgcagttgaaaacccacatacaacttttgactcctccagagcttaactactcatagcctgctattgactggaagccttgccaataacataaacagttgattaatacatattttatatgttttctgtattatatattgtattcttacaataaagagaaaagaagatgttattaagaaaatcataaggaagataaaatatatttactgttcattaagtggttcccatgggtgctggttcccatggaggttgccccttgtgagtttttgctcagggaagttgtgattctctatatttgcctgttggtctcctaatttgggagtcatcagttttccctgtgacctcacttctcttacagagttaagaacagttgttggtttttcagtttgttcagtgttttacatgttgttagaacacagtggtacttctaagtttcttaacatgctagatcagaaacctgaagtctcacctaatttggctttttatattttttcttcttttttttcttccattgctaccaaagcatttttcatctgtgtctggggtgacattagagcagaatgtgatttctaggtaaacattattgggctccctagcagaaaaatttttgaaagtagtacatgaattctgtataattaaaattttcttttcatcttaataggtataggtaataggcacggcctattttttttttgctcaacagtctaaaatagtaatttaatcacctaatagccttagttatatagttgaaagaagagttggaaatctgattcatgggttggaaatcacctgtcacatatgagttttaggcactggtcactttattttgaaacagctttggggttttttcctttttcaactcataataggctttaacagcttttagttttgtttctgtttttttaacagcatgagttgccaaatttggttatagcttcttggtacaagatgggtaaatttgctttgtgttgtgtaattactttttattttaaatgctacctcttttatgaacactaactttacactaagattaggaaaatgagaattgcatgtctgcaacaaatagctatctgtagtattaaattgtgaaaatgtagactttggattggagctggcatctcttaatatgtaattgtaacatagagtaaataagtattttgtcccttgtagggtcaaacagtacagtgcatgggcagaattagagatgtaggcttttttttttttttttttttttactggcttagagaaccgtttgatcagctaatatggaattaagtccctagggctgcccaggcacaacattaactgctattaaaggaaaatttaaaagagtattagtgaaggttaaatactgaccatggacatctggcaaaattgatgttttttttcccctccaccattgtttatagtttattgttatttatcagagaattaatgtttattttcagaatctattaccataagaaatctgtttgaggacttcgtatgtgccaggaattctactaaataatgatataatgctgaacagaattagataggatcctcacttcgttaagcttacagtctagtggtatagatcaacattaatcaaagaataacacaaatagaaagcagagcagtggttcatgggattgactgtagagaagcatgagggaagttcccaggtgatggaaaatactttatttcttaatcgtggtggttacatgtgtgcatatgtttatgaaaatatattgtacatttaaagtggatacattttatcacatgtaaattatgactctataaagttaattaaaaagaataactcaggtaaggtggtgtgtgcgcctgtagtcccagctatttctgaggcaggaagatcacttgagcccaggagtttgagttcagcatgggcaacatgagacctgtgagactttgtctctaaaaaaatttaaataaataactaagataaatgtaaaattacagctgtagtaagttctacaaaggagagttacatgggctatgacgatgtaagatagcaagaactgacattggcagggaggaaatgatgatgagtagaagtaaataagtgaagtgtggggattgatgtcaaggggacagtataaaagaaataacagcatgcgccaaggccctaaaattggaaagtccttggcaaattaaaggagtttgaaaaaggccattgtgtgcaaagcagaaaataggtactacaaggtaaaagatggagctaagcggtaggtaaggctaaaccttgtcagccattgttaaatattgaattgtatcctaagcacaactcagtggaaagcagttaaagttctttaattgggggaggcaatgaaggggtaataaaattggttatagaaatactgctctggctctagtgttgagaatgaattggagtagccagagtagattcaagaagactttagtaagattattccaacaggccaggacctgttatagggtggtggcaatggagagagatggacagaatggagagtgtatttaggaggtaaaaatgacagaacttggtgatgcactgaatgtgaaatggggaaggtgtctaggaggactactaggtttatggtttgcgtattagggtggatgatagcagtttcatttactgagacagggagccctggcagagtacccagcttttagagtgggtagggggaaggggagagtgcatctggtgttgggcattttgaagtgatttacatacaacaaactgaaggtatctttaacactgagtccagcaggttagcatatttattcagcaagcattgcacctttttttgttgtttttggggtcttcaactcctggcctcgaatcctccctccttcccccgcctctcccagcctccgcctcccaaagtgctgggatttcaggagtgagccaccgcgcctggccagcatcgcgctgtttgtgcagtgtgccctgtgctaggtcttgcagtgggtaccagtagagacataaaagtacaaaagataattggacgtttagtagagtcctgaaagggggcgggataggaagatacctaaccataagaaaaaccagcaagagcggaaaaggagctagtcctccagatcaataagttaatcacttatgtttgtgattccctgcattttgggtgattctctgtcgaggtcctcttaagtccagacttttgatataatctgcagtttgcgccatttggattcctgaagcatctttacaagccacctacattccttatggagctgtggcacaacagcaagcccacgatgtctcaccggattaataaaaatataggcgctcacgcttttgtttaccgatatagtatctcctcctcccctcactccatcaacccccacgcgacacaactttccggaagtaagcaaaatccgttatcaaggtgaaactccggggaccaggctccacagctgccataaactggatggcacgttagaagccggtgggtgtaggtgaggcacgctggcgcccgcgggcccttctccagccgctacccagtgggaatccgcggggctgaagccccgaaaccaggctgagcgtcccagagcgcaacctccctttcccccagcagcgccggcgccgcagaagccgcgtgtccccaggcgcactcccccaaggtgaacccccgccccccacggaggcggctgggtcgcgggtctgggcggggcgctccggacgccctcccgccgctgcgcacccctcccgcgagctgccagctccctcggcctctccacccaaaactggcccaaccgccaatcgtctgcctctcacctcctacagcaggtgacccatggccaatcgccaggggtctctttgccaggagccgccagggccagccaatcggggcgacccctccgccggggaggggacgggaaaggggtggggggtgaagggggtgaagggggtgtcccgggggacgggctgaacctcagtcaggaccgcctgcaccgcagtccggggatcgggtcgaggggagaagaaaaaggggtgctcgggagcagcccccggctacctcccctggaggcacagagggcgggggccttggcgaatggctttcttgctggccacttgcggaggtttggattcaggatttgttcctagtgtccaagattttgataagaaacttacagaagctgatgcttacctacaaatcttgattgaacaattaaagctttttgatgacaagcttcaaaactgcaaagaagatgaacagagaaagaaaattgaaactctcaaagagacaacaaatagcatggtagaatcaattaaacactgcattgtgttgctgcagattgccaaagaccagagtaatgcggagaagcacgcagatggaatgataagtactattaatcccgtagatgcaatatatcaacctagtcctttggaacctgtgatcagcacaatgccttcccagactgtgttacctccagaacctgttcagttgtgtaagtcagagcagcgtccatcttccctaccagttggacctgtgttggctaccttgggacatcatcagactcctacaccaaatagtacaggcagtggccattcaccaccgagtagcagtctcacttctccaagccacgtgaacttgtctccaaatacagtcccagagttctcttactccagcagtgaagatgaattttatgatgctgatgaattccatcaaagtggctcatccccaaagcgcttaatagattcttctggatctgcctcagtcctgacacacagcagctcgggaaatagtctaaaacgcccagataccacagaatcacttaattcttccttgtccaatggaacaagtgatgctgacctgtttgattcacatgatgacagagatgatgatgcggaggcagggtctgtggaggagcacaagagcgttatcatgcatctcttgtcgcaggttagacttggaatggatcttactaaggtagttcttccaacgtttattcttgaaagaagatctcttttagaaatgtatgcagacttttttgcacatccggacctgtttgtgagcattagtgaccagaaggatcccaaggatcgaatggttcaggttgtgaaatggtacctctcagcctttcatgcgggaaggaaaggatcagttgccaaaaagccatacaatcccattttgggcgagatttttcagtgtcattggacattaccaaatgatactgaagagaacacagaactagtttcagaaggaccagttccctgggtttccaaaaacagtgtaacatttgtggctgagcaggtttcccatcatccacccatttcagccttttatgctgagtgttttaacaagaagatacaattcaatgctcatatctggaccaaatcaaaattccttgggatgtcaattggggtgcacaacatagggcagggctgtgtctcatgtctagactatgatgaacattacattctcacattccccaatggctatggaaggcaagtgtgtccatttcctctgatcagcagtagactctgctgttccttgagacatgccccttccccctcttcctcttaactgtcaaccttacctaaaaacttttgattttgcaggtctatcctcacagtgccctgggtggaattaggaggagaatgcaatattaattgttccaaaacaggctatagtgcaaatatcatcttccacactaaacccttctatgggggcaagaagcacagaattactgccgagattttttctccaaatgacaagaagtctttttgctcaattgaaggggaatggaatggtgtgatgtatgcaaaatatgcaacaggggaaaatacagtctttgtagataccaagaagttgcctataatcaagaagaaagtgaggaagttggaagatcagaacgagtatgaatcccgcagcctttggaaggatgtcactttcaacttaaaaatcagagacattgatgcagcaactgaagcaaagcacaggcttgaagaaagacaaagagcagaagcccgagaaaggaaggagaaggaaattcagtgggagacaaggttatttcatgaagatggagaatgctgggtttatgatgaaccattactgaaacgtcttggtgctgccaagcattaggttggaagatgcaaagtttatacctgatgatcagggcagtaggcataattcagcaacaaacaatcttcctttgggagaaacctgttcattccaatcttctaattacagtggttcctatctcagggatactggactttctgacgcagatgaacaattaaggggaaaagcttcccttttccctctgtggcagttacgattttgacttcagtcctgagaaaaacttcaggttttgaaaatcagatgatgtcttctccttttccaaacaccacacgttgaaagcatttataaatccaagtctgaaactctgcgctctagtactgctgttaagatacacaacttgtttcttagttcatataatctcgggatacacacacacacacacatatatatacacacacatacgtatacacacacatacatatatataaatatacctgatgccagatttttttcataaatattctgcctactgtaaatatgggttcctctgagttgttttagaaaattagcgcaatgtattaaaatcaagtgttaggaaatttcatggtcttacctacaataacttttattttggaattgaactattattaaattgtatctaatcctggaaaaaaaacaaaaatgctagtaaaatgataatgtaccgaaattggagaaatattcaattgtaactcacttttaaaaataataaaaccttagggggggtcccggtacaaatttccccttatagagggcggttttaaatttaattggcggcttttaacaacgtt

SEQ ID NO: 735150 - DNA, 18489 bp, Homo sapiens
  misc_feature (18413)..(18413): n is a, c, g, or t
  misc_feature (18424)..(18424): n is a, c, g, or t
  misc_feature (18429)..(18429): n is a, c, g, or t
  misc_feature (18432)..(18432): n is a, c, g, or t
  misc_feature (18434)..(18434): n is a, c, g, or t
gtaagggtctttacatggtttccagatagttcattagttgttgctttctttttttgtctgttttctgttttttttttttaaataactgtggtatgatgtaataggaacttataatttctgagttgcttatttttcctttacagttatagtaaagttatactcatttattttctcctgctttctgcagagtaaaatactgatttttgtctagaaacaagacagtgcaagacaatgttgaaagtgaaattctatgttaaaatatgccagatttattttaagaatttaatatctgtagtcagttatcaatacaaccaaattacataattatgcatgataataggtaaatactgagaagttcacctcattttcttgttaaaggatttggctattaccgtatgtgtcagttagtactcttttgtatggtagtgaaagaaaactcaacccaaactgattcatgaagaagaaagtaaatctggttagatgtggtttgaattaggtaattcatgtcatgaggactcagatctcccatctctatttctacgttccacttttgcattggcttcattttcggttaggttctcccttggtggtggtaaggtggttgtagcaatgtcagcctcccatttttggaaccgagtccataggaggctattctttctagaccttaataggagtaacacaattattgctcatcaccctagctttggccatgtgtcaaatcctgaccagtcacaatttcacagtcatagattctaccctggagctgggatgttactggcctcactagaaacacattgctgatagggtagaaggtgtgttcatcctacccaacccgacccgcaccaaagtcagaatagggaaaaacagatgttgggtgacatgcaactaacgtctgccgtactacactgaagatatttttctatgtttattctccagtgaaagagcttatatttgtggtacataggggattttgttttaatttagaaaatttaattgtagaaaacatgttttataaccctttctctgtactttgttctatatcaggaattgacttgattagataaggtgacatagggtatcttaggccctacaagatagtaaaccccccatcacttgaaagtattcagtagaggcttaaaaaacattattaaaggatgtggttattaggggactttaagaaatgaatatgaaattgaagtaggaaatctttaagctactctgtgagttatgccttttaaaagcaatttgtaattcctgtagatttcttttaaatttaggcagtttcataaatgactatagcatcattttagcaaatttgtgatcctgtaagaggaggataagtgttttttgtttgtttgtttgttttttgtttttttgagacagagtctcactttgtaccccagaaagtaaatctagttagatgtggtttgtctcggctcactgcaacctccaccccgtgcgttctagcaattctcctgcctcagccaccacacctggcctaagaggggaggataagtgttttagtgatcatattagactgaatgtggcagatgagatttcccgcccccccattgttggttagactgacattcaacattcaacaagagccacctgcccttgtaggcatttctgccactatacccctacataaacctagagtgctattgcttacttgctttccttcaaatacattttttcatttgtggcctccacattcttgtgtgtgatgtcctttctctgtgaaatgtcttctaccctttttttcaaagcctagtttagaactgacctcttctatgaaccctctgccgactggcctttccttccccagtcccccaagttcaaaatgatctctttcctttgaatactatagtatttgcacaattcactatctccttatcatattcttcttgtttatttgttatcagctgatgttgacatcataagttcaggttcctaactagatccaatattggaatttttcagcttttgctaagaagagagcttgtatgtctttgggaataatgggcagaaaaagataactttgagaagtcttagacttctaatagctttgatatttaaaagtacatgtaatacaagaggtttttttcctacatttaatgcatggagaagataggacatttagaaatatggaattaatgttcatttgactggcaaaagattattttctcagatgtagtgaagtgtggtaaagaacttcactctagagccagaatgtctgtgtttgtatcccagagcccaccacttacatttaaccattaacattcaacttactgtctctgagtttcagtggcctcatctataaaatgaggataataagagtacctacttcatagagttgttttagtggttaaataaactaacgtaaacttgctagaacttgataaactaatattggatgagaactggttgaaataatgcctggctatagtaaaaacttggtaaatgttagttgccattacaatgcaactactgttcctaccattccctctgccagtgcctggtattcagtagcactcagtaaatgttagttaaatgaagaaataactgaaggaatgaatgaacaaatggttgatgtagagattgcttttccattgttgtttattgaatattttgagatgtataacatactgtctgttaggcactgtgggatgggcactcacggagctgtcttccaaaggggtataggagaggagacgcagtgatctcagcaacctacctttaaaacatatcctagtatctactgccatgttaggttctcttcttttgctttttttaaaaaaaaattctcacaaaactccccccacccacttcagtttatagatgaggaagctcctactacataatagtgcttcccagtctaattcttgacctcattgtatttatatgtcctttttttttttgacagagtctcactcattgcagtggcacaatcacagctcactgcaacctctgcctcccctgctcaagtgatcctcccacctcaacctcctgagtagctgggactacaggcatgcaccaccacgcctggctaatttttgtatttttttgtagagatgcggttttgccatgttggccaggctggtctcgaactcctgggctcaagccatctgcccactttggcctctgagagtgctgagattataggcatgagccaccattcccagccatgttttcctttttcattgaactttatctactttagccattaaactccactccattggtcttgtcattactaagagctgaaccacctgcaaaatattaagttaaaaagcgttttctttgacaacagttttcttttcttcatcttcctctatcactttacttctgaacttttattctctcattttgatctgacccctacttctctgtttttcctggccatttagtactttcttgttttgctcatcccatttcccagtggagaccttctggtctgctgctttatcactggttttgttagaagacatacaaatggcaaggaggtatatgaaaaggtgcctaacatcattgatcatcagagaaatgcagaccaaaactacaatgagatatcatttcaccccagttaaaatggctttttttttttttttccaaaagacaggcaataacaaagtactggtgaggatgtggagtaaagggaacccacatacactattagtaggaatgtaaattagtacagccactgtggagaacagtttgaaggttcctcaaaaaactaaaaatagagctaccatataatccagcaatcccactgctaggtatatatccaaaagaaaggcaatcaatatacggaagagatacctgcacacccaggtttattgcagcactattcacaatagccaagatttggaagcaacccaggtgtccaacagatgaatggataaagaaaacatggtatataaacacaatggaatactattcagctgtgaaaaagaatgaaatcctgtcatttgcaatcctgtcttgaatagaactggaggtcatgatgttaagtgaaataagacaggcacaaacttcacatgttctcacttatttgtgggagctaaaaattaaaacaatcgaactcatggagctagagaatagaattatggttaccagaggctggaagggtggttgggcgtataagtgtagggggagtggggatggttaatgggtacaaaaaaatgagaacgaataagatctacttgataacacaacagggtgactatagtcaacagtaattatacatttaaaaataactagaagagtataattagattgtaacacaaaagataaatgcttgaggtgatggatacctatttaccctgatgtgattattacttatttcatgcctatatcaaaatatttatactccaaaaatatatatacctactatgtacccacaaaaatttaaaaatttatatattgtttttgctatcacctttagaatttcttgtcattggatagttcgtctgtataccattctggtcttcattccccagggcccccgttgtctgatttttctgcttctagaactgttagaggtcacaaaagcaagatggttgtatctatcacaatttttgtctgactttaactgggtatctgttacgatttagtagtcatcttactgacttcttgttggtttccaattgaatcctcacagtagactgttttcattgtaatcagtatcgaattatagcctgttcccttcttcataaatgaaggctttcttcttcaacagttcttagtgacttcacctgtactttatttctctgctttgaatatttcgaagaaaacatattcttgctctttcccaaggttaacactacatacattaccttgaccacaggatgttttcttgcagattgtgacctaattccatcacccttcagcagcccccaccgttttcatggattcagctaaaccttctgtaagatgactctttttccccctaatctttatatctcttttgatatgtagctttagtctcactttttttccttttggattttgccagttagatgtctccctggaattccacttcagcatggctaagactaagcttgtcttctctttcctccccaaagcaaattgtaattaggatagactgaaggtgacagaagataactaagatcttcttcatcctttcggctcttatggaagctgaattccagtagtcattctaaatttgttgtatgtcagcttatggtatcttttcatgtctttacattcagccaaagaggaagttccttgaaggggagaccagagggcgtgctgtgcttcttaatcctctctttcttaaccagtaagaggcattcagtagatatctgatgatactgattaatagaggggaacttttcagattcttttttttttttaaccctagtaagctttagtacaaactaaatgctgagagattatcaagtaagggattgatcatcacaagaagactcaggatgttacatcctgtaggttttatagtttcctatattgtaaaaaatatgagttatagcagcttgtctggatgtcatacaggtataaaaatcagttttataaacttgagtaaattggggcccattttagaaaaaactcttgcaggctgtgaatgccaatatataagtaaagtattaagtataatgttatttaatgtgggcaaacataaagccaggtgtaaattttttaggtttaaaatcttatagaactatacatccaaaagaaaatttcaagttaaacataatacaaagcaatacaatctaaattaacattaatttaatgtgatgaatgatattgccttgctaaaagtgggtcactacttacaatgtgcaaatggtactcatcgttagggtatagattcttttaaactatgacatacgtacactaccatgtggaacgtgatgatgtgttctctgttctaactactgggaagacttccttggcatagcacatgccatggggtcagttggctttgacttcatatagatatgccatttacttggtcagtgtcacttctatgacaagtagtatgttgtgccagtttgattataagtacaaatatgggcaatgaagtaacttggttttaaggttgttactaagctgagtaacagtgtgtggctatacaaatttttataggctatcaggaatgaaaacacaggagattgttgtagattcaagtattttagattcaagtttgaagatgctcatgcagatgtttaactgagttgtatagacctttatgtttctttctttttctctttttttttttttgagacagagtcttgctctgtcacccaagctggagtgcaatggtgtgatctcggcttactgcaacctccgcctcccaggttcaagcaattctcctgcctcagcctcccaagtagctgggattacagatgtgcaccacgacgcccagctgattttttgtattttagtagaggcggggtctcaccatgttgtcaagatggtctcaatctcctgaccttgtgatccacccacctctgcctcccaaagtgctgtgattacaggcgtgagccaccgcgcctgactgacctttatgtttcttaactttatgctatacatcagttgatatttcaaaaatttaaatggtttctatgattattctttgggctaagaaattgggcattaattgtcctcatatgtatggtttttgtggctacttcatgtagattttatttttggtggttatcaaattggaatttttttttttttttttttttttgagacggagtctcattctgtttcccaggttggagtacagtggtgcaatctcagctcactgcagcctcgacctcccaggctcaagcagtcctctcacctcagccttctaagtagctgggactacaggcacgcaccaccacacctggctagttttttgtgtttttagtagagatggggttttaccctgttggccaggctggtcttgaactcctggcctcaagtgatccacctgcctcagcctcccaaagtgctgggattagaggcatgagccaccacacctggctgaaattggaatttcattggtactgcctgtaattttatgttaatttttttttttttttgtcgtcactagcttttatctaaagcccctagagagaaaggccatgataccttgtatacaaggttataagagtatacaagggaaagggagggctgaagggaacagggtgggctggtacaagcctcattagaaataccattgagtctgtgagtaaaacatcattatatgaaaaggagatgtggttttagggtggtccaattacttttgcaccagcctaataaaattacaagtcattatcaatagagacattgtaaaacctttttttttcccaaaagaagtatcaggtatgataattacatgtctgcccaactttcgttatagattaacataacttaattgtatttaaggtacaatttaggagagttgctgaaaaatgaatctttagtattgggatgccttgattctaccctcaatagctataatggattatgtgtctgagtagattaataaaaatcttttgagcatttttcttgaactacttcactgaagattagctttttgagcatccattttaatttctcagtatataaggatcggtttatcacaactgtattgttttccctggccttgttagattatattttcatatcatgtagaaaaataggtgtattcgttctcccttgaagtcctttgtctcccaaaggaaatggttgcaatacagatgtgtcacctcttccacaggtaaagtggaatggagaagtagccagttaaatagtgcatgctcaatttggaacatttagagcatacaggaaagttatttatttggtaaatattttttaagcatttactatgtttcatgcattgtactagttgtagaggatataattgaatacaactacatgtagcccttgactttatggaactagtctagtataaagatttaagattgcctggcatggtggctcacgccactaatcccagcactttgagaggccaaggcaggattgcttgaggccagaagtttaagagtagcttggtcaacataatgagactccatctctaaaataaatagatagatagatagatagatagatagatagatagatagatagaagtagttagacaacacaaagcagtttcactcatcttgtggcaaggagttatgtatttctaatcaaatttggcaactcaagcattttcaacaaaatctacatgttttttcagaataaagtgaccaacacagaatgttacctgtaaaaatcagagcaataattgctatctaaaataattttgaaaattaagtggtactgaaaggctcatatagcaaaaatatggcctcctgtcattgtactttcctacttcccagactcaccattttcaacattttttagtagtttattttgccattttatagcatagtacctgacattttatttattcaacagacatttcttaagtacctaatacatgccattccttgtttgaagggatgctaaggatacagtggtgaacaaggcgttgtggggttgtatagagggtattcattcctaaccttgaaccaaatatttctttctgttggataatgcattaaaaattgcaaacagtttacaaacttttggagcaatggtggccttgatcataaagtagggactgcttctaccgtatacatgcttggtggtgtatttgtgatatctggctaaagtttctacatggaaattgactgactttagttttgagacttctgggaaccagtcaggcaaaatagtgaaactgtgtatcctgtttccaagagttgtcttttaaggttatctgcttcattcatttggcctgacttgctaggcaaatgcctagggtaaatatgatttgattaactataacaacaacagcaacaacaacaactttattttttagagcagtttgaggttcacagcaaaattgagcagaatgtacagagattttccctatacccgcttcccctacgcatgtgcggcctcccctactatcaacatcccccaccagagtggtttgttacaattaatgaacctacattgacacatcattatcactcaaggtccgtagtttacattagagtccactcttggtgttgtgtatgggtttggtcgattttataatgacatttatccaccattatagtgtcatacatagtaattttgctaccctaaaaatccagtgtgctccacctgttcctccttccctcctccctcatccctggcaaccactgaactttttaacatctccatagttttgccttttccagaatgtcatatcattggaatcacacagtatgcagccttttcaaatgggcttctttccgttagtaataggcatttaagtttcatcctcatcttttcatggcttgatagctcatttctttccctccctcttttcttccctgtcttccttccttcctcttctttcctgtttcctctttcttcttccttttttaagagacaaggtgtctcactctgttgcccaggctggagtgcagtggcccaatcatagctcattgcagccttgaattcctgggctcaagtgatcctcctgcgttagcctcctgagtagctgggatcacaggctccagtcattttagtgctgaataatatttcattatctggatgtaccgcctattcattcacctactgaagaatatcttggttgcttctaagttttggcaattatgagtgaagttactataaacattgtatacaagttttatgtggatgtatgttgtcatctcccttgggcagataccaaggagtgccattgttggatcatatggtaaatatatctttagttttgtacagaattctaggttggtatttttttctctctcagtcctttattttatttggagacagtctcgctatgtcgcccaggctgccatacagtggtgccatctgggctcactgaaacctccacctcccaggttcaagcgattcttgtgccttggcctcccaagtagctgggattacaggagtgcgccaccacgcctgctaatttttgtatttttagtagagacagggttttgccatgttgcccaggctggtctcaaactcctgaccttaagtgattcacccacctcaatctcccaaaatcctgggattacaggcctgagctactgtgcctgatctctctcagtactttaaagaaatatttcattccacttttcttttttttcttctttttgagatggagtctcactctgtcgcctgggctggagtgcagtggcgcgatctcagctcactgccacctccgcctcctgggttcaagtgattctcctgcctcagcctcctgaatagctgagattacaggcgcccaccaccatgcccagctaattttttgcatttttagtagagacgggggttccaccatgttggccaggctggtctcgaactcctgacctcgtgattcgcacatctcggcctcccaaattgctgggattacaggtgtgagctaccacgcctggcccactcttcttgcttacatagtttctgaggagatgtcagatgtaatttttatttttgctcttctgtaggcaagttgagttttttccccctctagcttctctcaggatttttttctttatctttgattttcagtagtttgaaaattatatgcctagctgtcagggttttttgcttgtttgtttttgttttctcaggtgtgactccagaaaggttctaaagaggagctttacaatctcttctctggggtttatggagacttcctttacccttctgtgttagccccttaaagcactgcgtcaaccttaaaagggcacaggaaagggtgtctatgccatttttatgccatttatcctgcttggtgttttctgagctttcttcatctgcggtttaatgtctcacattaatttgtagaaattctctgtcattgtttcaaatttttcttcagttcttttctctgtttcttcttctggtgttcccattatgcttttgtggttgtcgtacagttattggatattttgttccaggcttttttttttccagtctttttttccttttgcttctcggttttgtaggtgtctgttgagatactctcaagtgcagatattctttcctcagctttgtctagtttactaataagcccattaaaggcagtcttcatttctgttacagtctttttgatcagtagcatttcttttttattctttcttaaaatttctgtctttctgcttacattgcccatctgttcttgcatggtttctactttgtccattagagttcttaggatatttatcataattatttcaaatttctggtgtaacaattccaacatccctgcaacatccaagtctagtttcgatgcttactgtgtctcttccagctgtgttttttcctatttaatatgtcttataattttttcttgatagccatacatgatgcattaggtaacagaaactgctgtgagtggacctttagtaatgtggtggtaaggtgtgcatggaggggaaacattttcagtctgttagtgaacttttgtcaacttcacatgtgcttctcaagtccatcctgtaagtgggagagtagggctagagaggactgaagttgggtatatattaaatactttctcctacaaagaagcctagaggggacgcattaggggattttttttcccccagtattcactgtgatgacccttattgagctcctggaggtaaaactcacaaaactgtggttctcccccctgcccatattactacatgtccctggagtttatatctttcagacttgtctgcactgagcttccaccaatttgtcaaatacagatcaggtttccctaccacccgtgcagttgaaaacccacatacaacttttgactcctccagagcttaactactcatagcctgctattgactggaagccttgccaataacataaacagttgattaatacatattttatatgttttctgtattatatattgtattcttacaataaagagaaaagaagatgttattaagaaaatcataaggaagataaaatatatttactgttcattaagtggttcccatgggtgctggttcccatggaggttgccccttgtgagtttttgctcagggaagttgtgattctctatatttgcctgttggtctcctaatttgggagtcatcagttttccctgtgacctcacttctcttacagagttaagaacagttgttggtttttcagtttgttcagtgttttacatgttgttagaacacagtggtacttctaagtttcttaacatgctagatcagaaacctgaagtctcacctaatttggctttttatattttttcttcttttttttcttccattgctaccaaagcatttttcatctgtgtctggggtgacattagagcagaatgtgatttctaggtaaacattattgggctccctagcagaaaaatttttgaaagtagtacatgaattctgtataattaaaattttcttttcatcttaataggtataggtaataggcacggcctattttttttttgctcaacagtctaaaatagtaatttaatcacctaatagccttagttatatagttgaaagaagagttggaaatctgattcatgggttggaaatcacctgtcacatatgagttttaggcactggtcactttattttgaaacagctttggggttttttcctttttcaactcataataggctttaacagcttttagttttgtttctgtttttttaacagcatgagttgccaaatttggttatagcttcttggtacaagatgggtaaatttgctttgtgttgtgtaattactttttattttaaatgctacctcttttatgaacactaactttacactaagattaggaaaatgagaattgcatgtctgcaacaaatagctatctgtagtattaaattgtgaaaatgtagactttggattggagctggcatctcttaatatgtaattgtaacatagagtaaataagtattttgtcccttgtagggtcaaacagtacagtgcatgggcagaattagagatgtaggcttttttttttttttttttttttactggcttagagaaccgtttgatcagctaatatggaattaagtccctagggctgcccaggcacaacattaactgctattaaaggaaaatttaaaagagtattagtgaaggttaaatactgaccatggacatctggcaaaattgatgttttttttcccctccaccattgtttatagtttattgttatttatcagagaattaatgtttattttcagaatctattaccataagaaatctgtttgaggacttcgtatgtgccaggaattctactaaataatgatataatgctgaacagaattagataggatcctcacttcgttaagcttacagtctagtggtatagatcaacattaatcaaagaataacacaaatagaaagcagagcagtggttcatgggattgactgtagagaagcatgagggaagttcccaggtgatggaaaatactttatttcttaatcgtggtggttacatgtgtgcatatgtttatgaaaatatattgtacatttaaagtggatacattttatcacatgtaaattatgactctataaagttaattaaaaagaataactcaggtaaggtggtgtgtgcgcctgtagtcccagctatttctgaggcaggaagatcacttgagcccaggagtttgagttcagcatgggcaacatgagacctgtgagactttgtctctaaaaaaatttaaataaataactaagataaatgtaaaattacagctgtagtaagttctacaaaggagagttacatgggctatgacgatgtaagatagcaagaactgacattggcagggaggaaatgatgatgagtagaagtaaataagtgaagtgtggggattgatgtcaaggggacagtataaaagaaataacagcatgcgccaaggccctaaaattggaaagtccttggcaaattaaaggagtttgaaaaaggccattgtgtgcaaagcagaaaataggtactacaaggtaaaagatggagctaagcggtaggtaaggctaaaccttgtcagccattgttaaatattgaattgtatcctaagcacaactcagtggaaagcagttaaagttctttaattgggggaggcaatgaaggggtaataaaattggttatagaaatactgctctggctctagtgttgagaatgaattggagtagccagagtagattcaagaagactttagtaagattattccaacaggccaggacctgttatagggtggtggcaatggagagagatggacagaatggagagtgtatttaggaggtaaaaatgacagaacttggtgatgcactgaatgtgaaatggggaaggtgtctaggaggactactaggtttatggtttgcgtattagggtggatgatagcagtttcatttactgagacagggagccctggcagagtacccagcttttagagtgggtagggggaaggggagagtgcatctggtgttgggcattttgaagtgatttacatacaacaaactgaaggtatctttaacactgagtccagcaggttagcatatttattcagcaagcattgcacctttttttgttgtttttggggtcttcaactcctggcctcgaatcctccctccttcccccgcctctcccagcctccgcctcccaaagtgctgggatttcaggagtgagccaccgcgcctggccagcatcgcgctgtttgtgcagtgtgccctgtgctaggtcttgcagtgggtaccagtagagacataaaagtacaaaagataattggacgtttagtagagtcctgaaagggggcgggataggaagatacctaaccataagaaaaaccagcaagagcggaaaaggagctagtcctccagatcaataagttaatcacttatgtttgtgattccctgcattttgggtgattctctgtcgaggtcctcttaagtccagacttttgatataatctgcagtttgcgccatttggattcctgaagcatctttacaagccacctacattccttatggagctgtggcacaacagcaagcccacgatgtctcaccggattaataaaaatataggcgctcacgcttttgtttaccgatatagtatctcctcctcccctcactccatcaacccccacgcgacacaactttccggaagtaagcaaaatccgttatcaaggtgaaactccggggaccaggctccacagctgccataaactggatggcacgttagaagccggtgggtgtaggtgaggcacgctggcgcccgcgggcccttctccagccgctacccagtgggaatccgcggggctgaagccccgaaaccaggctgagcgtcccagagcgcaacctccctttcccccagcagcgccggcgccgcagaagccgcgtgtccccaggcgcactcccccaaggtgaacccccgccccccacggaggcggctgggtcgcgggtctgggcggggcgctccggacgccctcccgccgctgcgcacccctcccgcgagctgccagctccctcggcctctccacccaaaactggcccaaccgccaatcgtctgcctctcacctcctacagcaggtgacccatggccaatcgccaggggtctctttgccaggagccgccagggccagccaatcggggcgacccctccgccggggaggggacgggaaaggggtggggggtgaagggggtgaagggggtgtcccgggggacgggctgaacctcagtcaggaccgcctgcaccgcagtccggggatcgggtcgaggggagaagaaaaaggggtgctcgggagcagcccccggctacctcccctggaggcacagagggcgggggccttggcgaatggctttcttgctggccacttgcggaggtttggattcaggatttgttcctagtgtccaagattttgataagaaacttacagaagctgatgcttacctacaaatcttgattgaacaattaaagctttttgatgacaagcttcaaaactgcaaagaagatgaacagagaaagaaaattgaaactctcaaagagacaacaaatagcatggtagaatcaattaaacactgcattgtgttgctgcagattgccaaagaccagagtaatgcggagaagcacgcagatggaatgataagtactattaatcccgtagatgcaatatatcaacctagtcctttggaacctgtgatcagcacaatgccttcccagactgtgttacctccagaacctgttcagttgtgtaagtcagagcagcgtccatcttccctaccagttggacctgtgttggctaccttgggacatcatcagactcctacaccaaatagtacaggcagtggccattcaccaccgagtagcagtctcacttctccaagccacgtgaacttgtctccaaatacagtcccagagttctcttactccagcagtgaagatgaattttatgatgctgatgaattccatcaaagtggctcatccccaaagcgcttaatagattcttctggatctgcctcagtcctgacacacagcagctcgggaaatagtctaaaacgcccagataccacagaatcacttaattcttccttgtccaatggaacaagtgatgctgacctgtttgattcacatgatgacagagatgatgatgcggaggcagggtctgtggaggagcacaagagcgttatcatgcatctcttgtcgcaggttagacttggaatggatcttactaaggtagttcttccaacgtttattcttgaaagaagatctcttttagaaatgtatgcagacttttttgcacatccggacctgtttgtgagcattagtgaccagaaggatcccaaggatcgaatggttcaggttgtgaaatggtacctctcagcctttcatgcgggaaggaaaggatcagttgccaaaaagccatacaatcccattttgggcgagatttttcagtgtcattggacattaccaaatgatactgaagagaacacagaactagtttcagaaggaccagttccctgggtttccaaaaacagtgtaacatttgtggctgagcaggtttcccatcatccacccatttcagccttttatgctgagtgttttaacaagaagatacaattcaatgctcatatctggaccaaatcaaaattccttgggatgtcaattggggtgcacaacatagggcagggctgtgtctcatgtctagactatgatgaacattacattctcacattccccaatggctatggaaggcaagtgtgtccatttcctctgatcagcagtagactctgctgttccttgagacatgccccttccccctcttcctcttaactgtcaaccttacctaaaaacttttgattttgcaggtctatcctcacagtgccctgggtggaattaggaggagaatgcaatattaattgttccaaaacaggctatagtgcaaatatcatcttccacactaaacccttctatgggggcaagaagcacagaattactgccgagattttttctccaaatgacaagaagtctttttgctcaattgaaggggaatggaatggtgtgatgtatgcaaaatatgcaacaggggaaaatacagtctttgtagataccaagaagttgcctataatcaagaagaaagtgaggaagttggaagatcagaacgagtatgaatcccgcagcctttggaaggatgtcactttcaacttaaaaatcagagacattgatgcagcaactgaagcaaagcacaggcttgaagaaagacaaagagcagaagcccgagaaaggaaggagaaggaaattcagtgggagacaaggttatttcatgaagatggagaatgctgggtttatgatgaaccattactgaaacgtcttggtgctgccaagcattaggttggaagatgcaaagtttatacctgatgatcagggcagtaggcataattcagcaacaaacaatcttcctttgggagaaacctgttcattccaatcttctaattacagtggttcctatctcagggatactggactttctgacgcagatgaacaattaaggggaaaagcttcccttttccctctgtggcagttacgattttgacttcagtcctgagaaaaacttcaggttttgaaaatcagatgatgtcttctccttttccaaacaccacacgttgaaagcatttataaatccaagtctgaaactctgcgctctagtactgctgttaagatacacaacttgtttcttagttcatataatctcgggatacacacacacacacacatatatatacacacacatacgtatacacacacatacatatatataaatatacctgatgccagatttttttcataaatattctgcctactgtaaatatggggnccccgggtggntaaanatngngccggtttaacccggggggaattcggggtaccacacaaaaccattgggaggcaca

SEQ ID NO: 735151 - DNA, 18658 bp, Homo sapiens
gtaagggtctttacatggtttccagatagttcattagttgttgctttctttttttgtctgttttctgttttttttttttaaataactgtggtatgatgtaataggaacttataatttctgagttgcttatttttcctttacagttatagtaaagttatactcatttattttctcctgctttctgcagagtaaaatactgatttttgtctagaaacaagacagtgcaagacaatgttgaaagtgaaattctatgttaaaatatgccagatttattttaagaatttaatatctgtagtcagttatcaatacaaccaaattacataattatgcatgataataggtaaatactgagaagttcacctcattttcttgttaaaggatttggctattaccgtatgtgtcagttagtactcttttgtatggtagtgaaagaaaactcaacccaaactgattcatgaagaagaaagtaaatctggttagatgtggtttgaattaggtaattcatgtcatgaggactcagatctcccatctctatttctacgttccacttttgcattggcttcattttcggttaggttctcccttggtggtggtaaggtggttgtagcaatgtcagcctcccatttttggaaccgagtccataggaggctattctttctagaccttaataggagtaacacaattattgctcatcaccctagctttggccatgtgtcaaatcctgaccagtcacaatttcacagtcatagattctaccctggagctgggatgttactggcctcactagaaacacattgctgatagggtagaaggtgtgttcatcctacccaacccgacccgcaccaaagtcagaatagggaaaaacagatgttgggtgacatgcaactaacgtctgccgtactacactgaagatatttttctatgtttattctccagtgaaagagcttatatttgtggtacataggggattttgttttaatttagaaaatttaattgtagaaaacatgttttataaccctttctctgtactttgttctatatcaggaattgacttgattagataaggtgacatagggtatcttaggccctacaagatagtaaaccccccatcacttgaaagtattcagtagaggcttaaaaaacattattaaaggatgtggttattaggggactttaagaaatgaatatgaaattgaagtaggaaatctttaagctactctgtgagttatgccttttaaaagcaatttgtaattcctgtagatttcttttaaatttaggcagtttcataaatgactatagcatcattttagcaaatttgtgatcctgtaagaggaggataagtgttttttgtttgtttgtttgttttttgtttttttgagacagagtctcactttgtaccccagaaagtaaatctagttagatgtggtttgtctcggctcactgcaacctccaccccgtgcgttctagcaattctcctgcctcagccaccacacctggcctaagaggggaggataagtgttttagtgatcatattagactgaatgtggcagatgagatttcccgcccccccattgttggttagactgacattcaacattcaacaagagccacctgcccttgtaggcatttctgccactatacccctacataaacctagagtgctattgcttacttgctttccttcaaatacattttttcatttgtggcctccacattcttgtgtgtgatgtcctttctctgtgaaatgtcttctaccctttttttcaaagcctagtttagaactgacctcttctatgaaccctctgccgactggcctttccttccccagtcccccaagttcaaaatgatctctttcctttgaatactatagtatttgcacaattcactatctccttatcatattcttcttgtttatttgttatcagctgatgttgacatcataagttcaggttcctaactagatccaatattggaatttttcagcttttgctaagaagagagcttgtatgtctttgggaataatgggcagaaaaagataactttgagaagtcttagacttctaatagctttgatatttaaaagtacatgtaatacaagaggtttttttcctacatttaatgcatggagaagataggacatttagaaatatggaattaatgttcatttgactggcaaaagattattttctcagatgtagtgaagtgtggtaaagaacttcactctagagccagaatgtctgtgtttgtatcccagagcccaccacttacatttaaccattaacattcaacttactgtctctgagtttcagtggcctcatctataaaatgaggataataagagtacctacttcatagagttgttttagtggttaaataaactaacgtaaacttgctagaacttgataaactaatattggatgagaactggttgaaataatgcctggctatagtaaaaacttggtaaatgttagttgccattacaatgcaactactgttcctaccattccctctgccagtgcctggtattcagtagcactcagtaaatgttagttaaatgaagaaataactgaaggaatgaatgaacaaatggttgatgtagagattgcttttccattgttgtttattgaatattttgagatgtataacatactgtctgttaggcactgtgggatgggcactcacggagctgtcttccaaaggggtataggagaggagacgcagtgatctcagcaacctacctttaaaacatatcctagtatctactgccatgttaggttctcttcttttgctttttttaaaaaaaaattctcacaaaactccccccacccacttcagtttatagatgaggaagctcctactacataatagtgcttcccagtctaattcttgacctcattgtatttatatgtcctttttttttttgacagagtctcactcattgcagtggcacaatcacagctcactgcaacctctgcctcccctgctcaagtgatcctcccacctcaacctcctgagtagctgggactacaggcatgcaccaccacgcctggctaatttttgtatttttttgtagagatgcggttttgccatgttggccaggctggtctcgaactcctgggctcaagccatctgcccactttggcctctgagagtgctgagattataggcatgagccaccattcccagccatgttttcctttttcattgaactttatctactttagccattaaactccactccattggtcttgtcattactaagagctgaaccacctgcaaaatattaagttaaaaagcgttttctttgacaacagttttcttttcttcatcttcctctatcactttacttctgaacttttattctctcattttgatctgacccctacttctctgtttttcctggccatttagtactttcttgttttgctcatcccatttcccagtggagaccttctggtctgctgctttatcactggttttgttagaagacatacaaatggcaaggaggtatatgaaaaggtgcctaacatcattgatcatcagagaaatgcagaccaaaactacaatgagatatcatttcaccccagttaaaatggctttttttttttttttccaaaagacaggcaataacaaagtactggtgaggatgtggagtaaagggaacccacatacactattagtaggaatgtaaattagtacagccactgtggagaacagtttgaaggttcctcaaaaaactaaaaatagagctaccatataatccagcaatcccactgctaggtatatatccaaaagaaaggcaatcaatatacggaagagatacctgcacacccaggtttattgcagcactattcacaatagccaagatttggaagcaacccaggtgtccaacagatgaatggataaagaaaacatggtatataaacacaatggaatactattcagctgtgaaaaagaatgaaatcctgtcatttgcaatcctgtcttgaatagaactggaggtcatgatgttaagtgaaataagacaggcacaaacttcacatgttctcacttatttgtgggagctaaaaattaaaacaatcgaactcatggagctagagaatagaattatggttaccagaggctggaagggtggttgggcgtataagtgtagggggagtggggatggttaatgggtacaaaaaaatgagaacgaataagatctacttgataacacaacagggtgactatagtcaacagtaattatacatttaaaaataactagaagagtataattagattgtaacacaaaagataaatgcttgaggtgatggatacctatttaccctgatgtgattattacttatttcatgcctatatcaaaatatttatactccaaaaatatatatacctactatgtacccacaaaaatttaaaaatttatatattgtttttgctatcacctttagaatttcttgtcattggatagttcgtctgtataccattctggtcttcattccccagggcccccgttgtctgatttttctgcttctagaactgttagaggtcacaaaagcaagatggttgtatctatcacaatttttgtctgactttaactgggtatctgttacgatttagtagtcatcttactgacttcttgttggtttccaattgaatcctcacagtagactgttttcattgtaatcagtatcgaattatagcctgttcccttcttcataaatgaaggctttcttcttcaacagttcttagtgacttcacctgtactttatttctctgctttgaatatttcgaagaaaacatattcttgctctttcccaaggttaacactacatacattaccttgaccacaggatgttttcttgcagattgtgacctaattccatcacccttcagcagcccccaccgttttcatggattcagctaaaccttctgtaagatgactctttttccccctaatctttatatctcttttgatatgtagctttagtctcactttttttccttttggattttgccagttagatgtctccctggaattccacttcagcatggctaagactaagcttgtcttctctttcctccccaaagcaaattgtaattaggatagactgaaggtgacagaagataactaagatcttcttcatcctttcggctcttatggaagctgaattccagtagtcattctaaatttgttgtatgtcagcttatggtatcttttcatgtctttacattcagccaaagaggaagttccttgaaggggagaccagagggcgtgctgtgcttcttaatcctctctttcttaaccagtaagaggcattcagtagatatctgatgatactgattaatagaggggaacttttcagattcttttttttttttaaccctagtaagctttagtacaaactaaatgctgagagattatcaagtaagggattgatcatcacaagaagactcaggatgttacatcctgtaggttttatagtttcctatattgtaaaaaatatgagttatagcagcttgtctggatgtcatacaggtataaaaatcagttttataaacttgagtaaattggggcccattttagaaaaaactcttgcaggctgtgaatgccaatatataagtaaagtattaagtataatgttatttaatgtgggcaaacataaagccaggtgtaaattttttaggtttaaaatcttatagaactatacatccaaaagaaaatttcaagttaaacataatacaaagcaatacaatctaaattaacattaatttaatgtgatgaatgatattgccttgctaaaagtgggtcactacttacaatgtgcaaatggtactcatcgttagggtatagattcttttaaactatgacatacgtacactaccatgtggaacgtgatgatgtgttctctgttctaactactgggaagacttccttggcatagcacatgccatggggtcagttggctttgacttcatatagatatgccatttacttggtcagtgtcacttctatgacaagtagtatgttgtgccagtttgattataagtacaaatatgggcaatgaagtaacttggttttaaggttgttactaagctgagtaacagtgtgtggctatacaaatttttataggctatcaggaatgaaaacacaggagattgttgtagattcaagtattttagattcaagtttgaagatgctcatgcagatgtttaactgagttgtatagacctttatgtttctttctttttctctttttttttttttgagacagagtcttgctctgtcacccaagctggagtgcaatggtgtgatctcggcttactgcaacctccgcctcccaggttcaagcaattctcctgcctcagcctcccaagtagctgggattacagatgtgcaccacgacgcccagctgattttttgtattttagtagaggcggggtctcaccatgttgtcaagatggtctcaatctcctgaccttgtgatccacccacctctgcctcccaaagtgctgtgattacaggcgtgagccaccgcgcctgactgacctttatgtttcttaactttatgctatacatcagttgatatttcaaaaatttaaatggtttctatgattattctttgggctaagaaattgggcattaattgtcctcatatgtatggtttttgtggctacttcatgtagattttatttttggtggttatcaaattggaatttttttttttttttttttttttgagacggagtctcattctgtttcccaggttggagtacagtggtgcaatctcagctcactgcagcctcgacctcccaggctcaagcagtcctctcacctcagccttctaagtagctgggactacaggcacgcaccaccacacctggctagttttttgtgtttttagtagagatggggttttaccctgttggccaggctggtcttgaactcctggcctcaagtgatccacctgcctcagcctcccaaagtgctgggattagaggcatgagccaccacacctggctgaaattggaatttcattggtactgcctgtaattttatgttaatttttttttttttttgtcgtcactagcttttatctaaagcccctagagagaaaggccatgataccttgtatacaaggttataagagtatacaagggaaagggagggctgaagggaacagggtgggctggtacaagcctcattagaaataccattgagtctgtgagtaaaacatcattatatgaaaaggagatgtggttttagggtggtccaattacttttgcaccagcctaataaaattacaagtcattatcaatagagacattgtaaaacctttttttttcccaaaagaagtatcaggtatgataattacatgtctgcccaactttcgttatagattaacataacttaattgtatttaaggtacaatttaggagagttgctgaaaaatgaatctttagtattgggatgccttgattctaccctcaatagctataatggattatgtgtctgagtagattaataaaaatcttttgagcatttttcttgaactacttcactgaagattagctttttgagcatccattttaatttctcagtatataaggatcggtttatcacaactgtattgttttccctggccttgttagattatattttcatatcatgtagaaaaataggtgtattcgttctcccttgaagtcctttgtctcccaaaggaaatggttgcaatacagatgtgtcacctcttccacaggtaaagtggaatggagaagtagccagttaaatagtgcatgctcaatttggaacatttagagcatacaggaaagttatttatttggtaaatattttttaagcatttactatgtttcatgcattgtactagttgtagaggatataattgaatacaactacatgtagcccttgactttatggaactagtctagtataaagatttaagattgcctggcatggtggctcacgccactaatcccagcactttgagaggccaaggcaggattgcttgaggccagaagtttaagagtagcttggtcaacataatgagactccatctctaaaataaatagatagatagatagatagatagatagatagatagatagatagaagtagttagacaacacaaagcagtttcactcatcttgtggcaaggagttatgtatttctaatcaaatttggcaactcaagcattttcaacaaaatctacatgttttttcagaataaagtgaccaacacagaatgttacctgtaaaaatcagagcaataattgctatctaaaataattttgaaaattaagtggtactgaaaggctcatatagcaaaaatatggcctcctgtcattgtactttcctacttcccagactcaccattttcaacattttttagtagtttattttgccattttatagcatagtacctgacattttatttattcaacagacatttcttaagtacctaatacatgccattccttgtttgaagggatgctaaggatacagtggtgaacaaggcgttgtggggttgtatagagggtattcattcctaaccttgaaccaaatatttctttctgttggataatgcattaaaaattgcaaacagtttacaaacttttggagcaatggtggccttgatcataaagtagggactgcttctaccgtatacatgcttggtggtgtatttgtgatatctggctaaagtttctacatggaaattgactgactttagttttgagacttctgggaaccagtcaggcaaaatagtgaaactgtgtatcctgtttccaagagttgtcttttaaggttatctgcttcattcatttggcctgacttgctaggcaaatgcctagggtaaatatgatttgattaactataacaacaacagcaacaacaacaactttattttttagagcagtttgaggttcacagcaaaattgagcagaatgtacagagattttccctatacccgcttcccctacgcatgtgcggcctcccctactatcaacatcccccaccagagtggtttgttacaattaatgaacctacattgacacatcattatcactcaaggtccgtagtttacattagagtccactcttggtgttgtgtatgggtttggtcgattttataatgacatttatccaccattatagtgtcatacatagtaattttgctaccctaaaaatccagtgtgctccacctgttcctccttccctcctccctcatccctggcaaccactgaactttttaacatctccatagttttgccttttccagaatgtcatatcattggaatcacacagtatgcagccttttcaaatgggcttctttccgttagtaataggcatttaagtttcatcctcatcttttcatggcttgatagctcatttctttccctccctcttttcttccctgtcttccttccttcctcttctttcctgtttcctctttcttcttccttttttaagagacaaggtgtctcactctgttgcccaggctggagtgcagtggcccaatcatagctcattgcagccttgaattcctgggctcaagtgatcctcctgcgttagcctcctgagtagctgggatcacaggctccagtcattttagtgctgaataatatttcattatctggatgtaccgcctattcattcacctactgaagaatatcttggttgcttctaagttttggcaattatgagtgaagttactataaacattgtatacaagttttatgtggatgtatgttgtcatctcccttgggcagataccaaggagtgccattgttggatcatatggtaaatatatctttagttttgtacagaattctaggttggtatttttttctctctcagtcctttattttatttggagacagtctcgctatgtcgcccaggctgccatacagtggtgccatctgggctcactgaaacctccacctcccaggttcaagcgattcttgtgccttggcctcccaagtagctgggattacaggagtgcgccaccacgcctgctaatttttgtatttttagtagagacagggttttgccatgttgcccaggctggtctcaaactcctgaccttaagtgattcacccacctcaatctcccaaaatcctgggattacaggcctgagctactgtgcctgatctctctcagtactttaaagaaatatttcattccacttttcttttttttcttctttttgagatggagtctcactctgtcgcctgggctggagtgcagtggcgcgatctcagctcactgccacctccgcctcctgggttcaagtgattctcctgcctcagcctcctgaatagctgagattacaggcgcccaccaccatgcccagctaattttttgcatttttagtagagacgggggttccaccatgttggccaggctggtctcgaactcctgacctcgtgattcgcacatctcggcctcccaaattgctgggattacaggtgtgagctaccacgcctggcccactcttcttgcttacatagtttctgaggagatgtcagatgtaatttttatttttgctcttctgtaggcaagttgagttttttccccctctagcttctctcaggatttttttctttatctttgattttcagtagtttgaaaattatatgcctagctgtcagggttttttgcttgtttgtttttgttttctcaggtgtgactccagaaaggttctaaagaggagctttacaatctcttctctggggtttatggagacttcctttacccttctgtgttagccccttaaagcactgcgtcaaccttaaaagggcacaggaaagggtgtctatgccatttttatgccatttatcctgcttggtgttttctgagctttcttcatctgcggtttaatgtctcacattaatttgtagaaattctctgtcattgtttcaaatttttcttcagttcttttctctgtttcttcttctggtgttcccattatgcttttgtggttgtcgtacagttattggatattttgttccaggcttttttttttccagtctttttttccttttgcttctcggttttgtaggtgtctgttgagatactctcaagtgcagatattctttcctcagctttgtctagtttactaataagcccattaaaggcagtcttcatttctgttacagtctttttgatcagtagcatttcttttttattctttcttaaaatttctgtctttctgcttacattgcccatctgttcttgcatggtttctactttgtccattagagttcttaggatatttatcataattatttcaaatttctggtgtaacaattccaacatccctgcaacatccaagtctagtttcgatgcttactgtgtctcttccagctgtgttttttcctatttaatatgtcttataattttttcttgatagccatacatgatgcattaggtaacagaaactgctgtgagtggacctttagtaatgtggtggtaaggtgtgcatggaggggaaacattttcagtctgttagtgaacttttgtcaacttcacatgtgcttctcaagtccatcctgtaagtgggagagtagggctagagaggactgaagttgggtatatattaaatactttctcctacaaagaagcctagaggggacgcattaggggattttttttcccccagtattcactgtgatgacccttattgagctcctggaggtaaaactcacaaaactgtggttctcccccctgcccatattactacatgtccctggagtttatatctttcagacttgtctgcactgagcttccaccaatttgtcaaatacagatcaggtttccctaccacccgtgcagttgaaaacccacatacaacttttgactcctccagagcttaactactcatagcctgctattgactggaagccttgccaataacataaacagttgattaatacatattttatatgttttctgtattatatattgtattcttacaataaagagaaaagaagatgttattaagaaaatcataaggaagataaaatatatttactgttcattaagtggttcccatgggtgctggttcccatggaggttgccccttgtgagtttttgctcagggaagttgtgattctctatatttgcctgttggtctcctaatttgggagtcatcagttttccctgtgacctcacttctcttacagagttaagaacagttgttggtttttcagtttgttcagtgttttacatgttgttagaacacagtggtacttctaagtttcttaacatgctagatcagaaacctgaagtctcacctaatttggctttttatattttttcttcttttttttcttccattgctaccaaagcatttttcatctgtgtctggggtgacattagagcagaatgtgatttctaggtaaacattattgggctccctagcagaaaaatttttgaaagtagtacatgaattctgtataattaaaattttcttttcatcttaataggtataggtaataggcacggcctattttttttttgctcaacagtctaaaatagtaatttaatcacctaatagccttagttatatagttgaaagaagagttggaaatctgattcatgggttggaaatcacctgtcacatatgagttttaggcactggtcactttattttgaaacagctttggggttttttcctttttcaactcataataggctttaacagcttttagttttgtttctgtttttttaacagcatgagttgccaaatttggttatagcttcttggtacaagatgggtaaatttgctttgtgttgtgtaattactttttattttaaatgctacctcttttatgaacactaactttacactaagattaggaaaatgagaattgcatgtctgcaacaaatagctatctgtagtattaaattgtgaaaatgtagactttggattggagctggcatctcttaatatgtaattgtaacatagagtaaataagtattttgtcccttgtagggtcaaacagtacagtgcatgggcagaattagagatgtaggcttttttttttttttttttttttactggcttagagaaccgtttgatcagctaatatggaattaagtccctagggctgcccaggcacaacattaactgctattaaaggaaaatttaaaagagtattagtgaaggttaaatactgaccatggacatctggcaaaattgatgttttttttcccctccaccattgtttatagtttattgttatttatcagagaattaatgtttattttcagaatctattaccataagaaatctgtttgaggacttcgtatgtgccaggaattctactaaataatgatataatgctgaacagaattagataggatcctcacttcgttaagcttacagtctagtggtatagatcaacattaatcaaagaataacacaaatagaaagcagagcagtggttcatgggattgactgtagagaagcatgagggaagttcccaggtgatggaaaatactttatttcttaatcgtggtggttacatgtgtgcatatgtttatgaaaatatattgtacatttaaagtggatacattttatcacatgtaaattatgactctataaagttaattaaaaagaataactcaggtaaggtggtgtgtgcgcctgtagtcccagctatttctgaggcaggaagatcacttgagcccaggagtttgagttcagcatgggcaacatgagacctgtgagactttgtctctaaaaaaatttaaataaataactaagataaatgtaaaattacagctgtagtaagttctacaaaggagagttacatgggctatgacgatgtaagatagcaagaactgacattggcagggaggaaatgatgatgagtagaagtaaataagtgaagtgtggggattgatgtcaaggggacagtataaaagaaataacagcatgcgccaaggccctaaaattggaaagtccttggcaaattaaaggagtttgaaaaaggccattgtgtgcaaagcagaaaataggtactacaaggtaaaagatggagctaagcggtaggtaaggctaaaccttgtcagccattgttaaatattgaattgtatcctaagcacaactcagtggaaagcagttaaagttctttaattgggggaggcaatgaaggggtaataaaattggttatagaaatactgctctggctctagtgttgagaatgaattggagtagccagagtagattcaagaagactttagtaagattattccaacaggccaggacctgttatagggtggtggcaatggagagagatggacagaatggagagtgtatttaggaggtaaaaatgacagaacttggtgatgcactgaatgtgaaatggggaaggtgtctaggaggactactaggtttatggtttgcgtattagggtggatgatagcagtttcatttactgagacagggagccctggcagagtacccagcttttagagtgggtagggggaaggggagagtgcatctggtgttgggcattttgaagtgatttacatacaacaaactgaaggtatctttaacactgagtccagcaggttagcatatttattcagcaagcattgcacctttttttgttgtttttggggtcttcaactcctggcctcgaatcctccctccttcccccgcctctcccagcctccgcctcccaaagtgctgggatttcaggagtgagccaccgcgcctggccagcatcgcgctgtttgtgcagtgtgccctgtgctaggtcttgcagtgggtaccagtagagacataaaagtacaaaagataattggacgtttagtagagtcctgaaagggggcgggataggaagatacctaaccataagaaaaaccagcaagagcggaaaaggagctagtcctccagatcaataagttaatcacttatgtttgtgattccctgcattttgggtgattctctgtcgaggtcctcttaagtccagacttttgatataatctgcagtttgcgccatttggattcctgaagcatctttacaagccacctacattccttatggagctgtggcacaacagcaagcccacgatgtctcaccggattaataaaaatataggcgctcacgcttttgtttaccgatatagtatctcctcctcccctcactccatcaacccccacgcgacacaactttccggaagtaagcaaaatccgttatcaaggtgaaactccggggaccaggctccacagctgccataaactggatggcacgttagaagccggtgggtgtaggtgaggcacgctggcgcccgcgggcccttctccagccgctacccagtgggaatccgcggggctgaagccccgaaaccaggctgagcgtcccagagcgcaacctccctttcccccagcagcgccggcgccgcagaagccgcgtgtccccaggcgcactcccccaaggtgaacccccgccccccacggaggcggctgggtcgcgggtctgggcggggcgctccggacgccctcccgccgctgcgcacccctcccgcgagctgccagctccctcggcctctccacccaaaactggcccaaccgccaatcgtctgcctctcacctcctacagcaggtgacccatggccaatcgccaggggtctctttgccaggagccgccagggccagccaatcggggcgacccctccgccggggaggggacgggaaaggggtggggggtgaagggggtgaagggggtgtcccgggggacgggctgaacctcagtcaggaccgcctgcaccgcagtccggggatcgggtcgaggggagaagaaaaaggggtgctcgggagcagcccccggctacctcccctggaggcacagagggcgggggccttggcgaatggctttcttgctggccacttgcggaggtttggattcaggatttgttcctagtgtccaagattttgataagaaacttacagaagctgatgcttacctacaaatcttgattgaacaattaaagctttttgatgacaagcttcaaaactgcaaagaagatgaacagagaaagaaaattgaaactctcaaagagacaacaaatagcatggtagaatcaattaaacactgcattgtgttgctgcagattgccaaagaccagagtaatgcggagaagcacgcagatggaatgataagtactattaatcccgtagatgcaatatatcaacctagtcctttggaacctgtgatcagcacaatgccttcccagactgtgttacctccagaacctgttcagttgtgtaagtcagagcagcgtccatcttccctaccagttggacctgtgttggctaccttgggacatcatcagactcctacaccaaatagtacaggcagtggccattcaccaccgagtagcagtctcacttctccaagccacgtgaacttgtctccaaatacagtcccagagttctcttactccagcagtgaagatgaattttatgatgctgatgaattccatcaaagtggctcatccccaaagcgcttaatagattcttctggatctgcctcagtcctgacacacagcagctcgggaaatagtctaaaacgcccagataccacagaatcacttaattcttccttgtccaatggaacaagtgatgctgacctgtttgattcacatgatgacagagatgatgatgcggaggcagggtctgtggaggagcacaagagcgttatcatgcatctcttgtcgcaggttagacttggaatggatcttactaaggtagttcttccaacgtttattcttgaaagaagatctcttttagaaatgtatgcagacttttttgcacatccggacctgtttgtgagcattagtgaccagaaggatcccaaggatcgaatggttcaggttgtgaaatggtacctctcagcctttcatgcgggaaggaaaggatcagttgccaaaaagccatacaatcccattttgggcgagatttttcagtgtcattggacattaccaaatgatactgaagagaacacagaactagtttcagaaggaccagttccctgggtttccaaaaacagtgtaacatttgtggctgagcaggtttcccatcatccacccatttcagccttttatgctgagtgttttaacaagaagatacaattcaatgctcatatctggaccaaatcaaaattccttgggatgtcaattggggtgcacaacatagggcagggctgtgtctcatgtctagactatgatgaacattacattctcacattccccaatggctatggaaggtctatcctcacagtgccctgggtggaattaggaggagaatgcaatattaattgttccaaaacaggctatagtgcaaatatcatcttccacactaaacccttctatgggggcaagaagcacagaattactgccgagattttgtaggtattttttctgccttagagctcttatgcttttctgaaataactgccttttgtcttgaactacagcttctggattaggagtgtgaaagaatggttctgtctttgtaagcgtgtttcacattttatgtgtcatgtcttttgctgaagtcccatatcagaagaagacctaaaacatatattcagagcagtcagaggtcattgataggtttccttcctaaaaacctgacttgcaatgttgaactaaaagaggccttcctaggttgcctagctaaaccagattatggatccctaatttattcttgccagattgaatgatgagctggtccttacagcagactttgtgacccctgcagcactgcctcctggtcctcacagctatccctttttctgtgcctttgctggggaaaaacagtaaccatcacattttgcacgcatctggcttgcttccacttgacactcttgggtcacgtgcagatgactgtgccagtcagtggaaagtctatagtgatggcaccatgactctctctgcctctggaacccttaactgggggggaaggggacagtgggaaagaaagtttcaggcgttgatagcagctctcctccctctgccctggtcatgtctcccttttctggcctctttcaatcctgtttatgccttgcccttcctaaccaggcctttgctgtgttgcttatcttctcacattccatagttgtgtgtccaagtagaggtctgttacggcttttgcagaatggatccttgctcagggaaagtattcacaccatctggcacagaggtccctttcaacctgaggatgaaagcctgcattatattcttaagcaaagccttccctgacccccagtgcccatgtaagctcaccacagcacttaccacctagaatttcaatggtggttacgtctctctccactacgctgtgaacagcttgaggatagggaatttgccaactctgttatggtccttgcacccagaataggacgttcttgcccaaacccaccattcttgggatctcaagttcataagcgtcctgttgaaggccctcattcttatagttagccctggggagtccagttctgttaagatgctttcatcaaaaacttcacagttgctcttctgtgctctactctgtagttgggccacactgagcagattctttggtagaattttcaacttgagactaacacaagtatttccttttctgttcag

SEQ ID NO: 735152 - DNA, 19054 bp, Homo sapiens
gtaagggtctttacatggtttccagatagttcattagttgttgctttctttttttgtctgttttctgttttttttttttaaataactgtggtatgatgtaataggaacttataatttctgagttgcttatttttcctttacagttatagtaaagttatactcatttattttctcctgctttctgcagagtaaaatactgatttttgtctagaaacaagacagtgcaagacaatgttgaaagtgaaattctatgttaaaatatgccagatttattttaagaatttaatatctgtagtcagttatcaatacaaccaaattacataattatgcatgataataggtaaatactgagaagttcacctcattttcttgttaaaggatttggctattaccgtatgtgtcagttagtactcttttgtatggtagtgaaagaaaactcaacccaaactgattcatgaagaagaaagtaaatctggttagatgtggtttgaattaggtaattcatgtcatgaggactcagatctcccatctctatttctacgttccacttttgcattggcttcattttcggttaggttctcccttggtggtggtaaggtggttgtagcaatgtcagcctcccatttttggaaccgagtccataggaggctattctttctagaccttaataggagtaacacaattattgctcatcaccctagctttggccatgtgtcaaatcctgaccagtcacaatttcacagtcatagattctaccctggagctgggatgttactggcctcactagaaacacattgctgatagggtagaaggtgtgttcatcctacccaacccgacccgcaccaaagtcagaatagggaaaaacagatgttgggtgacatgcaactaacgtctgccgtactacactgaagatatttttctatgtttattctccagtgaaagagcttatatttgtggtacataggggattttgttttaatttagaaaatttaattgtagaaaacatgttttataaccctttctctgtactttgttctatatcaggaattgacttgattagataaggtgacatagggtatcttaggccctacaagatagtaaaccccccatcacttgaaagtattcagtagaggcttaaaaaacattattaaaggatgtggttattaggggactttaagaaatgaatatgaaattgaagtaggaaatctttaagctactctgtgagttatgccttttaaaagcaatttgtaattcctgtagatttcttttaaatttaggcagtttcataaatgactatagcatcattttagcaaatttgtgatcctgtaagaggaggataagtgttttttgtttgtttgtttgttttttgtttttttgagacagagtctcactttgtaccccagaaagtaaatctagttagatgtggtttgtctcggctcactgcaacctccaccccgtgcgttctagcaattctcctgcctcagccaccacacctggcctaagaggggaggataagtgttttagtgatcatattagactgaatgtggcagatgagatttcccgcccccccattgttggttagactgacattcaacattcaacaagagccacctgcccttgtaggcatttctgccactatacccctacataaacctagagtgctattgcttacttgctttccttcaaatacattttttcatttgtggcctccacattcttgtgtgtgatgtcctttctctgtgaaatgtcttctaccctttttttcaaagcctagtttagaactgacctcttctatgaaccctctgccgactggcctttccttccccagtcccccaagttcaaaatgatctctttcctttgaatactatagtatttgcacaattcactatctccttatcatattcttcttgtttatttgttatcagctgatgttgacatcataagttcaggttcctaactagatccaatattggaatttttcagcttttgctaagaagagagcttgtatgtctttgggaataatgggcagaaaaagataactttgagaagtcttagacttctaatagctttgatatttaaaagtacatgtaatacaagaggtttttttcctacatttaatgcatggagaagataggacatttagaaatatggaattaatgttcatttgactggcaaaagattattttctcagatgtagtgaagtgtggtaaagaacttcactctagagccagaatgtctgtgtttgtatcccagagcccaccacttacatttaaccattaacattcaacttactgtctctgagtttcagtggcctcatctataaaatgaggataataagagtacctacttcatagagttgttttagtggttaaataaactaacgtaaacttgctagaacttgataaactaatattggatgagaactggttgaaataatgcctggctatagtaaaaacttggtaaatgttagttgccattacaatgcaactactgttcctaccattccctctgccagtgcctggtattcagtagcactcagtaaatgttagttaaatgaagaaataactgaaggaatgaatgaacaaatggttgatgtagagattgcttttccattgttgtttattgaatattttgagatgtataacatactgtctgttaggcactgtgggatgggcactcacggagctgtcttccaaaggggtataggagaggagacgcagtgatctcagcaacctacctttaaaacatatcctagtatctactgccatgttaggttctcttcttttgctttttttaaaaaaaaattctcacaaaactccccccacccacttcagtttatagatgaggaagctcctactacataatagtgcttcccagtctaattcttgacctcattgtatttatatgtcctttttttttttgacagagtctcactcattgcagtggcacaatcacagctcactgcaacctctgcctcccctgctcaagtgatcctcccacctcaacctcctgagtagctgggactacaggcatgcaccaccacgcctggctaatttttgtatttttttgtagagatgcggttttgccatgttggccaggctggtctcgaactcctgggctcaagccatctgcccactttggcctctgagagtgctgagattataggcatgagccaccattcccagccatgttttcctttttcattgaactttatctactttagccattaaactccactccattggtcttgtcattactaagagctgaaccacctgcaaaatattaagttaaaaagcgttttctttgacaacagttttcttttcttcatcttcctctatcactttacttctgaacttttattctctcattttgatctgacccctacttctctgtttttcctggccatttagtactttcttgttttgctcatcccatttcccagtggagaccttctggtctgctgctttatcactggttttgttagaagacatacaaatggcaaggaggtatatgaaaaggtgcctaacatcattgatcatcagagaaatgcagaccaaaactacaatgagatatcatttcaccccagttaaaatggctttttttttttttttccaaaagacaggcaataacaaagtactggtgaggatgtggagtaaagggaacccacatacactattagtaggaatgtaaattagtacagccactgtggagaacagtttgaaggttcctcaaaaaactaaaaatagagctaccatataatccagcaatcccactgctaggtatatatccaaaagaaaggcaatcaatatacggaagagatacctgcacacccaggtttattgcagcactattcacaatagccaagatttggaagcaacccaggtgtccaacagatgaatggataaagaaaacatggtatataaacacaatggaatactattcagctgtgaaaaagaatgaaatcctgtcatttgcaatcctgtcttgaatagaactggaggtcatgatgttaagtgaaataagacaggcacaaacttcacatgttctcacttatttgtgggagctaaaaattaaaacaatcgaactcatggagctagagaatagaattatggttaccagaggctggaagggtggttgggcgtataagtgtagggggagtggggatggttaatgggtacaaaaaaatgagaacgaataagatctacttgataacacaacagggtgactatagtcaacagtaattatacatttaaaaataactagaagagtataattagattgtaacacaaaagataaatgcttgaggtgatggatacctatttaccctgatgtgattattacttatttcatgcctatatcaaaatatttatactccaaaaatatatatacctactatgtacccacaaaaatttaaaaatttatatattgtttttgctatcacctttagaatttcttgtcattggatagttcgtctgtataccattctggtcttcattccccagggcccccgttgtctgatttttctgcttctagaactgttagaggtcacaaaagcaagatggttgtatctatcacaatttttgtctgactttaactgggtatctgttacgatttagtagtcatcttactgacttcttgttggtttccaattgaatcctcacagtagactgttttcattgtaatcagtatcgaattatagcctgttcccttcttcataaatgaaggctttcttcttcaacagttcttagtgacttcacctgtactttatttctctgctttgaatatttcgaagaaaacatattcttgctctttcccaaggttaacactacatacattaccttgaccacaggatgttttcttgcagattgtgacctaattccatcacccttcagcagcccccaccgttttcatggattcagctaaaccttctgtaagatgactctttttccccctaatctttatatctcttttgatatgtagctttagtctcactttttttccttttggattttgccagttagatgtctccctggaattccacttcagcatggctaagactaagcttgtcttctctttcctccccaaagcaaattgtaattaggatagactgaaggtgacagaagataactaagatcttcttcatcctttcggctcttatggaagctgaattccagtagtcattctaaatttgttgtatgtcagcttatggtatcttttcatgtctttacattcagccaaagaggaagttccttgaaggggagaccagagggcgtgctgtgcttcttaatcctctctttcttaaccagtaagaggcattcagtagatatctgatgatactgattaatagaggggaacttttcagattcttttttttttttaaccctagtaagctttagtacaaactaaatgctgagagattatcaagtaagggattgatcatcacaagaagactcaggatgttacatcctgtaggttttatagtttcctatattgtaaaaaatatgagttatagcagcttgtctggatgtcatacaggtataaaaatcagttttataaacttgagtaaattggggcccattttagaaaaaactcttgcaggctgtgaatgccaatatataagtaaagtattaagtataatgttatttaatgtgggcaaacataaagccaggtgtaaattttttaggtttaaaatcttatagaactatacatccaaaagaaaatttcaagttaaacataatacaaagcaatacaatctaaattaacattaatttaatgtgatgaatgatattgccttgctaaaagtgggtcactacttacaatgtgcaaatggtactcatcgttagggtatagattcttttaaactatgacatacgtacactaccatgtggaacgtgatgatgtgttctctgttctaactactgggaagacttccttggcatagcacatgccatggggtcagttggctttgacttcatatagatatgccatttacttggtcagtgtcacttctatgacaagtagtatgttgtgccagtttgattataagtacaaatatgggcaatgaagtaacttggttttaaggttgttactaagctgagtaacagtgtgtggctatacaaatttttataggctatcaggaatgaaaacacaggagattgttgtagattcaagtattttagattcaagtttgaagatgctcatgcagatgtttaactgagttgtatagacctttatgtttctttctttttctctttttttttttttgagacagagtcttgctctgtcacccaagctggagtgcaatggtgtgatctcggcttactgcaacctccgcctcccaggttcaagcaattctcctgcctcagcctcccaagtagctgggattacagatgtgcaccacgacgcccagctgattttttgtattttagtagaggcggggtctcaccatgttgtcaagatggtctcaatctcctgaccttgtgatccacccacctctgcctcccaaagtgctgtgattacaggcgtgagccaccgcgcctgactgacctttatgtttcttaactttatgctatacatcagttgatatttcaaaaatttaaatggtttctatgattattctttgggctaagaaattgggcattaattgtcctcatatgtatggtttttgtggctacttcatgtagattttatttttggtggttatcaaattggaatttttttttttttttttttttttgagacggagtctcattctgtttcccaggttggagtacagtggtgcaatctcagctcactgcagcctcgacctcccaggctcaagcagtcctctcacctcagccttctaagtagctgggactacaggcacgcaccaccacacctggctagttttttgtgtttttagtagagatggggttttaccctgttggccaggctggtcttgaactcctggcctcaagtgatccacctgcctcagcctcccaaagtgctgggattagaggcatgagccaccacacctggctgaaattggaatttcattggtactgcctgtaattttatgttaatttttttttttttttgtcgtcactagcttttatctaaagcccctagagagaaaggccatgataccttgtatacaaggttataagagtatacaagggaaagggagggctgaagggaacagggtgggctggtacaagcctcattagaaataccattgagtctgtgagtaaaacatcattatatgaaaaggagatgtggttttagggtggtccaattacttttgcaccagcctaataaaattacaagtcattatcaatagagacattgtaaaacctttttttttcccaaaagaagtatcaggtatgataattacatgtctgcccaactttcgttatagattaacataacttaattgtatttaaggtacaatttaggagagttgctgaaaaatgaatctttagtattgggatgccttgattctaccctcaatagctataatggattatgtgtctgagtagattaataaaaatcttttgagcatttttcttgaactacttcactgaagattagctttttgagcatccattttaatttctcagtatataaggatcggtttatcacaactgtattgttttccctggccttgttagattatattttcatatcatgtagaaaaataggtgtattcgttctcccttgaagtcctttgtctcccaaaggaaatggttgcaatacagatgtgtcacctcttccacaggtaaagtggaatggagaagtagccagttaaatagtgcatgctcaatttggaacatttagagcatacaggaaagttatttatttggtaaatattttttaagcatttactatgtttcatgcattgtactagttgtagaggatataattgaatacaactacatgtagcccttgactttatggaactagtctagtataaagatttaagattgcctggcatggtggctcacgccactaatcccagcactttgagaggccaaggcaggattgcttgaggccagaagtttaagagtagcttggtcaacataatgagactccatctctaaaataaatagatagatagatagatagatagatagatagatagatagatagaagtagttagacaacacaaagcagtttcactcatcttgtggcaaggagttatgtatttctaatcaaatttggcaactcaagcattttcaacaaaatctacatgttttttcagaataaagtgaccaacacagaatgttacctgtaaaaatcagagcaataattgctatctaaaataattttgaaaattaagtggtactgaaaggctcatatagcaaaaatatggcctcctgtcattgtactttcctacttcccagactcaccattttcaacattttttagtagtttattttgccattttatagcatagtacctgacattttatttattcaacagacatttcttaagtacctaatacatgccattccttgtttgaagggatgctaaggatacagtggtgaacaaggcgttgtggggttgtatagagggtattcattcctaaccttgaaccaaatatttctttctgttggataatgcattaaaaattgcaaacagtttacaaacttttggagcaatggtggccttgatcataaagtagggactgcttctaccgtatacatgcttggtggtgtatttgtgatatctggctaaagtttctacatggaaattgactgactttagttttgagacttctgggaaccagtcaggcaaaatagtgaaactgtgtatcctgtttccaagagttgtcttttaaggttatctgcttcattcatttggcctgacttgctaggcaaatgcctagggtaaatatgatttgattaactataacaacaacagcaacaacaacaactttattttttagagcagtttgaggttcacagcaaaattgagcagaatgtacagagattttccctatacccgcttcccctacgcatgtgcggcctcccctactatcaacatcccccaccagagtggtttgttacaattaatgaacctacattgacacatcattatcactcaaggtccgtagtttacattagagtccactcttggtgttgtgtatgggtttggtcgattttataatgacatttatccaccattatagtgtcatacatagtaattttgctaccctaaaaatccagtgtgctccacctgttcctccttccctcctccctcatccctggcaaccactgaactttttaacatctccatagttttgccttttccagaatgtcatatcattggaatcacacagtatgcagccttttcaaatgggcttctttccgttagtaataggcatttaagtttcatcctcatcttttcatggcttgatagctcatttctttccctccctcttttcttccctgtcttccttccttcctcttctttcctgtttcctctttcttcttccttttttaagagacaaggtgtctcactctgttgcccaggctggagtgcagtggcccaatcatagctcattgcagccttgaattcctgggctcaagtgatcctcctgcgttagcctcctgagtagctgggatcacaggctccagtcattttagtgctgaataatatttcattatctggatgtaccgcctattcattcacctactgaagaatatcttggttgcttctaagttttggcaattatgagtgaagttactataaacattgtatacaagttttatgtggatgtatgttgtcatctcccttgggcagataccaaggagtgccattgttggatcatatggtaaatatatctttagttttgtacagaattctaggttggtatttttttctctctcagtcctttattttatttggagacagtctcgctatgtcgcccaggctgccatacagtggtgccatctgggctcactgaaacctccacctcccaggttcaagcgattcttgtgccttggcctcccaagtagctgggattacaggagtgcgccaccacgcctgctaatttttgtatttttagtagagacagggttttgccatgttgcccaggctggtctcaaactcctgaccttaagtgattcacccacctcaatctcccaaaatcctgggattacaggcctgagctactgtgcctgatctctctcagtactttaaagaaatatttcattccacttttcttttttttcttctttttgagatggagtctcactctgtcgcctgggctggagtgcagtggcgcgatctcagctcactgccacctccgcctcctgggttcaagtgattctcctgcctcagcctcctgaatagctgagattacaggcgcccaccaccatgcccagctaattttttgcatttttagtagagacgggggttccaccatgttggccaggctggtctcgaactcctgacctcgtgattcgcacatctcggcctcccaaattgctgggattacaggtgtgagctaccacgcctggcccactcttcttgcttacatagtttctgaggagatgtcagatgtaatttttatttttgctcttctgtaggcaagttgagttttttccccctctagcttctctcaggatttttttctttatctttgattttcagtagtttgaaaattatatgcctagctgtcagggttttttgcttgtttgtttttgttttctcaggtgtgactccagaaaggttctaaagaggagctttacaatctcttctctggggtttatggagacttcctttacccttctgtgttagccccttaaagcactgcgtcaaccttaaaagggcacaggaaagggtgtctatgccatttttatgccatttatcctgcttggtgttttctgagctttcttcatctgcggtttaatgtctcacattaatttgtagaaattctctgtcattgtttcaaatttttcttcagttcttttctctgtttcttcttctggtgttcccattatgcttttgtggttgtcgtacagttattggatattttgttccaggcttttttttttccagtctttttttccttttgcttctcggttttgtaggtgtctgttgagatactctcaagtgcagatattctttcctcagctttgtctagtttactaataagcccattaaaggcagtcttcatttctgttacagtctttttgatcagtagcatttcttttttattctttcttaaaatttctgtctttctgcttacattgcccatctgttcttgcatggtttctactttgtccattagagttcttaggatatttatcataattatttcaaatttctggtgtaacaattccaacatccctgcaacatccaagtctagtttcgatgcttactgtgtctcttccagctgtgttttttcctatttaatatgtcttataattttttcttgatagccatacatgatgcattaggtaacagaaactgctgtgagtggacctttagtaatgtggtggtaaggtgtgcatggaggggaaacattttcagtctgttagtgaacttttgtcaacttcacatgtgcttctcaagtccatcctgtaagtgggagagtagggctagagaggactgaagttgggtatatattaaatactttctcctacaaagaagcctagaggggacgcattaggggattttttttcccccagtattcactgtgatgacccttattgagctcctggaggtaaaactcacaaaactgtggttctcccccctgcccatattactacatgtccctggagtttatatctttcagacttgtctgcactgagcttccaccaatttgtcaaatacagatcaggtttccctaccacccgtgcagttgaaaacccacatacaacttttgactcctccagagcttaactactcatagcctgctattgactggaagccttgccaataacataaacagttgattaatacatattttatatgttttctgtattatatattgtattcttacaataaagagaaaagaagatgttattaagaaaatcataaggaagataaaatatatttactgttcattaagtggttcccatgggtgctggttcccatggaggttgccccttgtgagtttttgctcagggaagttgtgattctctatatttgcctgttggtctcctaatttgggagtcatcagttttccctgtgacctcacttctcttacagagttaagaacagttgttggtttttcagtttgttcagtgttttacatgttgttagaacacagtggtacttctaagtttcttaacatgctagatcagaaacctgaagtctcacctaatttggctttttatattttttcttcttttttttcttccattgctaccaaagcatttttcatctgtgtctggggtgacattagagcagaatgtgatttctaggtaaacattattgggctccctagcagaaaaatttttgaaagtagtacatgaattctgtataattaaaattttcttttcatcttaataggtataggtaataggcacggcctattttttttttgctcaacagtctaaaatagtaatttaatcacctaatagccttagttatatagttgaaagaagagttggaaatctgattcatgggttggaaatcacctgtcacatatgagttttaggcactggtcactttattttgaaacagctttggggttttttcctttttcaactcataataggctttaacagcttttagttttgtttctgtttttttaacagcatgagttgccaaatttggttatagcttcttggtacaagatgggtaaatttgctttgtgttgtgtaattactttttattttaaatgctacctcttttatgaacactaactttacactaagattaggaaaatgagaattgcatgtctgcaacaaatagctatctgtagtattaaattgtgaaaatgtagactttggattggagctggcatctcttaatatgtaattgtaacatagagtaaataagtattttgtcccttgtagggtcaaacagtacagtgcatgggcagaattagagatgtaggcttttttttttttttttttttttactggcttagagaaccgtttgatcagctaatatggaattaagtccctagggctgcccaggcacaacattaactgctattaaaggaaaatttaaaagagtattagtgaaggttaaatactgaccatggacatctggcaaaattgatgttttttttcccctccaccattgtttatagtttattgttatttatcagagaattaatgtttattttcagaatctattaccataagaaatctgtttgaggacttcgtatgtgccaggaattctactaaataatgatataatgctgaacagaattagataggatcctcacttcgttaagcttacagtctagtggtatagatcaacattaatcaaagaataacacaaatagaaagcagagcagtggttcatgggattgactgtagagaagcatgagggaagttcccaggtgatggaaaatactttatttcttaatcgtggtggttacatgtgtgcatatgtttatgaaaatatattgtacatttaaagtggatacattttatcacatgtaaattatgactctataaagttaattaaaaagaataactcaggtaaggtggtgtgtgcgcctgtagtcccagctatttctgaggcaggaagatcacttgagcccaggagtttgagttcagcatgggcaacatgagacctgtgagactttgtctctaaaaaaatttaaataaataactaagataaatgtaaaattacagctgtagtaagttctacaaaggagagttacatgggctatgacgatgtaagatagcaagaactgacattggcagggaggaaatgatgatgagtagaagtaaataagtgaagtgtggggattgatgtcaaggggacagtataaaagaaataacagcatgcgccaaggccctaaaattggaaagtccttggcaaattaaaggagtttgaaaaaggccattgtgtgcaaagcagaaaataggtactacaaggtaaaagatggagctaagcggtaggtaaggctaaaccttgtcagccattgttaaatattgaattgtatcctaagcacaactcagtggaaagcagttaaagttctttaattgggggaggcaatgaaggggtaataaaattggttatagaaatactgctctggctctagtgttgagaatgaattggagtagccagagtagattcaagaagactttagtaagattattccaacaggccaggacctgttatagggtggtggcaatggagagagatggacagaatggagagtgtatttaggaggtaaaaatgacagaacttggtgatgcactgaatgtgaaatggggaaggtgtctaggaggactactaggtttatggtttgcgtattagggtggatgatagcagtttcatttactgagacagggagccctggcagagtacccagcttttagagtgggtagggggaaggggagagtgcatctggtgttgggcattttgaagtgatttacatacaacaaactgaaggtatctttaacactgagtccagcaggttagcatatttattcagcaagcattgcacctttttttgttgtttttggggtcttcaactcctggcctcgaatcctccctccttcccccgcctctcccagcctccgcctcccaaagtgctgggatttcaggagtgagccaccgcgcctggccagcatcgcgctgtttgtgcagtgtgccctgtgctaggtcttgcagtgggtaccagtagagacataaaagtacaaaagataattggacgtttagtagagtcctgaaagggggcgggataggaagatacctaaccataagaaaaaccagcaagagcggaaaaggagctagtcctccagatcaataagttaatcacttatgtttgtgattccctgcattttgggtgattctctgtcgaggtcctcttaagtccagacttttgatataatctgcagtttgcgccatttggattcctgaagcatctttacaagccacctacattccttatggagctgtggcacaacagcaagcccacgatgtctcaccggattaataaaaatataggcgctcacgcttttgtttaccgatatagtatctcctcctcccctcactccatcaacccccacgcgacacaactttccggaagtaagcaaaatccgttatcaaggtgaaactccggggaccaggctccacagctgccataaactggatggcacgttagaagccggtgggtgtaggtgaggcacgctggcgcccgcgggcccttctccagccgctacccagtgggaatccgcggggctgaagccccgaaaccaggctgagcgtcccagagcgcaacctccctttcccccagcagcgccggcgccgcagaagccgcgtgtccccaggcgcactcccccaaggtgaacccccgccccccacggaggcggctgggtcgcgggtctgggcggggcgctccggacgccctcccgccgctgcgcacccctcccgcgagctgccagctccctcggcctctccacccaaaactggcccaaccgccaatcgtctgcctctcacctcctacagcaggtgacccatggccaatcgccaggggtctctttgccaggagccgccagggccagccaatcggggcgacccctccgccggggaggggacgggaaaggggtggggggtgaagggggtgaagggggtgtcccgggggacgggctgaacctcagtcaggaccgcctgcaccgcagtccggggatcgggtcgaggggagaagaaaaaggggtgctcgggagcagcccccggctacctcccctggaggcacagagggcgggggccttggcgaatggctttcttgctggccacttgcggaggtttggattcaggatttgttcctagtgtccaagattttgataagaaacttacagaagctgatgcttacctacaaatcttgattgaacaattaaagctttttgatgacaagcttcaaaactgcaaagaagatgaacagagaaagaaaattgaaactctcaaagagacaacaaatagcatggtagaatcaattaaacactgcattgtgttgctgcagattgccaaagaccagagtaatgcggagaagcacgcagatggaatgataagtactattaatcccgtagatgcaatatatcaacctagtcctttggaacctgtgatcagcacaatgccttcccagactgtgttacctccagaacctgttcagttgtgtaagtcagagcagcgtccatcttccctaccagttggacctgtgttggctaccttgggacatcatcagactcctacaccaaatagtacaggcagtggccattcaccaccgagtagcagtctcacttctccaagccacgtgaacttgtctccaaatacagtcccagagttctcttactccagcagtgaagatgaattttatgatgctgatgaattccatcaaagtggctcatccccaaagcgcttaatagattcttctggatctgcctcagtcctgacacacagcagctcgggaaatagtctaaaacgcccagataccacagaatcacttaattcttccttgtccaatggaacaagtgatgctgacctgtttgattcacatgatgacagagatgatgatgcggaggcagggtctgtggaggagcacaagagcgttatcatgcatctcttgtcgcaggttagacttggaatggatcttactaaggtagttcttccaacgtttattcttgaaagaagatctcttttagaaatgtatgcagacttttttgcacatccggacctgtttgtgagcattagtgaccagaaggatcccaaggatcgaatggttcaggttgtgaaatggtacctctcagcctttcatgcgggaaggaaaggatcagttgccaaaaagccatacaatcccattttgggcgagatttttcagtgtcattggacattaccaaatgatactgaagagaacacagaactagtttcagaaggaccagttccctgggtttccaaaaacagtgtaacatttgtggctgagcaggtttcccatcatccacccatttcagccttttatgctgagtgttttaacaagaagatacaattcaatgctcatatctggaccaaatcaaaattccttgggatgtcaattggggtgcacaacatagggcagggctgtgtctcatgtctagactatgatgaacattacattctcacattccccaatggctatggaaggtctatcctcacagtgccctgggtggaattaggaggagaatgcaatattaattgttccaaaacaggctatagtgcaaatatcatcttccacactaaacccttctatgggggcaagaagcacagaattactgccgagattttttctccaaatgacaagaagtctttttgctcaattgaaggggaatggaatggtgtgatgtatgcaaaatatgcaacaggggaaaatacagtctttgtagataccaagaagttgcctataatcaagaagaaagtgaggaagttggaagatcagaacgagtatgaatcccgcagcctttggaaggatgtcactttcaacttaaaaatcagagacattgatgcagcaactgaagcaaagcacaggcttgaagaaagacaaagagcagaagcccgagaaaggaaggagaaggaaattcagtgggagacaaggttatttcatgaagatggagaatgctgggtttatgatgaaccattactgaaacgtcttggtgctgccaagcattaggttggaagatgcaaagtttatacctgatgatcagggcagtaggcataattcagcaacaaacaatcttcctttgggagaaacctgttcattccaatcttctaattacagtggttcctatctcagggatactggactttctgacgcagatgaacaattaaggggaaaagcttcccttttccctctgtggcagttacgattttgacttcagtcctgagaaaaacttcaggttttgaaaatcagatgatgtcttctccttttccaaacaccacacgttgaaagcatttataaatccaagtctgaaactctgcgctctagtactgctgttaagatacacaacttgtttcttagttcatataatctcgggatacacacacacacacacatatatatacacacacatacgtatacacacacatacatatatataaatatacctgatgccagatttttttcataaatattctgcctactgtaaatatgggttcctctgagttgttttagaaaattagcgcaatgtattaaaatcaagtgttaggaaatttcatggtcttacctacaataacttttattttggaattgaactattattaaattgtatctaatcctggattacagtttaattaattattcttagtgcttaaggcttcataaagtaatttttccaacctttttttaaaaagagcatcttttattatcttttatggttaaacttggaagccaattatttggcaaccttgaatacaagagctagcttttcaaagaaagacacttgaaataatggaggatccattcttttcctctgtcagattgtatgttctgtctttagcccctgccaggcaattccccagaatcttcacttaactcatattgcacatgtagggctgcctaccaacattttatccaaaaatgttttattgccttagagggtttgggaagagtgtgtatttatagatccccaccccacagtgaacaaaaatagatagatagatagaataaaatgaatgccacagcagcagatggctcattctgaagggaaatacagaactatatctatctatctatctatcatcttttttatttaaaaatacattaaaaaaacaggtattagtacctagcatttagttagttattcaatatactggttacgtaaggcctttcaagaagtagattctcagtctgagaggacacaggccagggcttctcaaagtgctgctgcaggctttctggtctcgcttggcc

SEQ ID NO: 735153 - DNA, 19096 bp, Homo sapiens
  misc_feature (19096)..(19096): n is a, c, g, or t
gtaagggtctttacatggtttccagatagttcattagttgttgctttctttttttgtctgttttctgttttttttttttaaataactgtggtatgatgtaataggaacttataatttctgagttgcttatttttcctttacagttatagtaaagttatactcatttattttctcctgctttctgcagagtaaaatactgatttttgtctagaaacaagacagtgcaagacaatgttgaaagtgaaattctatgttaaaatatgccagatttattttaagaatttaatatctgtagtcagttatcaatacaaccaaattacataattatgcatgataataggtaaatactgagaagttcacctcattttcttgttaaaggatttggctattaccgtatgtgtcagttagtactcttttgtatggtagtgaaagaaaactcaacccaaactgattcatgaagaagaaagtaaatctggttagatgtggtttgaattaggtaattcatgtcatgaggactcagatctcccatctctatttctacgttccacttttgcattggcttcattttcggttaggttctcccttggtggtggtaaggtggttgtagcaatgtcagcctcccatttttggaaccgagtccataggaggctattctttctagaccttaataggagtaacacaattattgctcatcaccctagctttggccatgtgtcaaatcctgaccagtcacaatttcacagtcatagattctaccctggagctgggatgttactggcctcactagaaacacattgctgatagggtagaaggtgtgttcatcctacccaacccgacccgcaccaaagtcagaatagggaaaaacagatgttgggtgacatgcaactaacgtctgccgtactacactgaagatatttttctatgtttattctccagtgaaagagcttatatttgtggtacataggggattttgttttaatttagaaaatttaattgtagaaaacatgttttataaccctttctctgtactttgttctatatcaggaattgacttgattagataaggtgacatagggtatcttaggccctacaagatagtaaaccccccatcacttgaaagtattcagtagaggcttaaaaaacattattaaaggatgtggttattaggggactttaagaaatgaatatgaaattgaagtaggaaatctttaagctactctgtgagttatgccttttaaaagcaatttgtaattcctgtagatttcttttaaatttaggcagtttcataaatgactatagcatcattttagcaaatttgtgatcctgtaagaggaggataagtgttttttgtttgtttgtttgttttttgtttttttgagacagagtctcactttgtaccccagaaagtaaatctagttagatgtggtttgtctcggctcactgcaacctccaccccgtgcgttctagcaattctcctgcctcagccaccacacctggcctaagaggggaggataagtgttttagtgatcatattagactgaatgtggcagatgagatttcccgcccccccattgttggttagactgacattcaacattcaacaagagccacctgcccttgtaggcatttctgccactatacccctacataaacctagagtgctattgcttacttgctttccttcaaatacattttttcatttgtggcctccacattcttgtgtgtgatgtcctttctctgtgaaatgtcttctaccctttttttcaaagcctagtttagaactgacctcttctatgaaccctctgccgactggcctttccttccccagtcccccaagttcaaaatgatctctttcctttgaatactatagtatttgcacaattcactatctccttatcatattcttcttgtttatttgttatcagctgatgttgacatcataagttcaggttcctaactagatccaatattggaatttttcagcttttgctaagaagagagcttgtatgtctttgggaataatgggcagaaaaagataactttgagaagtcttagacttctaatagctttgatatttaaaagtacatgtaatacaagaggtttttttcctacatttaatgcatggagaagataggacatttagaaatatggaattaatgttcatttgactggcaaaagattattttctcagatgtagtgaagtgtggtaaagaacttcactctagagccagaatgtctgtgtttgtatcccagagcccaccacttacatttaaccattaacattcaacttactgtctctgagtttcagtggcctcatctataaaatgaggataataagagtacctacttcatagagttgttttagtggttaaataaactaacgtaaacttgctagaacttgataaactaatattggatgagaactggttgaaataatgcctggctatagtaaaaacttggtaaatgttagttgccattacaatgcaactactgttcctaccattccctctgccagtgcctggtattcagtagcactcagtaaatgttagttaaatgaagaaataactgaaggaatgaatgaacaaatggttgatgtagagattgcttttccattgttgtttattgaatattttgagatgtataacatactgtctgttaggcactgtgggatgggcactcacggagctgtcttccaaaggggtataggagaggagacgcagtgatctcagcaacctacctttaaaacatatcctagtatctactgccatgttaggttctcttcttttgctttttttaaaaaaaaattctcacaaaactccccccacccacttcagtttatagatgaggaagctcctactacataatagtgcttcccagtctaattcttgacctcattgtatttatatgtcctttttttttttgacagagtctcactcattgcagtggcacaatcacagctcactgcaacctctgcctcccctgctcaagtgatcctcccacctcaacctcctgagtagctgggactacaggcatgcaccaccacgcctggctaatttttgtatttttttgtagagatgcggttttgccatgttggccaggctggtctcgaactcctgggctcaagccatctgcccactttggcctctgagagtgctgagattataggcatgagccaccattcccagccatgttttcctttttcattgaactttatctactttagccattaaactccactccattggtcttgtcattactaagagctgaaccacctgcaaaatattaagttaaaaagcgttttctttgacaacagttttcttttcttcatcttcctctatcactttacttctgaacttttattctctcattttgatctgacccctacttctctgtttttcctggccatttagtactttcttgttttgctcatcccatttcccagtggagaccttctggtctgctgctttatcactggttttgttagaagacatacaaatggcaaggaggtatatgaaaaggtgcctaacatcattgatcatcagagaaatgcagaccaaaactacaatgagatatcatttcaccccagttaaaatggctttttttttttttttccaaaagacaggcaataacaaagtactggtgaggatgtggagtaaagggaacccacatacactattagtaggaatgtaaattagtacagccactgtggagaacagtttgaaggttcctcaaaaaactaaaaatagagctaccatataatccagcaatcccactgctaggtatatatccaaaagaaaggcaatcaatatacggaagagatacctgcacacccaggtttattgcagcactattcacaatagccaagatttggaagcaacccaggtgtccaacagatgaatggataaagaaaacatggtatataaacacaatggaatactattcagctgtgaaaaagaatgaaatcctgtcatttgcaatcctgtcttgaatagaactggaggtcatgatgttaagtgaaataagacaggcacaaacttcacatgttctcacttatttgtgggagctaaaaattaaaacaatcgaactcatggagctagagaatagaattatggttaccagaggctggaagggtggttgggcgtataagtgtagggggagtggggatggttaatgggtacaaaaaaatgagaacgaataagatctacttgataacacaacagggtgactatagtcaacagtaattatacatttaaaaataactagaagagtataattagattgtaacacaaaagataaatgcttgaggtgatggatacctatttaccctgatgtgattattacttatttcatgcctatatcaaaatatttatactccaaaaatatatatacctactatgtacccacaaaaatttaaaaatttatatattgtttttgctatcacctttagaatttcttgtcattggatagttcgtctgtataccattctggtcttcattccccagggcccccgttgtctgatttttctgcttctagaactgttagaggtcacaaaagcaagatggttgtatctatcacaatttttgtctgactttaactgggtatctgttacgatttagtagtcatcttactgacttcttgttggtttccaattgaatcctcacagtagactgttttcattgtaatcagtatcgaattatagcctgttcccttcttcataaatgaaggctttcttcttcaacagttcttagtgacttcacctgtactttatttctctgctttgaatatttcgaagaaaacatattcttgctctttcccaaggttaacactacatacattaccttgaccacaggatgttttcttgcagattgtgacctaattccatcacccttcagcagcccccaccgttttcatggattcagctaaaccttctgtaagatgactctttttccccctaatctttatatctcttttgatatgtagctttagtctcactttttttccttttggattttgccagttagatgtctccctggaattccacttcagcatggctaagactaagcttgtcttctctttcctccccaaagcaaattgtaattaggatagactgaaggtgacagaagataactaagatcttcttcatcctttcggctcttatggaagctgaattccagtagtcattctaaatttgttgtatgtcagcttatggtatcttttcatgtctttacattcagccaaagaggaagttccttgaaggggagaccagagggcgtgctgtgcttcttaatcctctctttcttaaccagtaagaggcattcagtagatatctgatgatactgattaatagaggggaacttttcagattcttttttttttttaaccctagtaagctttagtacaaactaaatgctgagagattatcaagtaagggattgatcatcacaagaagactcaggatgttacatcctgtaggttttatagtttcctatattgtaaaaaatatgagttatagcagcttgtctggatgtcatacaggtataaaaatcagttttataaacttgagtaaattggggcccattttagaaaaaactcttgcaggctgtgaatgccaatatataagtaaagtattaagtataatgttatttaatgtgggcaaacataaagccaggtgtaaattttttaggtttaaaatcttatagaactatacatccaaaagaaaatttcaagttaaacataatacaaagcaatacaatctaaattaacattaatttaatgtgatgaatgatattgccttgctaaaagtgggtcactacttacaatgtgcaaatggtactcatcgttagggtatagattcttttaaactatgacatacgtacactaccatgtggaacgtgatgatgtgttctctgttctaactactgggaagacttccttggcatagcacatgccatggggtcagttggctttgacttcatatagatatgccatttacttggtcagtgtcacttctatgacaagtagtatgttgtgccagtttgattataagtacaaatatgggcaatgaagtaacttggttttaaggttgttactaagctgagtaacagtgtgtggctatacaaatttttataggctatcaggaatgaaaacacaggagattgttgtagattcaagtattttagattcaagtttgaagatgctcatgcagatgtttaactgagttgtatagacctttatgtttctttctttttctctttttttttttttgagacagagtcttgctctgtcacccaagctggagtgcaatggtgtgatctcggcttactgcaacctccgcctcccaggttcaagcaattctcctgcctcagcctcccaagtagctgggattacagatgtgcaccacgacgcccagctgattttttgtattttagtagaggcggggtctcaccatgttgtcaagatggtctcaatctcctgaccttgtgatccacccacctctgcctcccaaagtgctgtgattacaggcgtgagccaccgcgcctgactgacctttatgtttcttaactttatgctatacatcagttgatatttcaaaaatttaaatggtttctatgattattctttgggctaagaaattgggcattaattgtcctcatatgtatggtttttgtggctacttcatgtagattttatttttggtggttatcaaattggaatttttttttttttttttttttttgagacggagtctcattctgtttcccaggttggagtacagtggtgcaatctcagctcactgcagcctcgacctcccaggctcaagcagtcctctcacctcagccttctaagtagctgggactacaggcacgcaccaccacacctggctagttttttgtgtttttagtagagatggggttttaccctgttggccaggctggtcttgaactcctggcctcaagtgatccacctgcctcagcctcccaaagtgctgggattagaggcatgagccaccacacctggctgaaattggaatttcattggtactgcctgtaattttatgttaatttttttttttttttgtcgtcactagcttttatctaaagcccctagagagaaaggccatgataccttgtatacaaggttataagagtatacaagggaaagggagggctgaagggaacagggtgggctggtacaagcctcattagaaataccattgagtctgtgagtaaaacatcattatatgaaaaggagatgtggttttagggtggtccaattacttttgcaccagcctaataaaattacaagtcattatcaatagagacattgtaaaacctttttttttcccaaaagaagtatcaggtatgataattacatgtctgcccaactttcgttatagattaacataacttaattgtatttaaggtacaatttaggagagttgctgaaaaatgaatctttagtattgggatgccttgattctaccctcaatagctataatggattatgtgtctgagtagattaataaaaatcttttgagcatttttcttgaactacttcactgaagattagctttttgagcatccattttaatttctcagtatataaggatcggtttatcacaactgtattgttttccctggccttgttagattatattttcatatcatgtagaaaaataggtgtattcgttctcccttgaagtcctttgtctcccaaaggaaatggttgcaatacagatgtgtcacctcttccacaggtaaagtggaatggagaagtagccagttaaatagtgcatgctcaatttggaacatttagagcatacaggaaagttatttatttggtaaatattttttaagcatttactatgtttcatgcattgtactagttgtagaggatataattgaatacaactacatgtagcccttgactttatggaactagtctagtataaagatttaagattgcctggcatggtggctcacgccactaatcccagcactttgagaggccaaggcaggattgcttgaggccagaagtttaagagtagcttggtcaacataatgagactccatctctaaaataaatagatagatagatagatagatagatagatagatagatagatagaagtagttagacaacacaaagcagtttcactcatcttgtggcaaggagttatgtatttctaatcaaatttggcaactcaagcattttcaacaaaatctacatgttttttcagaataaagtgaccaacacagaatgttacctgtaaaaatcagagcaataattgctatctaaaataattttgaaaattaagtggtactgaaaggctcatatagcaaaaatatggcctcctgtcattgtactttcctacttcccagactcaccattttcaacattttttagtagtttattttgccattttatagcatagtacctgacattttatttattcaacagacatttcttaagtacctaatacatgccattccttgtttgaagggatgctaaggatacagtggtgaacaaggcgttgtggggttgtatagagggtattcattcctaaccttgaaccaaatatttctttctgttggataatgcattaaaaattgcaaacagtttacaaacttttggagcaatggtggccttgatcataaagtagggactgcttctaccgtatacatgcttggtggtgtatttgtgatatctggctaaagtttctacatggaaattgactgactttagttttgagacttctgggaaccagtcaggcaaaatagtgaaactgtgtatcctgtttccaagagttgtcttttaaggttatctgcttcattcatttggcctgacttgctaggcaaatgcctagggtaaatatgatttgattaactataacaacaacagcaacaacaacaactttattttttagagcagtttgaggttcacagcaaaattgagcagaatgtacagagattttccctatacccgcttcccctacgcatgtgcggcctcccctactatcaacatcccccaccagagtggtttgttacaattaatgaacctacattgacacatcattatcactcaaggtccgtagtttacattagagtccactcttggtgttgtgtatgggtttggtcgattttataatgacatttatccaccattatagtgtcatacatagtaattttgctaccctaaaaatccagtgtgctccacctgttcctccttccctcctccctcatccctggcaaccactgaactttttaacatctccatagttttgccttttccagaatgtcatatcattggaatcacacagtatgcagccttttcaaatgggcttctttccgttagtaataggcatttaagtttcatcctcatcttttcatggcttgatagctcatttctttccctccctcttttcttccctgtcttccttccttcctcttctttcctgtttcctctttcttcttccttttttaagagacaaggtgtctcactctgttgcccaggctggagtgcagtggcccaatcatagctcattgcagccttgaattcctgggctcaagtgatcctcctgcgttagcctcctgagtagctgggatcacaggctccagtcattttagtgctgaataatatttcattatctggatgtaccgcctattcattcacctactgaagaatatcttggttgcttctaagttttggcaattatgagtgaagttactataaacattgtatacaagttttatgtggatgtatgttgtcatctcccttgggcagataccaaggagtgccattgttggatcatatggtaaatatatctttagttttgtacagaattctaggttggtatttttttctctctcagtcctttattttatttggagacagtctcgctatgtcgcccaggctgccatacagtggtgccatctgggctcactgaaacctccacctcccaggttcaagcgattcttgtgccttggcctcccaagtagctgggattacaggagtgcgccaccacgcctgctaatttttgtatttttagtagagacagggttttgccatgttgcccaggctggtctcaaactcctgaccttaagtgattcacccacctcaatctcccaaaatcctgggattacaggcctgagctactgtgcctgatctctctcagtactttaaagaaatatttcattccacttttcttttttttcttctttttgagatggagtctcactctgtcgcctgggctggagtgcagtggcgcgatctcagctcactgccacctccgcctcctgggttcaagtgattctcctgcctcagcctcctgaatagctgagattacaggcgcccaccaccatgcccagctaattttttgcatttttagtagagacgggggttccaccatgttggccaggctggtctcgaactcctgacctcgtgattcgcacatctcggcctcccaaattgctgggattacaggtgtgagctaccacgcctggcccactcttcttgcttacatagtttctgaggagatgtcagatgtaatttttatttttgctcttctgtaggcaagttgagttttttccccctctagcttctctcaggatttttttctttatctttgattttcagtagtttgaaaattatatgcctagctgtcagggttttttgcttgtttgtttttgttttctcaggtgtgactccagaaaggttctaaagaggagctttacaatctcttctctggggtttatggagacttcctttacccttctgtgttagccccttaaagcactgcgtcaaccttaaaagggcacaggaaagggtgtctatgccatttttatgccatttatcctgcttggtgttttctgagctttcttcatctgcggtttaatgtctcacattaatttgtagaaattctctgtcattgtttcaaatttttcttcagttcttttctctgtttcttcttctggtgttcccattatgcttttgtggttgtcgtacagttattggatattttgttccaggcttttttttttccagtctttttttccttttgcttctcggttttgtaggtgtctgttgagatactctcaagtgcagatattctttcctcagctttgtctagtttactaataagcccattaaaggcagtcttcatttctgttacagtctttttgatcagtagcatttcttttttattctttcttaaaatttctgtctttctgcttacattgcccatctgttcttgcatggtttctactttgtccattagagttcttaggatatttatcataattatttcaaatttctggtgtaacaattccaacatccctgcaacatccaagtctagtttcgatgcttactgtgtctcttccagctgtgttttttcctatttaatatgtcttataattttttcttgatagccatacatgatgcattaggtaacagaaactgctgtgagtggacctttagtaatgtggtggtaaggtgtgcatggaggggaaacattttcagtctgttagtgaacttttgtcaacttcacatgtgcttctcaagtccatcctgtaagtgggagagtagggctagagaggactgaagttgggtatatattaaatactttctcctacaaagaagcctagaggggacgcattaggggattttttttcccccagtattcactgtgatgacccttattgagctcctggaggtaaaactcacaaaactgtggttctcccccctgcccatattactacatgtccctggagtttatatctttcagacttgtctgcactgagcttccaccaatttgtcaaatacagatcaggtttccctaccacccgtgcagttgaaaacccacatacaacttttgactcctccagagcttaactactcatagcctgctattgactggaagccttgccaataacataaacagttgattaatacatattttatatgttttctgtattatatattgtattcttacaataaagagaaaagaagatgttattaagaaaatcataaggaagataaaatatatttactgttcattaagtggttcccatgggtgctggttcccatggaggttgccccttgtgagtttttgctcagggaagttgtgattctctatatttgcctgttggtctcctaatttgggagtcatcagttttccctgtgacctcacttctcttacagagttaagaacagttgttggtttttcagtttgttcagtgttttacatgttgttagaacacagtggtacttctaagtttcttaacatgctagatcagaaacctgaagtctcacctaatttggctttttatattttttcttcttttttttcttccattgctaccaaagcatttttcatctgtgtctggggtgacattagagcagaatgtgatttctaggtaaacattattgggctccctagcagaaaaatttttgaaagtagtacatgaattctgtataattaaaattttcttttcatcttaataggtataggtaataggcacggcctattttttttttgctcaacagtctaaaatagtaatttaatcacctaatagccttagttatatagttgaaagaagagttggaaatctgattcatgggttggaaatcacctgtcacatatgagttttaggcactggtcactttattttgaaacagctttggggttttttcctttttcaactcataataggctttaacagcttttagttttgtttctgtttttttaacagcatgagttgccaaatttggttatagcttcttggtacaagatgggtaaatttgctttgtgttgtgtaattactttttattttaaatgctacctcttttatgaacactaactttacactaagattaggaaaatgagaattgcatgtctgcaacaaatagctatctgtagtattaaattgtgaaaatgtagactttggattggagctggcatctcttaatatgtaattgtaacatagagtaaataagtattttgtcccttgtagggtcaaacagtacagtgcatgggcagaattagagatgtaggcttttttttttttttttttttttactggcttagagaaccgtttgatcagctaatatggaattaagtccctagggctgcccaggcacaacattaactgctattaaaggaaaatttaaaagagtattagtgaaggttaaatactgaccatggacatctggcaaaattgatgttttttttcccctccaccattgtttatagtttattgttatttatcagagaattaatgtttattttcagaatctattaccataagaaatctgtttgaggacttcgtatgtgccaggaattctactaaataatgatataatgctgaacagaattagataggatcctcacttcgttaagcttacagtctagtggtatagatcaacattaatcaaagaataacacaaatagaaagcagagcagtggttcatgggattgactgtagagaagcatgagggaagttcccaggtgatggaaaatactttatttcttaatcgtggtggttacatgtgtgcatatgtttatgaaaatatattgtacatttaaagtggatacattttatcacatgtaaattatgactctataaagttaattaaaaagaataactcaggtaaggtggtgtgtgcgcctgtagtcccagctatttctgaggcaggaagatcacttgagcccaggagtttgagttcagcatgggcaacatgagacctgtgagactttgtctctaaaaaaatttaaataaataactaagataaatgtaaaattacagctgtagtaagttctacaaaggagagttacatgggctatgacgatgtaagatagcaagaactgacattggcagggaggaaatgatgatgagtagaagtaaataagtgaagtgtggggattgatgtcaaggggacagtataaaagaaataacagcatgcgccaaggccctaaaattggaaagtccttggcaaattaaaggagtttgaaaaaggccattgtgtgcaaagcagaaaataggtactacaaggtaaaagatggagctaagcggtaggtaaggctaaaccttgtcagccattgttaaatattgaattgtatcctaagcacaactcagtggaaagcagttaaagttctttaattgggggaggcaatgaaggggtaataaaattggttatagaaatactgctctggctctagtgttgagaatgaattggagtagccagagtagattcaagaagactttagtaagattattccaacaggccaggacctgttatagggtggtggcaatggagagagatggacagaatggagagtgtatttaggaggtaaaaatgacagaacttggtgatgcactgaatgtgaaatggggaaggtgtctaggaggactactaggtttatggtttgcgtattagggtggatgatagcagtttcatttactgagacagggagccctggcagagtacccagcttttagagtgggtagggggaaggggagagtgcatctggtgttgggcattttgaagtgatttacatacaacaaactgaaggtatctttaacactgagtccagcaggttagcatatttattcagcaagcattgcacctttttttgttgtttttggggtcttcaactcctggcctcgaatcctccctccttcccccgcctctcccagcctccgcctcccaaagtgctgggatttcaggagtgagccaccgcgcctggccagcatcgcgctgtttgtgcagtgtgccctgtgctaggtcttgcagtgggtaccagtagagacataaaagtacaaaagataattggacgtttagtagagtcctgaaagggggcgggataggaagatacctaaccataagaaaaaccagcaagagcggaaaaggagctagtcctccagatcaataagttaatcacttatgtttgtgattccctgcattttgggtgattctctgtcgaggtcctcttaagtccagacttttgatataatctgcagtttgcgccatttggattcctgaagcatctttacaagccacctacattccttatggagctgtggcacaacagcaagcccacgatgtctcaccggattaataaaaatataggcgctcacgcttttgtttaccgatatagtatctcctcctcccctcactccatcaacccccacgcgacacaactttccggaagtaagcaaaatccgttatcaaggtgaaactccggggaccaggctccacagctgccataaactggatggcacgttagaagccggtgggtgtaggtgaggcacgctggcgcccgcgggcccttctccagccgctacccagtgggaatccgcggggctgaagccccgaaaccaggctgagcgtcccagagcgcaacctccctttcccccagcagcgccggcgccgcagaagccgcgtgtccccaggcgcactcccccaaggtgaacccccgccccccacggaggcggctgggtcgcgggtctgggcggggcgctccggacgccctcccgccgctgcgcacccctcccgcgagctgccagctccctcggcctctccacccaaaactggcccaaccgccaatcgtctgcctctcacctcctacagcaggtgacccatggccaatcgccaggggtctctttgccaggagccgccagggccagccaatcggggcgacccctccgccggggaggggacgggaaaggggtggggggtgaagggggtgaagggggtgtcccgggggacgggctgaacctcagtcaggaccgcctgcaccgcagtccggggatcgggtcgaggggagaagaaaaaggggtgctcgggagcagcccccggctacctcccctggaggcacagagggcgggggccttggcgaatggctttcttgctggccacttgcggaggtttggattcaggatttgttcctagtgtccaagattttgataagaaacttacagaagctgatgcttacctacaaatcttgattgaacaattaaagctttttgatgacaagcttcaaaactgcaaagaagatgaacagagaaagaaaattgaaactctcaaagagacaacaaatagcatggtagaatcaattaaacactgcattgtgttgctgcagattgccaaagaccagagtaatgcggagaagcacgcagatggaatgataagtactattaatcccgtagatgcaatatatcaacctagtcctttggaacctgtgatcagcacaatgccttcccagactgtgttacctccagaacctgttcagttgtgtaagtcagagcagcgtccatcttccctaccagttggacctgtgttggctaccttgggacatcatcagactcctacaccaaatagtacaggcagtggccattcaccaccgagtagcagtctcacttctccaagccacgtgaacttgtctccaaatacagtcccagagttctcttactccagcagtgaagatgaattttatgatgctgatgaattccatcaaagtggctcatccccaaagcgcttaatagattcttctggatctgcctcagtcctgacacacagcagctcgggaaatagtctaaaacgcccagataccacagaatcacttaattcttccttgtccaatggaacaagtgatgctgacctgtttgattcacatgatgacagagatgatgatgcggaggcagggtctgtggaggagcacaagagcgttatcatgcatctcttgtcgcaggttagacttggaatggatcttactaaggtagttcttccaacgtttattcttgaaagaagatctcttttagaaatgtatgcagacttttttgcacatccggacctgtttgtgagcattagtgaccagaaggatcccaaggatcgaatggttcaggttgtgaaatggtacctctcagcctttcatgcgggaaggaaaggatcagttgccaaaaagccatacaatcccattttgggcgagatttttcagtgtcattggacattaccaaatgatactgaagagaacacagaactagtttcagaaggaccagttccctgggtttccaaaaacagtgtaacatttgtggctgagcaggtttcccatcatccacccatttcagccttttatgctgagtgttttaacaagaagatacaattcaatgctcatatctggaccaaatcaaaattccttgggatgtcaattggggtgcacaacatagggcagggctgtgtctcatgtctagactatgatgaacattacattctcacattccccaatggctatggaaggtctatcctcacagtgccctgggtggaattaggaggagaatgcaatattaattgttccaaaacaggctatagtgcaaatatcatcttccacactaaacccttctatgggggcaagaagcacagaattactgccgagattttttctccaaatgacaagaagtctttttgctcaattgaaggggaatggaatggtgtgatgtatgcaaaatatgcaacaggggaaaatacagtctttgtagataccaagaagttgcctataatcaagaagaaagtgaggaagttggaagatcagaacgagtatgaatcccgcagcctttggaaggatgtcactttcaacttaaaaatcagagacattgatgcagcaactgaagcaaagcacaggcttgaagaaagacaaagagcagaagcccgagaaaggaaggagaaggaaattcagtgggagacaaggttatttcatgaagatggagaatgctgggtttatgatgaaccattactgaaacgtcttggtgctgccaagcattaggttggaagatgcaaagtttatacctgatgatcagggcagtaggcataattcagcaacaaacaatcttcctttgggagaaacctgttcattccaatcttctaattacagtggttcctatctcagggatactggactttctgacgcagatgaacaattaaggggaaaagcttcccttttccctctgtggcagttacgattttgacttcagtcctgagaaaaacttcaggttttgaaaatcagatgatgtcttctccttttccaaacaccacacgttgaaagcatttataaatccaagtctgaaactctgcgctctagtactgctgttaagatacacaacttgtttcttagttcatataatctcgggatacacacacacacacacatatatatacacacacatacgtatacacacacatacatatatataaatatacctgatgccagatttttttcataaatattctgcctactgtaaatatgggttcctctgagttgttttagaaaattagcgcaatgtattaaaatcaagtgttaggaaatttcatggtcttacctacaataacttttattttggaattgaactattattaaattgtatctaatcctggaaaaaaaaaaaaaaaaaaaaaaaaaaaaaaaacaaaaaaaagaacaaaataaaaaaaaagaaaacaacaaaaaaaaaaacaacaaaaaacaaaagagagggaggaggcgcaacaagcacaacgaagcactaccccgggagggggcacgccgcacacagaacgccggagcggcacgcccggaccccactatctagaaacgacaaagcgtgtgcccacacaaaacaaaagtaaaaagagcgcagacttatcaatcagacacacgccaagcgacgagacgcggccgcagatcctcaacaaacacagcacactgaatagcaaggtggagagaaacacaacctggtggctgacgcagcgacacacatcctgcgaaggaaaagacgagacactcacactaccatgggagagtggaggagcaaaacaacacacaggcgagaagaacaacaaaaacccagccacaccagcaaacataaacacgccaccatgacaacggcgacaacacaacaacgaccacgtctcaagcccgagtcactaactgagcacagacaacaccgcacacacaactacaatcagccgcggaacaaaggacaactaactacgaacgacaaccgactgatcagagcagagacaaacactcaactccaaccgagggagcgatcaaagaacaaataaggan

SEQ ID NO: 735154 - DNA, 18585 bp, Homo sapiens
gtaagggtctttacatggtttccagatagttcattagttgttgctttctttttttgtctgttttctgttttttttttttaaataactgtggtatgatgtaataggaacttataatttctgagttgcttatttttcctttacagttatagtaaagttatactcatttattttctcctgctttctgcagagtaaaatactgatttttgtctagaaacaagacagtgcaagacaatgttgaaagtgaaattctatgttaaaatatgccagatttattttaagaatttaatatctgtagtcagttatcaatacaaccaaattacataattatgcatgataataggtaaatactgagaagttcacctcattttcttgttaaaggatttggctattaccgtatgtgtcagttagtactcttttgtatggtagtgaaagaaaactcaacccaaactgattcatgaagaagaaagtaaatctggttagatgtggtttgaattaggtaattcatgtcatgaggactcagatctcccatctctatttctacgttccacttttgcattggcttcattttcggttaggttctcccttggtggtggtaaggtggttgtagcaatgtcagcctcccatttttggaaccgagtccataggaggctattctttctagaccttaataggagtaacacaattattgctcatcaccctagctttggccatgtgtcaaatcctgaccagtcacaatttcacagtcatagattctaccctggagctgggatgttactggcctcactagaaacacattgctgatagggtagaaggtgtgttcatcctacccaacccgacccgcaccaaagtcagaatagggaaaaacagatgttgggtgacatgcaactaacgtctgccgtactacactgaagatatttttctatgtttattctccagtgaaagagcttatatttgtggtacataggggattttgttttaatttagaaaatttaattgtagaaaacatgttttataaccctttctctgtactttgttctatatcaggaattgacttgattagataaggtgacatagggtatcttaggccctacaagatagtaaaccccccatcacttgaaagtattcagtagaggcttaaaaaacattattaaaggatgtggttattaggggactttaagaaatgaatatgaaattgaagtaggaaatctttaagctactctgtgagttatgccttttaaaagcaatttgtaattcctgtagatttcttttaaatttaggcagtttcataaatgactatagcatcattttagcaaatttgtgatcctgtaagaggaggataagtgttttttgtttgtttgtttgttttttgtttttttgagacagagtctcactttgtaccccagaaagtaaatctagttagatgtggtttgtctcggctcactgcaacctccaccccgtgcgttctagcaattctcctgcctcagccaccacacctggcctaagaggggaggataagtgttttagtgatcatattagactgaatgtggcagatgagatttcccgcccccccattgttggttagactgacattcaacattcaacaagagccacctgcccttgtaggcatttctgccactatacccctacataaacctagagtgctattgcttacttgctttccttcaaatacattttttcatttgtggcctccacattcttgtgtgtgatgtcctttctctgtgaaatgtcttctaccctttttttcaaagcctagtttagaactgacctcttctatgaaccctctgccgactggcctttccttccccagtcccccaagttcaaaatgatctctttcctttgaatactatagtatttgcacaattcactatctccttatcatattcttcttgtttatttgttatcagctgatgttgacatcataagttcaggttcctaactagatccaatattggaatttttcagcttttgctaagaagagagcttgtatgtctttgggaataatgggcagaaaaagataactttgagaagtcttagacttctaatagctttgatatttaaaagtacatgtaatacaagaggtttttttcctacatttaatgcatggagaagataggacatttagaaatatggaattaatgttcatttgactggcaaaagattattttctcagatgtagtgaagtgtggtaaagaacttcactctagagccagaatgtctgtgtttgtatcccagagcccaccacttacatttaaccattaacattcaacttactgtctctgagtttcagtggcctcatctataaaatgaggataataagagtacctacttcatagagttgttttagtggttaaataaactaacgtaaacttgctagaacttgataaactaatattggatgagaactggttgaaataatgcctggctatagtaaaaacttggtaaatgttagttgccattacaatgcaactactgttcctaccattccctctgccagtgcctggtattcagtagcactcagtaaatgttagttaaatgaagaaataactgaaggaatgaatgaacaaatggttgatgtagagattgcttttccattgttgtttattgaatattttgagatgtataacatactgtctgttaggcactgtgggatgggcactcacggagctgtcttccaaaggggtataggagaggagacgcagtgatctcagcaacctacctttaaaacatatcctagtatctactgccatgttaggttctcttcttttgctttttttaaaaaaaaattctcacaaaactccccccacccacttcagtttatagatgaggaagctcctactacataatagtgcttcccagtctaattcttgacctcattgtatttatatgtcctttttttttttgacagagtctcactcattgcagtggcacaatcacagctcactgcaacctctgcctcccctgctcaagtgatcctcccacctcaacctcctgagtagctgggactacaggcatgcaccaccacgcctggctaatttttgtatttttttgtagagatgcggttttgccatgttggccaggctggtctcgaactcctgggctcaagccatctgcccactttggcctctgagagtgctgagattataggcatgagccaccattcccagccatgttttcctttttcattgaactttatctactttagccattaaactccactccattggtcttgtcattactaagagctgaaccacctgcaaaatattaagttaaaaagcgttttctttgacaacagttttcttttcttcatcttcctctatcactttacttctgaacttttattctctcattttgatctgacccctacttctctgtttttcctggccatttagtactttcttgttttgctcatcccatttcccagtggagaccttctggtctgctgctttatcactggttttgttagaagacatacaaatggcaaggaggtatatgaaaaggtgcctaacatcattgatcatcagagaaatgcagaccaaaactacaatgagatatcatttcaccccagttaaaatggctttttttttttttttccaaaagacaggcaataacaaagtactggtgaggatgtggagtaaagggaacccacatacactattagtaggaatgtaaattagtacagccactgtggagaacagtttgaaggttcctcaaaaaactaaaaatagagctaccatataatccagcaatcccactgctaggtatatatccaaaagaaaggcaatcaatatacggaagagatacctgcacacccaggtttattgcagcactattcacaatagccaagatttggaagcaacccaggtgtccaacagatgaatggataaagaaaacatggtatataaacacaatggaatactattcagctgtgaaaaagaatgaaatcctgtcatttgcaatcctgtcttgaatagaactggaggtcatgatgttaagtgaaataagacaggcacaaacttcacatgttctcacttatttgtgggagctaaaaattaaaacaatcgaactcatggagctagagaatagaattatggttaccagaggctggaagggtggttgggcgtataagtgtagggggagtggggatggttaatgggtacaaaaaaatgagaacgaataagatctacttgataacacaacagggtgactatagtcaacagtaattatacatttaaaaataactagaagagtataattagattgtaacacaaaagataaatgcttgaggtgatggatacctatttaccctgatgtgattattacttatttcatgcctatatcaaaatatttatactccaaaaatatatatacctactatgtacccacaaaaatttaaaaatttatatattgtttttgctatcacctttagaatttcttgtcattggatagttcgtctgtataccattctggtcttcattccccagggcccccgttgtctgatttttctgcttctagaactgttagaggtcacaaaagcaagatggttgtatctatcacaatttttgtctgactttaactgggtatctgttacgatttagtagtcatcttactgacttcttgttggtttccaattgaatcctcacagtagactgttttcattgtaatcagtatcgaattatagcctgttcccttcttcataaatgaaggctttcttcttcaacagttcttagtgacttcacctgtactttatttctctgctttgaatatttcgaagaaaacatattcttgctctttcccaaggttaacactacatacattaccttgaccacaggatgttttcttgcagattgtgacctaattccatcacccttcagcagcccccaccgttttcatggattcagctaaaccttctgtaagatgactctttttccccctaatctttatatctcttttgatatgtagctttagtctcactttttttccttttggattttgccagttagatgtctccctggaattccacttcagcatggctaagactaagcttgtcttctctttcctccccaaagcaaattgtaattaggatagactgaaggtgacagaagataactaagatcttcttcatcctttcggctcttatggaagctgaattccagtagtcattctaaatttgttgtatgtcagcttatggtatcttttcatgtctttacattcagccaaagaggaagttccttgaaggggagaccagagggcgtgctgtgcttcttaatcctctctttcttaaccagtaagaggcattcagtagatatctgatgatactgattaatagaggggaacttttcagattcttttttttttttaaccctagtaagctttagtacaaactaaatgctgagagattatcaagtaagggattgatcatcacaagaagactcaggatgttacatcctgtaggttttatagtttcctatattgtaaaaaatatgagttatagcagcttgtctggatgtcatacaggtataaaaatcagttttataaacttgagtaaattggggcccattttagaaaaaactcttgcaggctgtgaatgccaatatataagtaaagtattaagtataatgttatttaatgtgggcaaacataaagccaggtgtaaattttttaggtttaaaatcttatagaactatacatccaaaagaaaatttcaagttaaacataatacaaagcaatacaatctaaattaacattaatttaatgtgatgaatgatattgccttgctaaaagtgggtcactacttacaatgtgcaaatggtactcatcgttagggtatagattcttttaaactatgacatacgtacactaccatgtggaacgtgatgatgtgttctctgttctaactactgggaagacttccttggcatagcacatgccatggggtcagttggctttgacttcatatagatatgccatttacttggtcagtgtcacttctatgacaagtagtatgttgtgccagtttgattataagtacaaatatgggcaatgaagtaacttggttttaaggttgttactaagctgagtaacagtgtgtggctatacaaatttttataggctatcaggaatgaaaacacaggagattgttgtagattcaagtattttagattcaagtttgaagatgctcatgcagatgtttaactgagttgtatagacctttatgtttctttctttttctctttttttttttttgagacagagtcttgctctgtcacccaagctggagtgcaatggtgtgatctcggcttactgcaacctccgcctcccaggttcaagcaattctcctgcctcagcctcccaagtagctgggattacagatgtgcaccacgacgcccagctgattttttgtattttagtagaggcggggtctcaccatgttgtcaagatggtctcaatctcctgaccttgtgatccacccacctctgcctcccaaagtgctgtgattacaggcgtgagccaccgcgcctgactgacctttatgtttcttaactttatgctatacatcagttgatatttcaaaaatttaaatggtttctatgattattctttgggctaagaaattgggcattaattgtcctcatatgtatggtttttgtggctacttcatgtagattttatttttggtggttatcaaattggaatttttttttttttttttttttttgagacggagtctcattctgtttcccaggttggagtacagtggtgcaatctcagctcactgcagcctcgacctcccaggctcaagcagtcctctcacctcagccttctaagtagctgggactacaggcacgcaccaccacacctggctagttttttgtgtttttagtagagatggggttttaccctgttggccaggctggtcttgaactcctggcctcaagtgatccacctgcctcagcctcccaaagtgctgggattagaggcatgagccaccacacctggctgaaattggaatttcattggtactgcctgtaattttatgttaatttttttttttttttgtcgtcactagcttttatctaaagcccctagagagaaaggccatgataccttgtatacaaggttataagagtatacaagggaaagggagggctgaagggaacagggtgggctggtacaagcctcattagaaataccattgagtctgtgagtaaaacatcattatatgaaaaggagatgtggttttagggtggtccaattacttttgcaccagcctaataaaattacaagtcattatcaatagagacattgtaaaacctttttttttcccaaaagaagtatcaggtatgataattacatgtctgcccaactttcgttatagattaacataacttaattgtatttaaggtacaatttaggagagttgctgaaaaatgaatctttagtattgggatgccttgattctaccctcaatagctataatggattatgtgtctgagtagattaataaaaatcttttgagcatttttcttgaactacttcactgaagattagctttttgagcatccattttaatttctcagtatataaggatcggtttatcacaactgtattgttttccctggccttgttagattatattttcatatcatgtagaaaaataggtgtattcgttctcccttgaagtcctttgtctcccaaaggaaatggttgcaatacagatgtgtcacctcttccacaggtaaagtggaatggagaagtagccagttaaatagtgcatgctcaatttggaacatttagagcatacaggaaagttatttatttggtaaatattttttaagcatttactatgtttcatgcattgtactagttgtagaggatataattgaatacaactacatgtagcccttgactttatggaactagtctagtataaagatttaagattgcctggcatggtggctcacgccactaatcccagcactttgagaggccaaggcaggattgcttgaggccagaagtttaagagtagcttggtcaacataatgagactccatctctaaaataaatagatagatagatagatagatagatagatagatagatagatagaagtagttagacaacacaaagcagtttcactcatcttgtggcaaggagttatgtatttctaatcaaatttggcaactcaagcattttcaacaaaatctacatgttttttcagaataaagtgaccaacacagaatgttacctgtaaaaatcagagcaataattgctatctaaaataattttgaaaattaagtggtactgaaaggctcatatagcaaaaatatggcctcctgtcattgtactttcctacttcccagactcaccattttcaacattttttagtagtttattttgccattttatagcatagtacctgacattttatttattcaacagacatttcttaagtacctaatacatgccattccttgtttgaagggatgctaaggatacagtggtgaacaaggcgttgtggggttgtatagagggtattcattcctaaccttgaaccaaatatttctttctgttggataatgcattaaaaattgcaaacagtttacaaacttttggagcaatggtggccttgatcataaagtagggactgcttctaccgtatacatgcttggtggtgtatttgtgatatctggctaaagtttctacatggaaattgactgactttagttttgagacttctgggaaccagtcaggcaaaatagtgaaactgtgtatcctgtttccaagagttgtcttttaaggttatctgcttcattcatttggcctgacttgctaggcaaatgcctagggtaaatatgatttgattaactataacaacaacagcaacaacaacaactttattttttagagcagtttgaggttcacagcaaaattgagcagaatgtacagagattttccctatacccgcttcccctacgcatgtgcggcctcccctactatcaacatcccccaccagagtggtttgttacaattaatgaacctacattgacacatcattatcactcaaggtccgtagtttacattagagtccactcttggtgttgtgtatgggtttggtcgattttataatgacatttatccaccattatagtgtcatacatagtaattttgctaccctaaaaatccagtgtgctccacctgttcctccttccctcctccctcatccctggcaaccactgaactttttaacatctccatagttttgccttttccagaatgtcatatcattggaatcacacagtatgcagccttttcaaatgggcttctttccgttagtaataggcatttaagtttcatcctcatcttttcatggcttgatagctcatttctttccctccctcttttcttccctgtcttccttccttcctcttctttcctgtttcctctttcttcttccttttttaagagacaaggtgtctcactctgttgcccaggctggagtgcagtggcccaatcatagctcattgcagccttgaattcctgggctcaagtgatcctcctgcgttagcctcctgagtagctgggatcacaggctccagtcattttagtgctgaataatatttcattatctggatgtaccgcctattcattcacctactgaagaatatcttggttgcttctaagttttggcaattatgagtgaagttactataaacattgtatacaagttttatgtggatgtatgttgtcatctcccttgggcagataccaaggagtgccattgttggatcatatggtaaatatatctttagttttgtacagaattctaggttggtatttttttctctctcagtcctttattttatttggagacagtctcgctatgtcgcccaggctgccatacagtggtgccatctgggctcactgaaacctccacctcccaggttcaagcgattcttgtgccttggcctcccaagtagctgggattacaggagtgcgccaccacgcctgctaatttttgtatttttagtagagacagggttttgccatgttgcccaggctggtctcaaactcctgaccttaagtgattcacccacctcaatctcccaaaatcctgggattacaggcctgagctactgtgcctgatctctctcagtactttaaagaaatatttcattccacttttcttttttttcttctttttgagatggagtctcactctgtcgcctgggctggagtgcagtggcgcgatctcagctcactgccacctccgcctcctgggttcaagtgattctcctgcctcagcctcctgaatagctgagattacaggcgcccaccaccatgcccagctaattttttgcatttttagtagagacgggggttccaccatgttggccaggctggtctcgaactcctgacctcgtgattcgcacatctcggcctcccaaattgctgggattacaggtgtgagctaccacgcctggcccactcttcttgcttacatagtttctgaggagatgtcagatgtaatttttatttttgctcttctgtaggcaagttgagttttttccccctctagcttctctcaggatttttttctttatctttgattttcagtagtttgaaaattatatgcctagctgtcagggttttttgcttgtttgtttttgttttctcaggtgtgactccagaaaggttctaaagaggagctttacaatctcttctctggggtttatggagacttcctttacccttctgtgttagccccttaaagcactgcgtcaaccttaaaagggcacaggaaagggtgtctatgccatttttatgccatttatcctgcttggtgttttctgagctttcttcatctgcggtttaatgtctcacattaatttgtagaaattctctgtcattgtttcaaatttttcttcagttcttttctctgtttcttcttctggtgttcccattatgcttttgtggttgtcgtacagttattggatattttgttccaggcttttttttttccagtctttttttccttttgcttctcggttttgtaggtgtctgttgagatactctcaagtgcagatattctttcctcagctttgtctagtttactaataagcccattaaaggcagtcttcatttctgttacagtctttttgatcagtagcatttcttttttattctttcttaaaatttctgtctttctgcttacattgcccatctgttcttgcatggtttctactttgtccattagagttcttaggatatttatcataattatttcaaatttctggtgtaacaattccaacatccctgcaacatccaagtctagtttcgatgcttactgtgtctcttccagctgtgttttttcctatttaatatgtcttataattttttcttgatagccatacatgatgcattaggtaacagaaactgctgtgagtggacctttagtaatgtggtggtaaggtgtgcatggaggggaaacattttcagtctgttagtgaacttttgtcaacttcacatgtgcttctcaagtccatcctgtaagtgggagagtagggctagagaggactgaagttgggtatatattaaatactttctcctacaaagaagcctagaggggacgcattaggggattttttttcccccagtattcactgtgatgacccttattgagctcctggaggtaaaactcacaaaactgtggttctcccccctgcccatattactacatgtccctggagtttatatctttcagacttgtctgcactgagcttccaccaatttgtcaaatacagatcaggtttccctaccacccgtgcagttgaaaacccacatacaacttttgactcctccagagcttaactactcatagcctgctattgactggaagccttgccaataacataaacagttgattaatacatattttatatgttttctgtattatatattgtattcttacaataaagagaaaagaagatgttattaagaaaatcataaggaagataaaatatatttactgttcattaagtggttcccatgggtgctggttcccatggaggttgccccttgtgagtttttgctcagggaagttgtgattctctatatttgcctgttggtctcctaatttgggagtcatcagttttccctgtgacctcacttctcttacagagttaagaacagttgttggtttttcagtttgttcagtgttttacatgttgttagaacacagtggtacttctaagtttcttaacatgctagatcagaaacctgaagtctcacctaatttggctttttatattttttcttcttttttttcttccattgctaccaaagcatttttcatctgtgtctggggtgacattagagcagaatgtgatttctaggtaaacattattgggctccctagcagaaaaatttttgaaagtagtacatgaattctgtataattaaaattttcttttcatcttaataggtataggtaataggcacggcctattttttttttgctcaacagtctaaaatagtaatttaatcacctaatagccttagttatatagttgaaagaagagttggaaatctgattcatgggttggaaatcacctgtcacatatgagttttaggcactggtcactttattttgaaacagctttggggttttttcctttttcaactcataataggctttaacagcttttagttttgtttctgtttttttaacagcatgagttgccaaatttggttatagcttcttggtacaagatgggtaaatttgctttgtgttgtgtaattactttttattttaaatgctacctcttttatgaacactaactttacactaagattaggaaaatgagaattgcatgtctgcaacaaatagctatctgtagtattaaattgtgaaaatgtagactttggattggagctggcatctcttaatatgtaattgtaacatagagtaaataagtattttgtcccttgtagggtcaaacagtacagtgcatgggcagaattagagatgtaggcttttttttttttttttttttttactggcttagagaaccgtttgatcagctaatatggaattaagtccctagggctgcccaggcacaacattaactgctattaaaggaaaatttaaaagagtattagtgaaggttaaatactgaccatggacatctggcaaaattgatgttttttttcccctccaccattgtttatagtttattgttatttatcagagaattaatgtttattttcagaatctattaccataagaaatctgtttgaggacttcgtatgtgccaggaattctactaaataatgatataatgctgaacagaattagataggatcctcacttcgttaagcttacagtctagtggtatagatcaacattaatcaaagaataacacaaatagaaagcagagcagtggttcatgggattgactgtagagaagcatgagggaagttcccaggtgatggaaaatactttatttcttaatcgtggtggttacatgtgtgcatatgtttatgaaaatatattgtacatttaaagtggatacattttatcacatgtaaattatgactctataaagttaattaaaaagaataactcaggtaaggtggtgtgtgcgcctgtagtcccagctatttctgaggcaggaagatcacttgagcccaggagtttgagttcagcatgggcaacatgagacctgtgagactttgtctctaaaaaaatttaaataaataactaagataaatgtaaaattacagctgtagtaagttctacaaaggagagttacatgggctatgacgatgtaagatagcaagaactgacattggcagggaggaaatgatgatgagtagaagtaaataagtgaagtgtggggattgatgtcaaggggacagtataaaagaaataacagcatgcgccaaggccctaaaattggaaagtccttggcaaattaaaggagtttgaaaaaggccattgtgtgcaaagcagaaaataggtactacaaggtaaaagatggagctaagcggtaggtaaggctaaaccttgtcagccattgttaaatattgaattgtatcctaagcacaactcagtggaaagcagttaaagttctttaattgggggaggcaatgaaggggtaataaaattggttatagaaatactgctctggctctagtgttgagaatgaattggagtagccagagtagattcaagaagactttagtaagattattccaacaggccaggacctgttatagggtggtggcaatggagagagatggacagaatggagagtgtatttaggaggtaaaaatgacagaacttggtgatgcactgaatgtgaaatggggaaggtgtctaggaggactactaggtttatggtttgcgtattagggtggatgatagcagtttcatttactgagacagggagccctggcagagtacccagcttttagagtgggtagggggaaggggagagtgcatctggtgttgggcattttgaagtgatttacatacaacaaactgaaggtatctttaacactgagtccagcaggttagcatatttattcagcaagcattgcacctttttttgttgtttttggggtcttcaactcctggcctcgaatcctccctccttcccccgcctctcccagcctccgcctcccaaagtgctgggatttcaggagtgagccaccgcgcctggccagcatcgcgctgtttgtgcagtgtgccctgtgctaggtcttgcagtgggtaccagtagagacataaaagtacaaaagataattggacgtttagtagagtcctgaaagggggcgggataggaagatacctaaccataagaaaaaccagcaagagcggaaaaggagctagtcctccagatcaataagttaatcacttatgtttgtgattccctgcattttgggtgattctctgtcgaggtcctcttaagtccagacttttgatataatctgcagtttgcgccatttggattcctgaagcatctttacaagccacctacattccttatggagctgtggcacaacagcaagcccacgatgtctcaccggattaataaaaatataggcgctcacgcttttgtttaccgatatagtatctcctcctcccctcactccatcaacccccacgcgacacaactttccggaagtaagcaaaatccgttatcaaggtgaaactccggggaccaggctccacagctgccataaactggatggcacgttagaagccggtgggtgtaggtgaggcacgctggcgcccgcgggcccttctccagccgctacccagtgggaatccgcggggctgaagccccgaaaccaggctgagcgtcccagagcgcaacctccctttcccccagcagcgccggcgccgcagaagccgcgtgtccccaggcgcactcccccaaggtgaacccccgccccccacggaggcggctgggtcgcgggtctgggcggggcgctccggacgccctcccgccgctgcgcacccctcccgcgagctgccagctccctcggcctctccacccaaaactggcccaaccgccaatcgtctgcctctcacctcctacagcaggtgacccatggccaatcgccaggggtctctttgccaggagccgccagggccagccaatcggggcgacccctccgccggggaggggacgggaaaggggtggggggtgaagggggtgaagggggtgtcccgggggacgggctgaacctcagtcaggaccgcctgcaccgcagtccggggatcgggtcgaggggagaagaaaaaggggtgctcgggagcagcccccggctacctcccctggaggcacagagggcgggggccttggcgaatggctttcttgctggccacttgcggaggtttggattcaggatttgttcctagtgtccaagattttgataagaaacttacagaagctgatgcttacctacaaatcttgattgaacaattaaagctttttgatgacaagcttcaaaactgcaaagaagatgaacagagaaagaaaattgaaactctcaaagagacaacaaatagcatggtagaatcaattaaacactgcattgtgttgctgcagattgccaaagaccagagtaatgcggagaagcacgcagatggaatgataagtactattaatcccgtagatgcaatatatcaacctagtcctttggaacctgtgatcagcacaatgccttcccagactgtgttacctccagaacctgttcagttgtgtaagtcagagcagcgtccatcttccctaccagttggacctgtgttggctaccttgggacatcatcagactcctacaccaaatagtacaggcagtggccattcaccaccgagtagcagtctcacttctccaagccacgtgaacttgtctccaaatacagtcccagagttctcttactccagcagtgaagatgaattttatgatgctgatgaattccatcaaagtggctcatccccaaagcgcttaatagattcttctggatctgcctcagtcctgacacacagcagctcgggaaatagtctaaaacgcccagataccacagaatcacttaattcttccttgtccaatggaacaagtgatgctgacctgtttgattcacatgatgacagagatgatgatgcggaggcagggtctgtggaggagcacaagagcgttatcatgcatctcttgtcgcaggttagacttggaatggatcttactaaggtagttcttccaacgtttattcttgaaagaagatctcttttagaaatgtatgcagacttttttgcacatccggacctgtttgtgagcattagtgaccagaaggatcccaaggatcgaatggttcaggttgtgaaatggtacctctcagcctttcatgcgggaaggaaaggatcagttgccaaaaagccatacaatcccattttgggcgagatttttcagtgtcattggacattaccaaatgatactgaagagaacacagaactagtttcagaaggaccagttccctgggtttccaaaaacagtgtaacatttgtggctgagcaggtttcccatcatccacccatttcagccttttatgctgagtgttttaacaagaagatacaattcaatgctcatatctggaccaaatcaaaattccttgggatgtcaattggggtgcacaacatagggcagggctgtgtctcatgtctagactatgatgaacattacattctcacattccccaatggctatggaaggtctatcctcacagtgccctgggtggaattaggaggagaatgcaatattaattgttccaaaacaggctatagtgcaaatatcatcttccacactaaacccttctatgggggcaagaagcacagaattactgccgagattttttctccaaatgacaagaagtctttttgctcaattgaaggggaatggaatggtgtgatgtatgcaaaatatgcaacaggggaaaatacagtctttgtagataccaagaagttgcctataatcaagaagaaagtgaggaagttggaagatcagaacgagtatgaatcccgcagcctttggaaggatgtcactttcaacttaaaaatcagagacattgatgcagcaactgaagcaaagcacaggcttgaagaaagacaaagagcagaagcccgagaaaggaaggagaaggaaattcagtgggagacaaggttatttcatgaagatggagaatgctgggtttatgatgaaccattactgaaacgtcttggtgctgccaagcattaggttggaagatgcaaagtttatacctgatgatcagggcagtaggcataattcagcaacaaacaatcttcctttgggagaaacctgttcattccaatcttctaattacagtggttcctatctcagggatactggactttctgacgcagatgaacaattaaggggaaaagcttcccttttccctctgtggcagttacgattttgacttcagtcctgagaaaaacttcaggttttgaaaatcagatgatgtcttctccttttccaaacaccacacgttgaaagcatttataaatccaagtctgaaactctgcgctctagtactgctgttaagatacacaacttgtttcttagttcatataatctcgggatacacacacacacacacatatatatacacacacatacgtatacacacacatacatatatataaatatacctgatgccagatttttttcataaatattctgcctactgtaaatatgggttcctctgagttgttttagaaaattagcgcaatgtattaaaatcaagtgttaggaaatttcatggtcttacctacaataacttttattttggaattgaactattattaaattgtatctaatcctggaaaaaaaacaaaaatgctagtaaaatgataatgtaccgaaattggagaaatattcaattgtaactcacttttaaaaataataaaaccttagggggggtcccggtacaaatttccccttatagagggcggttttaaatttaattggcggcttttaacaacgtt

SEQ ID NO: 735155 - DNA, 18375 bp, Homo sapiens
  misc_feature (18299)..(18299): n is a, c, g, or t
  misc_feature (18310)..(18310): n is a, c, g, or t
  misc_feature (18315)..(18315): n is a, c, g, or t
  misc_feature (18318)..(18318): n is a, c, g, or t
  misc_feature (18320)..(18320): n is a, c, g, or t
gtaagggtctttacatggtttccagatagttcattagttgttgctttctttttttgtctgttttctgttttttttttttaaataactgtggtatgatgtaataggaacttataatttctgagttgcttatttttcctttacagttatagtaaagttatactcatttattttctcctgctttctgcagagtaaaatactgatttttgtctagaaacaagacagtgcaagacaatgttgaaagtgaaattctatgttaaaatatgccagatttattttaagaatttaatatctgtagtcagttatcaatacaaccaaattacataattatgcatgataataggtaaatactgagaagttcacctcattttcttgttaaaggatttggctattaccgtatgtgtcagttagtactcttttgtatggtagtgaaagaaaactcaacccaaactgattcatgaagaagaaagtaaatctggttagatgtggtttgaattaggtaattcatgtcatgaggactcagatctcccatctctatttctacgttccacttttgcattggcttcattttcggttaggttctcccttggtggtggtaaggtggttgtagcaatgtcagcctcccatttttggaaccgagtccataggaggctattctttctagaccttaataggagtaacacaattattgctcatcaccctagctttggccatgtgtcaaatcctgaccagtcacaatttcacagtcatagattctaccctggagctgggatgttactggcctcactagaaacacattgctgatagggtagaaggtgtgttcatcctacccaacccgacccgcaccaaagtcagaatagggaaaaacagatgttgggtgacatgcaactaacgtctgccgtactacactgaagatatttttctatgtttattctccagtgaaagagcttatatttgtggtacataggggattttgttttaatttagaaaatttaattgtagaaaacatgttttataaccctttctctgtactttgttctatatcaggaattgacttgattagataaggtgacatagggtatcttaggccctacaagatagtaaaccccccatcacttgaaagtattcagtagaggcttaaaaaacattattaaaggatgtggttattaggggactttaagaaatgaatatgaaattgaagtaggaaatctttaagctactctgtgagttatgccttttaaaagcaatttgtaattcctgtagatttcttttaaatttaggcagtttcataaatgactatagcatcattttagcaaatttgtgatcctgtaagaggaggataagtgttttttgtttgtttgtttgttttttgtttttttgagacagagtctcactttgtaccccagaaagtaaatctagttagatgtggtttgtctcggctcactgcaacctccaccccgtgcgttctagcaattctcctgcctcagccaccacacctggcctaagaggggaggataagtgttttagtgatcatattagactgaatgtggcagatgagatttcccgcccccccattgttggttagactgacattcaacattcaacaagagccacctgcccttgtaggcatttctgccactatacccctacataaacctagagtgctattgcttacttgctttccttcaaatacattttttcatttgtggcctccacattcttgtgtgtgatgtcctttctctgtgaaatgtcttctaccctttttttcaaagcctagtttagaactgacctcttctatgaaccctctgccgactggcctttccttccccagtcccccaagttcaaaatgatctctttcctttgaatactatagtatttgcacaattcactatctccttatcatattcttcttgtttatttgttatcagctgatgttgacatcataagttcaggttcctaactagatccaatattggaatttttcagcttttgctaagaagagagcttgtatgtctttgggaataatgggcagaaaaagataactttgagaagtcttagacttctaatagctttgatatttaaaagtacatgtaatacaagaggtttttttcctacatttaatgcatggagaagataggacatttagaaatatggaattaatgttcatttgactggcaaaagattattttctcagatgtagtgaagtgtggtaaagaacttcactctagagccagaatgtctgtgtttgtatcccagagcccaccacttacatttaaccattaacattcaacttactgtctctgagtttcagtggcctcatctataaaatgaggataataagagtacctacttcatagagttgttttagtggttaaataaactaacgtaaacttgctagaacttgataaactaatattggatgagaactggttgaaataatgcctggctatagtaaaaacttggtaaatgttagttgccattacaatgcaactactgttcctaccattccctctgccagtgcctggtattcagtagcactcagtaaatgttagttaaatgaagaaataactgaaggaatgaatgaacaaatggttgatgtagagattgcttttccattgttgtttattgaatattttgagatgtataacatactgtctgttaggcactgtgggatgggcactcacggagctgtcttccaaaggggtataggagaggagacgcagtgatctcagcaacctacctttaaaacatatcctagtatctactgccatgttaggttctcttcttttgctttttttaaaaaaaaattctcacaaaactccccccacccacttcagtttatagatgaggaagctcctactacataatagtgcttcccagtctaattcttgacctcattgtatttatatgtcctttttttttttgacagagtctcactcattgcagtggcacaatcacagctcactgcaacctctgcctcccctgctcaagtgatcctcccacctcaacctcctgagtagctgggactacaggcatgcaccaccacgcctggctaatttttgtatttttttgtagagatgcggttttgccatgttggccaggctggtctcgaactcctgggctcaagccatctgcccactttggcctctgagagtgctgagattataggcatgagccaccattcccagccatgttttcctttttcattgaactttatctactttagccattaaactccactccattggtcttgtcattactaagagctgaaccacctgcaaaatattaagttaaaaagcgttttctttgacaacagttttcttttcttcatcttcctctatcactttacttctgaacttttattctctcattttgatctgacccctacttctctgtttttcctggccatttagtactttcttgttttgctcatcccatttcccagtggagaccttctggtctgctgctttatcactggttttgttagaagacatacaaatggcaaggaggtatatgaaaaggtgcctaacatcattgatcatcagagaaatgcagaccaaaactacaatgagatatcatttcaccccagttaaaatggctttttttttttttttccaaaagacaggcaataacaaagtactggtgaggatgtggagtaaagggaacccacatacactattagtaggaatgtaaattagtacagccactgtggagaacagtttgaaggttcctcaaaaaactaaaaatagagctaccatataatccagcaatcccactgctaggtatatatccaaaagaaaggcaatcaatatacggaagagatacctgcacacccaggtttattgcagcactattcacaatagccaagatttggaagcaacccaggtgtccaacagatgaatggataaagaaaacatggtatataaacacaatggaatactattcagctgtgaaaaagaatgaaatcctgtcatttgcaatcctgtcttgaatagaactggaggtcatgatgttaagtgaaataagacaggcacaaacttcacatgttctcacttatttgtgggagctaaaaattaaaacaatcgaactcatggagctagagaatagaattatggttaccagaggctggaagggtggttgggcgtataagtgtagggggagtggggatggttaatgggtacaaaaaaatgagaacgaataagatctacttgataacacaacagggtgactatagtcaacagtaattatacatttaaaaataactagaagagtataattagattgtaacacaaaagataaatgcttgaggtgatggatacctatttaccctgatgtgattattacttatttcatgcctatatcaaaatatttatactccaaaaatatatatacctactatgtacccacaaaaatttaaaaatttatatattgtttttgctatcacctttagaatttcttgtcattggatagttcgtctgtataccattctggtcttcattccccagggcccccgttgtctgatttttctgcttctagaactgttagaggtcacaaaagcaagatggttgtatctatcacaatttttgtctgactttaactgggtatctgttacgatttagtagtcatcttactgacttcttgttggtttccaattgaatcctcacagtagactgttttcattgtaatcagtatcgaattatagcctgttcccttcttcataaatgaaggctttcttcttcaacagttcttagtgacttcacctgtactttatttctctgctttgaatatttcgaagaaaacatattcttgctctttcccaaggttaacactacatacattaccttgaccacaggatgttttcttgcagattgtgacctaattccatcacccttcagcagcccccaccgttttcatggattcagctaaaccttctgtaagatgactctttttccccctaatctttatatctcttttgatatgtagctttagtctcactttttttccttttggattttgccagttagatgtctccctggaattccacttcagcatggctaagactaagcttgtcttctctttcctccccaaagcaaattgtaattaggatagactgaaggtgacagaagataactaagatcttcttcatcctttcggctcttatggaagctgaattccagtagtcattctaaatttgttgtatgtcagcttatggtatcttttcatgtctttacattcagccaaagaggaagttccttgaaggggagaccagagggcgtgctgtgcttcttaatcctctctttcttaaccagtaagaggcattcagtagatatctgatgatactgattaatagaggggaacttttcagattcttttttttttttaaccctagtaagctttagtacaaactaaatgctgagagattatcaagtaagggattgatcatcacaagaagactcaggatgttacatcctgtaggttttatagtttcctatattgtaaaaaatatgagttatagcagcttgtctggatgtcatacaggtataaaaatcagttttataaacttgagtaaattggggcccattttagaaaaaactcttgcaggctgtgaatgccaatatataagtaaagtattaagtataatgttatttaatgtgggcaaacataaagccaggtgtaaattttttaggtttaaaatcttatagaactatacatccaaaagaaaatttcaagttaaacataatacaaagcaatacaatctaaattaacattaatttaatgtgatgaatgatattgccttgctaaaagtgggtcactacttacaatgtgcaaatggtactcatcgttagggtatagattcttttaaactatgacatacgtacactaccatgtggaacgtgatgatgtgttctctgttctaactactgggaagacttccttggcatagcacatgccatggggtcagttggctttgacttcatatagatatgccatttacttggtcagtgtcacttctatgacaagtagtatgttgtgccagtttgattataagtacaaatatgggcaatgaagtaacttggttttaaggttgttactaagctgagtaacagtgtgtggctatacaaatttttataggctatcaggaatgaaaacacaggagattgttgtagattcaagtattttagattcaagtttgaagatgctcatgcagatgtttaactgagttgtatagacctttatgtttctttctttttctctttttttttttttgagacagagtcttgctctgtcacccaagctggagtgcaatggtgtgatctcggcttactgcaacctccgcctcccaggttcaagcaattctcctgcctcagcctcccaagtagctgggattacagatgtgcaccacgacgcccagctgattttttgtattttagtagaggcggggtctcaccatgttgtcaagatggtctcaatctcctgaccttgtgatccacccacctctgcctcccaaagtgctgtgattacaggcgtgagccaccgcgcctgactgacctttatgtttcttaactttatgctatacatcagttgatatttcaaaaatttaaatggtttctatgattattctttgggctaagaaattgggcattaattgtcctcatatgtatggtttttgtggctacttcatgtagattttatttttggtggttatcaaattggaatttttttttttttttttttttttgagacggagtctcattctgtttcccaggttggagtacagtggtgcaatctcagctcactgcagcctcgacctcccaggctcaagcagtcctctcacctcagccttctaagtagctgggactacaggcacgcaccaccacacctggctagttttttgtgtttttagtagagatggggttttaccctgttggccaggctggtcttgaactcctggcctcaagtgatccacctgcctcagcctcccaaagtgctgggattagaggcatgagccaccacacctggctgaaattggaatttcattggtactgcctgtaattttatgttaatttttttttttttttgtcgtcactagcttttatctaaagcccctagagagaaaggccatgataccttgtatacaaggttataagagtatacaagggaaagggagggctgaagggaacagggtgggctggtacaagcctcattagaaataccattgagtctgtgagtaaaacatcattatatgaaaaggagatgtggttttagggtggtccaattacttttgcaccagcctaataaaattacaagtcattatcaatagagacattgtaaaacctttttttttcccaaaagaagtatcaggtatgataattacatgtctgcccaactttcgttatagattaacataacttaattgtatttaaggtacaatttaggagagttgctgaaaaatgaatctttagtattgggatgccttgattctaccctcaatagctataatggattatgtgtctgagtagattaataaaaatcttttgagcatttttcttgaactacttcactgaagattagctttttgagcatccattttaatttctcagtatataaggatcggtttatcacaactgtattgttttccctggccttgttagattatattttcatatcatgtagaaaaataggtgtattcgttctcccttgaagtcctttgtctcccaaaggaaatggttgcaatacagatgtgtcacctcttccacaggtaaagtggaatggagaagtagccagttaaatagtgcatgctcaatttggaacatttagagcatacaggaaagttatttatttggtaaatattttttaagcatttactatgtttcatgcattgtactagttgtagaggatataattgaatacaactacatgtagcccttgactttatggaactagtctagtataaagatttaagattgcctggcatggtggctcacgccactaatcccagcactttgagaggccaaggcaggattgcttgaggccagaagtttaagagtagcttggtcaacataatgagactccatctctaaaataaatagatagatagatagatagatagatagatagatagatagatagaagtagttagacaacacaaagcagtttcactcatcttgtggcaaggagttatgtatttctaatcaaatttggcaactcaagcattttcaacaaaatctacatgttttttcagaataaagtgaccaacacagaatgttacctgtaaaaatcagagcaataattgctatctaaaataattttgaaaattaagtggtactgaaaggctcatatagcaaaaatatggcctcctgtcattgtactttcctacttcccagactcaccattttcaacattttttagtagtttattttgccattttatagcatagtacctgacattttatttattcaacagacatttcttaagtacctaatacatgccattccttgtttgaagggatgctaaggatacagtggtgaacaaggcgttgtggggttgtatagagggtattcattcctaaccttgaaccaaatatttctttctgttggataatgcattaaaaattgcaaacagtttacaaacttttggagcaatggtggccttgatcataaagtagggactgcttctaccgtatacatgcttggtggtgtatttgtgatatctggctaaagtttctacatggaaattgactgactttagttttgagacttctgggaaccagtcaggcaaaatagtgaaactgtgtatcctgtttccaagagttgtcttttaaggttatctgcttcattcatttggcctgacttgctaggcaaatgcctagggtaaatatgatttgattaactataacaacaacagcaacaacaacaactttattttttagagcagtttgaggttcacagcaaaattgagcagaatgtacagagattttccctatacccgcttcccctacgcatgtgcggcctcccctactatcaacatcccccaccagagtggtttgttacaattaatgaacctacattgacacatcattatcactcaaggtccgtagtttacattagagtccactcttggtgttgtgtatgggtttggtcgattttataatgacatttatccaccattatagtgtcatacatagtaattttgctaccctaaaaatccagtgtgctccacctgttcctccttccctcctccctcatccctggcaaccactgaactttttaacatctccatagttttgccttttccagaatgtcatatcattggaatcacacagtatgcagccttttcaaatgggcttctttccgttagtaataggcatttaagtttcatcctcatcttttcatggcttgatagctcatttctttccctccctcttttcttccctgtcttccttccttcctcttctttcctgtttcctctttcttcttccttttttaagagacaaggtgtctcactctgttgcccaggctggagtgcagtggcccaatcatagctcattgcagccttgaattcctgggctcaagtgatcctcctgcgttagcctcctgagtagctgggatcacaggctccagtcattttagtgctgaataatatttcattatctggatgtaccgcctattcattcacctactgaagaatatcttggttgcttctaagttttggcaattatgagtgaagttactataaacattgtatacaagttttatgtggatgtatgttgtcatctcccttgggcagataccaaggagtgccattgttggatcatatggtaaatatatctttagttttgtacagaattctaggttggtatttttttctctctcagtcctttattttatttggagacagtctcgctatgtcgcccaggctgccatacagtggtgccatctgggctcactgaaacctccacctcccaggttcaagcgattcttgtgccttggcctcccaagtagctgggattacaggagtgcgccaccacgcctgctaatttttgtatttttagtagagacagggttttgccatgttgcccaggctggtctcaaactcctgaccttaagtgattcacccacctcaatctcccaaaatcctgggattacaggcctgagctactgtgcctgatctctctcagtactttaaagaaatatttcattccacttttcttttttttcttctttttgagatggagtctcactctgtcgcctgggctggagtgcagtggcgcgatctcagctcactgccacctccgcctcctgggttcaagtgattctcctgcctcagcctcctgaatagctgagattacaggcgcccaccaccatgcccagctaattttttgcatttttagtagagacgggggttccaccatgttggccaggctggtctcgaactcctgacctcgtgattcgcacatctcggcctcccaaattgctgggattacaggtgtgagctaccacgcctggcccactcttcttgcttacatagtttctgaggagatgtcagatgtaatttttatttttgctcttctgtaggcaagttgagttttttccccctctagcttctctcaggatttttttctttatctttgattttcagtagtttgaaaattatatgcctagctgtcagggttttttgcttgtttgtttttgttttctcaggtgtgactccagaaaggttctaaagaggagctttacaatctcttctctggggtttatggagacttcctttacccttctgtgttagccccttaaagcactgcgtcaaccttaaaagggcacaggaaagggtgtctatgccatttttatgccatttatcctgcttggtgttttctgagctttcttcatctgcggtttaatgtctcacattaatttgtagaaattctctgtcattgtttcaaatttttcttcagttcttttctctgtttcttcttctggtgttcccattatgcttttgtggttgtcgtacagttattggatattttgttccaggcttttttttttccagtctttttttccttttgcttctcggttttgtaggtgtctgttgagatactctcaagtgcagatattctttcctcagctttgtctagtttactaataagcccattaaaggcagtcttcatttctgttacagtctttttgatcagtagcatttcttttttattctttcttaaaatttctgtctttctgcttacattgcccatctgttcttgcatggtttctactttgtccattagagttcttaggatatttatcataattatttcaaatttctggtgtaacaattccaacatccctgcaacatccaagtctagtttcgatgcttactgtgtctcttccagctgtgttttttcctatttaatatgtcttataattttttcttgatagccatacatgatgcattaggtaacagaaactgctgtgagtggacctttagtaatgtggtggtaaggtgtgcatggaggggaaacattttcagtctgttagtgaacttttgtcaacttcacatgtgcttctcaagtccatcctgtaagtgggagagtagggctagagaggactgaagttgggtatatattaaatactttctcctacaaagaagcctagaggggacgcattaggggattttttttcccccagtattcactgtgatgacccttattgagctcctggaggtaaaactcacaaaactgtggttctcccccctgcccatattactacatgtccctggagtttatatctttcagacttgtctgcactgagcttccaccaatttgtcaaatacagatcaggtttccctaccacccgtgcagttgaaaacccacatacaacttttgactcctccagagcttaactactcatagcctgctattgactggaagccttgccaataacataaacagttgattaatacatattttatatgttttctgtattatatattgtattcttacaataaagagaaaagaagatgttattaagaaaatcataaggaagataaaatatatttactgttcattaagtggttcccatgggtgctggttcccatggaggttgccccttgtgagtttttgctcagggaagttgtgattctctatatttgcctgttggtctcctaatttgggagtcatcagttttccctgtgacctcacttctcttacagagttaagaacagttgttggtttttcagtttgttcagtgttttacatgttgttagaacacagtggtacttctaagtttcttaacatgctagatcagaaacctgaagtctcacctaatttggctttttatattttttcttcttttttttcttccattgctaccaaagcatttttcatctgtgtctggggtgacattagagcagaatgtgatttctaggtaaacattattgggctccctagcagaaaaatttttgaaagtagtacatgaattctgtataattaaaattttcttttcatcttaataggtataggtaataggcacggcctattttttttttgctcaacagtctaaaatagtaatttaatcacctaatagccttagttatatagttgaaagaagagttggaaatctgattcatgggttggaaatcacctgtcacatatgagttttaggcactggtcactttattttgaaacagctttggggttttttcctttttcaactcataataggctttaacagcttttagttttgtttctgtttttttaacagcatgagttgccaaatttggttatagcttcttggtacaagatgggtaaatttgctttgtgttgtgtaattactttttattttaaatgctacctcttttatgaacactaactttacactaagattaggaaaatgagaattgcatgtctgcaacaaatagctatctgtagtattaaattgtgaaaatgtagactttggattggagctggcatctcttaatatgtaattgtaacatagagtaaataagtattttgtcccttgtagggtcaaacagtacagtgcatgggcagaattagagatgtaggcttttttttttttttttttttttactggcttagagaaccgtttgatcagctaatatggaattaagtccctagggctgcccaggcacaacattaactgctattaaaggaaaatttaaaagagtattagtgaaggttaaatactgaccatggacatctggcaaaattgatgttttttttcccctccaccattgtttatagtttattgttatttatcagagaattaatgtttattttcagaatctattaccataagaaatctgtttgaggacttcgtatgtgccaggaattctactaaataatgatataatgctgaacagaattagataggatcctcacttcgttaagcttacagtctagtggtatagatcaacattaatcaaagaataacacaaatagaaagcagagcagtggttcatgggattgactgtagagaagcatgagggaagttcccaggtgatggaaaatactttatttcttaatcgtggtggttacatgtgtgcatatgtttatgaaaatatattgtacatttaaagtggatacattttatcacatgtaaattatgactctataaagttaattaaaaagaataactcaggtaaggtggtgtgtgcgcctgtagtcccagctatttctgaggcaggaagatcacttgagcccaggagtttgagttcagcatgggcaacatgagacctgtgagactttgtctctaaaaaaatttaaataaataactaagataaatgtaaaattacagctgtagtaagttctacaaaggagagttacatgggctatgacgatgtaagatagcaagaactgacattggcagggaggaaatgatgatgagtagaagtaaataagtgaagtgtggggattgatgtcaaggggacagtataaaagaaataacagcatgcgccaaggccctaaaattggaaagtccttggcaaattaaaggagtttgaaaaaggccattgtgtgcaaagcagaaaataggtactacaaggtaaaagatggagctaagcggtaggtaaggctaaaccttgtcagccattgttaaatattgaattgtatcctaagcacaactcagtggaaagcagttaaagttctttaattgggggaggcaatgaaggggtaataaaattggttatagaaatactgctctggctctagtgttgagaatgaattggagtagccagagtagattcaagaagactttagtaagattattccaacaggccaggacctgttatagggtggtggcaatggagagagatggacagaatggagagtgtatttaggaggtaaaaatgacagaacttggtgatgcactgaatgtgaaatggggaaggtgtctaggaggactactaggtttatggtttgcgtattagggtggatgatagcagtttcatttactgagacagggagccctggcagagtacccagcttttagagtgggtagggggaaggggagagtgcatctggtgttgggcattttgaagtgatttacatacaacaaactgaaggtatctttaacactgagtccagcaggttagcatatttattcagcaagcattgcacctttttttgttgtttttggggtcttcaactcctggcctcgaatcctccctccttcccccgcctctcccagcctccgcctcccaaagtgctgggatttcaggagtgagccaccgcgcctggccagcatcgcgctgtttgtgcagtgtgccctgtgctaggtcttgcagtgggtaccagtagagacataaaagtacaaaagataattggacgtttagtagagtcctgaaagggggcgggataggaagatacctaaccataagaaaaaccagcaagagcggaaaaggagctagtcctccagatcaataagttaatcacttatgtttgtgattccctgcattttgggtgattctctgtcgaggtcctcttaagtccagacttttgatataatctgcagtttgcgccatttggattcctgaagcatctttacaagccacctacattccttatggagctgtggcacaacagcaagcccacgatgtctcaccggattaataaaaatataggcgctcacgcttttgtttaccgatatagtatctcctcctcccctcactccatcaacccccacgcgacacaactttccggaagtaagcaaaatccgttatcaaggtgaaactccggggaccaggctccacagctgccataaactggatggcacgttagaagccggtgggtgtaggtgaggcacgctggcgcccgcgggcccttctccagccgctacccagtgggaatccgcggggctgaagccccgaaaccaggctgagcgtcccagagcgcaacctccctttcccccagcagcgccggcgccgcagaagccgcgtgtccccaggcgcactcccccaaggtgaacccccgccccccacggaggcggctgggtcgcgggtctgggcggggcgctccggacgccctcccgccgctgcgcacccctcccgcgagctgccagctccctcggcctctccacccaaaactggcccaaccgccaatcgtctgcctctcacctcctacagcaggtgacccatggccaatcgccaggggtctctttgccaggagccgccagggccagccaatcggggcgacccctccgccggggaggggacgggaaaggggtggggggtgaagggggtgaagggggtgtcccgggggacgggctgaacctcagtcaggaccgcctgcaccgcagtccggggatcgggtcgaggggagaagaaaaaggggtgctcgggagcagcccccggctacctcccctggaggcacagagggcgggggccttggcgaatggctttcttgctggccacttgcggaggtttggattcaggatttgttcctagtgtccaagattttgataagaaacttacagaagctgatgcttacctacaaatcttgattgaacaattaaagctttttgatgacaagcttcaaaactgcaaagaagatgaacagagaaagaaaattgaaactctcaaagagacaacaaatagcatggtagaatcaattaaacactgcattgtgttgctgcagattgccaaagaccagagtaatgcggagaagcacgcagatggaatgataagtactattaatcccgtagatgcaatatatcaacctagtcctttggaacctgtgatcagcacaatgccttcccagactgtgttacctccagaacctgttcagttgtgtaagtcagagcagcgtccatcttccctaccagttggacctgtgttggctaccttgggacatcatcagactcctacaccaaatagtacaggcagtggccattcaccaccgagtagcagtctcacttctccaagccacgtgaacttgtctccaaatacagtcccagagttctcttactccagcagtgaagatgaattttatgatgctgatgaattccatcaaagtggctcatccccaaagcgcttaatagattcttctggatctgcctcagtcctgacacacagcagctcgggaaatagtctaaaacgcccagataccacagaatcacttaattcttccttgtccaatggaacaagtgatgctgacctgtttgattcacatgatgacagagatgatgatgcggaggcagggtctgtggaggagcacaagagcgttatcatgcatctcttgtcgcaggttagacttggaatggatcttactaaggtagttcttccaacgtttattcttgaaagaagatctcttttagaaatgtatgcagacttttttgcacatccggacctgtttgtgagcattagtgaccagaaggatcccaaggatcgaatggttcaggttgtgaaatggtacctctcagcctttcatgcgggaaggaaaggatcagttgccaaaaagccatacaatcccattttgggcgagatttttcagtgtcattggacattaccaaatgatactgaagagaacacagaactagtttcagaaggaccagttccctgggtttccaaaaacagtgtaacatttgtggctgagcaggtttcccatcatccacccatttcagccttttatgctgagtgttttaacaagaagatacaattcaatgctcatatctggaccaaatcaaaattccttgggatgtcaattggggtgcacaacatagggcagggctgtgtctcatgtctagactatgatgaacattacattctcacattccccaatggctatggaaggtctatcctcacagtgccctgggtggaattaggaggagaatgcaatattaattgttccaaaacaggctatagtgcaaatatcatcttccacactaaacccttctatgggggcaagaagcacagaattactgccgagattttttctccaaatgacaagaagtctttttgctcaattgaaggggaatggaatggtgtgatgtatgcaaaatatgcaacaggggaaaatacagtctttgtagataccaagaagttgcctataatcaagaagaaagtgaggaagttggaagatcagaacgagtatgaatcccgcagcctttggaaggatgtcactttcaacttaaaaatcagagacattgatgcagcaactgaagcaaagcacaggcttgaagaaagacaaagagcagaagcccgagaaaggaaggagaaggaaattcagtgggagacaaggttatttcatgaagatggagaatgctgggtttatgatgaaccattactgaaacgtcttggtgctgccaagcattaggttggaagatgcaaagtttatacctgatgatcagggcagtaggcataattcagcaacaaacaatcttcctttgggagaaacctgttcattccaatcttctaattacagtggttcctatctcagggatactggactttctgacgcagatgaacaattaaggggaaaagcttcccttttccctctgtggcagttacgattttgacttcagtcctgagaaaaacttcaggttttgaaaatcagatgatgtcttctccttttccaaacaccacacgttgaaagcatttataaatccaagtctgaaactctgcgctctagtactgctgttaagatacacaacttgtttcttagttcatataatctcgggatacacacacacacacacatatatatacacacacatacgtatacacacacatacatatatataaatatacctgatgccagatttttttcataaatattctgcctactgtaaatatggggnccccgggtggntaaanatngngccggtttaacccggggggaattcggggtaccacacaaaaccattgggaggcaca

SEQ ID NO: 735156 - DNA, 17194 bp, Homo sapiens
gtaagggtctttacatggtttccagatagttcattagttgttgctttctttttttgtctgttttctgttttttttttttaaataactgtggtatgatgtaataggaacttataatttctgagttgcttatttttcctttacagttatagtaaagttatactcatttattttctcctgctttctgcagagtaaaatactgatttttgtctagaaacaagacagtgcaagacaatgttgaaagtgaaattctatgttaaaatatgccagatttattttaagaatttaatatctgtagtcagttatcaatacaaccaaattacataattatgcatgataataggtaaatactgagaagttcacctcattttcttgttaaaggatttggctattaccgtatgtgtcagttagtactcttttgtatggtagtgaaagaaaactcaacccaaactgattcatgaagaagaaagtaaatctggttagatgtggtttgaattaggtaattcatgtcatgaggactcagatctcccatctctatttctacgttccacttttgcattggcttcattttcggttaggttctcccttggtggtggtaaggtggttgtagcaatgtcagcctcccatttttggaaccgagtccataggaggctattctttctagaccttaataggagtaacacaattattgctcatcaccctagctttggccatgtgtcaaatcctgaccagtcacaatttcacagtcatagattctaccctggagctgggatgttactggcctcactagaaacacattgctgatagggtagaaggtgtgttcatcctacccaacccgacccgcaccaaagtcagaatagggaaaaacagatgttgggtgacatgcaactaacgtctgccgtactacactgaagatatttttctatgtttattctccagtgaaagagcttatatttgtggtacataggggattttgttttaatttagaaaatttaattgtagaaaacatgttttataaccctttctctgtactttgttctatatcaggaattgacttgattagataaggtgacatagggtatcttaggccctacaagatagtaaaccccccatcacttgaaagtattcagtagaggcttaaaaaacattattaaaggatgtggttattaggggactttaagaaatgaatatgaaattgaagtaggaaatctttaagctactctgtgagttatgccttttaaaagcaatttgtaattcctgtagatttcttttaaatttaggcagtttcataaatgactatagcatcattttagcaaatttgtgatcctgtaagaggaggataagtgttttttgtttgtttgtttgttttttgtttttttgagacagagtctcactttgtaccccagaaagtaaatctagttagatgtggtttgtctcggctcactgcaacctccaccccgtgcgttctagcaattctcctgcctcagccaccacacctggcctaagaggggaggataagtgttttagtgatcatattagactgaatgtggcagatgagatttcccgcccccccattgttggttagactgacattcaacattcaacaagagccacctgcccttgtaggcatttctgccactatacccctacataaacctagagtgctattgcttacttgctttccttcaaatacattttttcatttgtggcctccacattcttgtgtgtgatgtcctttctctgtgaaatgtcttctaccctttttttcaaagcctagtttagaactgacctcttctatgaaccctctgccgactggcctttccttccccagtcccccaagttcaaaatgatctctttcctttgaatactatagtatttgcacaattcactatctccttatcatattcttcttgtttatttgttatcagctgatgttgacatcataagttcaggttcctaactagatccaatattggaatttttcagcttttgctaagaagagagcttgtatgtctttgggaataatgggcagaaaaagataactttgagaagtcttagacttctaatagctttgatatttaaaagtacatgtaatacaagaggtttttttcctacatttaatgcatggagaagataggacatttagaaatatggaattaatgttcatttgactggcaaaagattattttctcagatgtagtgaagtgtggtaaagaacttcactctagagccagaatgtctgtgtttgtatcccagagcccaccacttacatttaaccattaacattcaacttactgtctctgagtttcagtggcctcatctataaaatgaggataataagagtacctacttcatagagttgttttagtggttaaataaactaacgtaaacttgctagaacttgataaactaatattggatgagaactggttgaaataatgcctggctatagtaaaaacttggtaaatgttagttgccattacaatgcaactactgttcctaccattccctctgccagtgcctggtattcagtagcactcagtaaatgttagttaaatgaagaaataactgaaggaatgaatgaacaaatggttgatgtagagattgcttttccattgttgtttattgaatattttgagatgtataacatactgtctgttaggcactgtgggatgggcactcacggagctgtcttccaaaggggtataggagaggagacgcagtgatctcagcaacctacctttaaaacatatcctagtatctactgccatgttaggttctcttcttttgctttttttaaaaaaaaattctcacaaaactccccccacccacttcagtttatagatgaggaagctcctactacataatagtgcttcccagtctaattcttgacctcattgtatttatatgtcctttttttttttgacagagtctcactcattgcagtggcacaatcacagctcactgcaacctctgcctcccctgctcaagtgatcctcccacctcaacctcctgagtagctgggactacaggcatgcaccaccacgcctggctaatttttgtatttttttgtagagatgcggttttgccatgttggccaggctggtctcgaactcctgggctcaagccatctgcccactttggcctctgagagtgctgagattataggcatgagccaccattcccagccatgttttcctttttcattgaactttatctactttagccattaaactccactccattggtcttgtcattactaagagctgaaccacctgcaaaatattaagttaaaaagcgttttctttgacaacagttttcttttcttcatcttcctctatcactttacttctgaacttttattctctcattttgatctgacccctacttctctgtttttcctggccatttagtactttcttgttttgctcatcccatttcccagtggagaccttctggtctgctgctttatcactggttttgttagaagacatacaaatggcaaggaggtatatgaaaaggtgcctaacatcattgatcatcagagaaatgcagaccaaaactacaatgagatatcatttcaccccagttaaaatggctttttttttttttttccaaaagacaggcaataacaaagtactggtgaggatgtggagtaaagggaacccacatacactattagtaggaatgtaaattagtacagccactgtggagaacagtttgaaggttcctcaaaaaactaaaaatagagctaccatataatccagcaatcccactgctaggtatatatccaaaagaaaggcaatcaatatacggaagagatacctgcacacccaggtttattgcagcactattcacaatagccaagatttggaagcaacccaggtgtccaacagatgaatggataaagaaaacatggtatataaacacaatggaatactattcagctgtgaaaaagaatgaaatcctgtcatttgcaatcctgtcttgaatagaactggaggtcatgatgttaagtgaaataagacaggcacaaacttcacatgttctcacttatttgtgggagctaaaaattaaaacaatcgaactcatggagctagagaatagaattatggttaccagaggctggaagggtggttgggcgtataagtgtagggggagtggggatggttaatgggtacaaaaaaatgagaacgaataagatctacttgataacacaacagggtgactatagtcaacagtaattatacatttaaaaataactagaagagtataattagattgtaacacaaaagataaatgcttgaggtgatggatacctatttaccctgatgtgattattacttatttcatgcctatatcaaaatatttatactccaaaaatatatatacctactatgtacccacaaaaatttaaaaatttatatattgtttttgctatcacctttagaatttcttgtcattggatagttcgtctgtataccattctggtcttcattccccagggcccccgttgtctgatttttctgcttctagaactgttagaggtcacaaaagcaagatggttgtatctatcacaatttttgtctgactttaactgggtatctgttacgatttagtagtcatcttactgacttcttgttggtttccaattgaatcctcacagtagactgttttcattgtaatcagtatcgaattatagcctgttcccttcttcataaatgaaggctttcttcttcaacagttcttagtgacttcacctgtactttatttctctgctttgaatatttcgaagaaaacatattcttgctctttcccaaggttaacactacatacattaccttgaccacaggatgttttcttgcagattgtgacctaattccatcacccttcagcagcccccaccgttttcatggattcagctaaaccttctgtaagatgactctttttccccctaatctttatatctcttttgatatgtagctttagtctcactttttttccttttggattttgccagttagatgtctccctggaattccacttcagcatggctaagactaagcttgtcttctctttcctccccaaagcaaattgtaattaggatagactgaaggtgacagaagataactaagatcttcttcatcctttcggctcttatggaagctgaattccagtagtcattctaaatttgttgtatgtcagcttatggtatcttttcatgtctttacattcagccaaagaggaagttccttgaaggggagaccagagggcgtgctgtgcttcttaatcctctctttcttaaccagtaagaggcattcagtagatatctgatgatactgattaatagaggggaacttttcagattcttttttttttttaaccctagtaagctttagtacaaactaaatgctgagagattatcaagtaagggattgatcatcacaagaagactcaggatgttacatcctgtaggttttatagtttcctatattgtaaaaaatatgagttatagcagcttgtctggatgtcatacaggtataaaaatcagttttataaacttgagtaaattggggcccattttagaaaaaactcttgcaggctgtgaatgccaatatataagtaaagtattaagtataatgttatttaatgtgggcaaacataaagccaggtgtaaattttttaggtttaaaatcttatagaactatacatccaaaagaaaatttcaagttaaacataatacaaagcaatacaatctaaattaacattaatttaatgtgatgaatgatattgccttgctaaaagtgggtcactacttacaatgtgcaaatggtactcatcgttagggtatagattcttttaaactatgacatacgtacactaccatgtggaacgtgatgatgtgttctctgttctaactactgggaagacttccttggcatagcacatgccatggggtcagttggctttgacttcatatagatatgccatttacttggtcagtgtcacttctatgacaagtagtatgttgtgccagtttgattataagtacaaatatgggcaatgaagtaacttggttttaaggttgttactaagctgagtaacagtgtgtggctatacaaatttttataggctatcaggaatgaaaacacaggagattgttgtagattcaagtattttagattcaagtttgaagatgctcatgcagatgtttaactgagttgtatagacctttatgtttctttctttttctctttttttttttttgagacagagtcttgctctgtcacccaagctggagtgcaatggtgtgatctcggcttactgcaacctccgcctcccaggttcaagcaattctcctgcctcagcctcccaagtagctgggattacagatgtgcaccacgacgcccagctgattttttgtattttagtagaggcggggtctcaccatgttgtcaagatggtctcaatctcctgaccttgtgatccacccacctctgcctcccaaagtgctgtgattacaggcgtgagccaccgcgcctgactgacctttatgtttcttaactttatgctatacatcagttgatatttcaaaaatttaaatggtttctatgattattctttgggctaagaaattgggcattaattgtcctcatatgtatggtttttgtggctacttcatgtagattttatttttggtggttatcaaattggaatttttttttttttttttttttttgagacggagtctcattctgtttcccaggttggagtacagtggtgcaatctcagctcactgcagcctcgacctcccaggctcaagcagtcctctcacctcagccttctaagtagctgggactacaggcacgcaccaccacacctggctagttttttgtgtttttagtagagatggggttttaccctgttggccaggctggtcttgaactcctggcctcaagtgatccacctgcctcagcctcccaaagtgctgggattagaggcatgagccaccacacctggctgaaattggaatttcattggtactgcctgtaattttatgttaatttttttttttttttgtcgtcactagcttttatctaaagcccctagagagaaaggccatgataccttgtatacaaggttataagagtatacaagggaaagggagggctgaagggaacagggtgggctggtacaagcctcattagaaataccattgagtctgtgagtaaaacatcattatatgaaaaggagatgtggttttagggtggtccaattacttttgcaccagcctaataaaattacaagtcattatcaatagagacattgtaaaacctttttttttcccaaaagaagtatcaggtatgataattacatgtctgcccaactttcgttatagattaacataacttaattgtatttaaggtacaatttaggagagttgctgaaaaatgaatctttagtattgggatgccttgattctaccctcaatagctataatggattatgtgtctgagtagattaataaaaatcttttgagcatttttcttgaactacttcactgaagattagctttttgagcatccattttaatttctcagtatataaggatcggtttatcacaactgtattgttttccctggccttgttagattatattttcatatcatgtagaaaaataggtgtattcgttctcccttgaagtcctttgtctcccaaaggaaatggttgcaatacagatgtgtcacctcttccacaggtaaagtggaatggagaagtagccagttaaatagtgcatgctcaatttggaacatttagagcatacaggaaagttatttatttggtaaatattttttaagcatttactatgtttcatgcattgtactagttgtagaggatataattgaatacaactacatgtagcccttgactttatggaactagtctagtataaagatttaagattgcctggcatggtggctcacgccactaatcccagcactttgagaggccaaggcaggattgcttgaggccagaagtttaagagtagcttggtcaacataatgagactccatctctaaaataaatagatagatagatagatagatagatagatagatagatagatagaagtagttagacaacacaaagcagtttcactcatcttgtggcaaggagttatgtatttctaatcaaatttggcaactcaagcattttcaacaaaatctacatgttttttcagaataaagtgaccaacacagaatgttacctgtaaaaatcagagcaataattgctatctaaaataattttgaaaattaagtggtactgaaaggctcatatagcaaaaatatggcctcctgtcattgtactttcctacttcccagactcaccattttcaacattttttagtagtttattttgccattttatagcatagtacctgacattttatttattcaacagacatttcttaagtacctaatacatgccattccttgtttgaagggatgctaaggatacagtggtgaacaaggcgttgtggggttgtatagagggtattcattcctaaccttgaaccaaatatttctttctgttggataatgcattaaaaattgcaaacagtttacaaacttttggagcaatggtggccttgatcataaagtagggactgcttctaccgtatacatgcttggtggtgtatttgtgatatctggctaaagtttctacatggaaattgactgactttagttttgagacttctgggaaccagtcaggcaaaatagtgaaactgtgtatcctgtttccaagagttgtcttttaaggttatctgcttcattcatttggcctgacttgctaggcaaatgcctagggtaaatatgatttgattaactataacaacaacagcaacaacaacaactttattttttagagcagtttgaggttcacagcaaaattgagcagaatgtacagagattttccctatacccgcttcccctacgcatgtgcggcctcccctactatcaacatcccccaccagagtggtttgttacaattaatgaacctacattgacacatcattatcactcaaggtccgtagtttacattagagtccactcttggtgttgtgtatgggtttggtcgattttataatgacatttatccaccattatagtgtcatacatagtaattttgctaccctaaaaatccagtgtgctccacctgttcctccttccctcctccctcatccctggcaaccactgaactttttaacatctccatagttttgccttttccagaatgtcatatcattggaatcacacagtatgcagccttttcaaatgggcttctttccgttagtaataggcatttaagtttcatcctcatcttttcatggcttgatagctcatttctttccctccctcttttcttccctgtcttccttccttcctcttctttcctgtttcctctttcttcttccttttttaagagacaaggtgtctcactctgttgcccaggctggagtgcagtggcccaatcatagctcattgcagccttgaattcctgggctcaagtgatcctcctgcgttagcctcctgagtagctgggatcacaggctccagtcattttagtgctgaataatatttcattatctggatgtaccgcctattcattcacctactgaagaatatcttggttgcttctaagttttggcaattatgagtgaagttactataaacattgtatacaagttttatgtggatgtatgttgtcatctcccttgggcagataccaaggagtgccattgttggatcatatggtaaatatatctttagttttgtacagaattctaggttggtatttttttctctctcagtcctttattttatttggagacagtctcgctatgtcgcccaggctgccatacagtggtgccatctgggctcactgaaacctccacctcccaggttcaagcgattcttgtgccttggcctcccaagtagctgggattacaggagtgcgccaccacgcctgctaatttttgtatttttagtagagacagggttttgccatgttgcccaggctggtctcaaactcctgaccttaagtgattcacccacctcaatctcccaaaatcctgggattacaggcctgagctactgtgcctgatctctctcagtactttaaagaaatatttcattccacttttcttttttttcttctttttgagatggagtctcactctgtcgcctgggctggagtgcagtggcgcgatctcagctcactgccacctccgcctcctgggttcaagtgattctcctgcctcagcctcctgaatagctgagattacaggcgcccaccaccatgcccagctaattttttgcatttttagtagagacgggggttccaccatgttggccaggctggtctcgaactcctgacctcgtgattcgcacatctcggcctcccaaattgctgggattacaggtgtgagctaccacgcctggcccactcttcttgcttacatagtttctgaggagatgtcagatgtaatttttatttttgctcttctgtaggcaagttgagttttttccccctctagcttctctcaggatttttttctttatctttgattttcagtagtttgaaaattatatgcctagctgtcagggttttttgcttgtttgtttttgttttctcaggtgtgactccagaaaggttctaaagaggagctttacaatctcttctctggggtttatggagacttcctttacccttctgtgttagccccttaaagcactgcgtcaaccttaaaagggcacaggaaagggtgtctatgccatttttatgccatttatcctgcttggtgttttctgagctttcttcatctgcggtttaatgtctcacattaatttgtagaaattctctgtcattgtttcaaatttttcttcagttcttttctctgtttcttcttctggtgttcccattatgcttttgtggttgtcgtacagttattggatattttgttccaggcttttttttttccagtctttttttccttttgcttctcggttttgtaggtgtctgttgagatactctcaagtgcagatattctttcctcagctttgtctagtttactaataagcccattaaaggcagtcttcatttctgttacagtctttttgatcagtagcatttcttttttattctttcttaaaatttctgtctttctgcttacattgcccatctgttcttgcatggtttctactttgtccattagagttcttaggatatttatcataattatttcaaatttctggtgtaacaattccaacatccctgcaacatccaagtctagtttcgatgcttactgtgtctcttccagctgtgttttttcctatttaatatgtcttataattttttcttgatagccatacatgatgcattaggtaacagaaactgctgtgagtggacctttagtaatgtggtggtaaggtgtgcatggaggggaaacattttcagtctgttagtgaacttttgtcaacttcacatgtgcttctcaagtccatcctgtaagtgggagagtagggctagagaggactgaagttgggtatatattaaatactttctcctacaaagaagcctagaggggacgcattaggggattttttttcccccagtattcactgtgatgacccttattgagctcctggaggtaaaactcacaaaactgtggttctcccccctgcccatattactacatgtccctggagtttatatctttcagacttgtctgcactgagcttccaccaatttgtcaaatacagatcaggtttccctaccacccgtgcagttgaaaacccacatacaacttttgactcctccagagcttaactactcatagcctgctattgactggaagccttgccaataacataaacagttgattaatacatattttatatgttttctgtattatatattgtattcttacaataaagagaaaagaagatgttattaagaaaatcataaggaagataaaatatatttactgttcattaagtggttcccatgggtgctggttcccatggaggttgccccttgtgagtttttgctcagggaagttgtgattctctatatttgcctgttggtctcctaatttgggagtcatcagttttccctgtgacctcacttctcttacagagttaagaacagttgttggtttttcagtttgttcagtgttttacatgttgttagaacacagtggtacttctaagtttcttaacatgctagatcagaaacctgaagtctcacctaatttggctttttatattttttcttcttttttttcttccattgctaccaaagcatttttcatctgtgtctggggtgacattagagcagaatgtgatttctaggtaaacattattgggctccctagcagaaaaatttttgaaagtagtacatgaattctgtataattaaaattttcttttcatcttaataggtataggtaataggcacggcctattttttttttgctcaacagtctaaaatagtaatttaatcacctaatagccttagttatatagttgaaagaagagttggaaatctgattcatgggttggaaatcacctgtcacatatgagttttaggcactggtcactttattttgaaacagctttggggttttttcctttttcaactcataataggctttaacagcttttagttttgtttctgtttttttaacagcatgagttgccaaatttggttatagcttcttggtacaagatgggtaaatttgctttgtgttgtgtaattactttttattttaaatgctacctcttttatgaacactaactttacactaagattaggaaaatgagaattgcatgtctgcaacaaatagctatctgtagtattaaattgtgaaaatgtagactttggattggagctggcatctcttaatatgtaattgtaacatagagtaaataagtattttgtcccttgtagggtcaaacagtacagtgcatgggcagaattagagatgtaggcttttttttttttttttttttttactggcttagagaaccgtttgatcagctaatatggaattaagtccctagggctgcccaggcacaacattaactgctattaaaggaaaatttaaaagagtattagtgaaggttaaatactgaccatggacatctggcaaaattgatgttttttttcccctccaccattgtttatagtttattgttatttatcagagaattaatgtttattttcagaatctattaccataagaaatctgtttgaggacttcgtatgtgccaggaattctactaaataatgatataatgctgaacagaattagataggatcctcacttcgttaagcttacagtctagtggtatagatcaacattaatcaaagaataacacaaatagaaagcagagcagtggttcatgggattgactgtagagaagcatgagggaagttcccaggtgatggaaaatactttatttcttaatcgtggtggttacatgtgtgcatatgtttatgaaaatatattgtacatttaaagtggatacattttatcacatgtaaattatgactctataaagttaattaaaaagaataactcaggtaaggtggtgtgtgcgcctgtagtcccagctatttctgaggcaggaagatcacttgagcccaggagtttgagttcagcatgggcaacatgagacctgtgagactttgtctctaaaaaaatttaaataaataactaagataaatgtaaaattacagctgtagtaagttctacaaaggagagttacatgggctatgacgatgtaagatagcaagaactgacattggcagggaggaaatgatgatgagtagaagtaaataagtgaagtgtggggattgatgtcaaggggacagtataaaagaaataacagcatgcgccaaggccctaaaattggaaagtccttggcaaattaaaggagtttgaaaaaggccattgtgtgcaaagcagaaaataggtactacaaggtaaaagatggagctaagcggtaggtaaggctaaaccttgtcagccattgttaaatattgaattgtatcctaagcacaactcagtggaaagcagttaaagttctttaattgggggaggcaatgaaggggtaataaaattggttatagaaatactgctctggctctagtgttgagaatgaattggagtagccagagtagattcaagaagactttagtaagattattccaacaggccaggacctgttatagggtggtggcaatggagagagatggacagaatggagagtgtatttaggaggtaaaaatgacagaacttggtgatgcactgaatgtgaaatggggaaggtgtctaggaggactactaggtttatggtttgcgtattagggtggatgatagcagtttcatttactgagacagggagccctggcagagtacccagcttttagagtgggtagggggaaggggagagtgcatctggtgttgggcattttgaagtgatttacatacaacaaactgaaggtatctttaacactgagtccagcaggttagcatatttattcagcaagcattgcacctttttttgttgtttttggggtcttcaactcctggcctcgaatcctccctccttcccccgcctctcccagcctccgcctcccaaagtgctgggatttcaggagtgagccaccgcgcctggccagcatcgcgctgtttgtgcagtgtgccctgtgctaggtcttgcagtgggtaccagtagagacataaaagtacaaaagataattggacgtttagtagagtcctgaaagggggcgggataggaagatacctaaccataagaaaaaccagcaagagcggaaaaggagctagtcctccagatcaataagttaatcacttatgtttgtgattccctgcattttgggtgattctctgtcgaggtcctcttaagtccagacttttgatataatctgcagtttgcgccatttggattcctgaagcatctttacaagccacctacattccttatggagctgtggcacaacagcaagcccacgatgtctcaccggattaataaaaatataggcgctcacgcttttgtttaccgatatagtatctcctcctcccctcactccatcaacccccacgcgacacaactttccggaagtaagcaaaatccgttatcaaggtgaaactccggggaccaggctccacagctgccataaactggatggcacgttagaagccggtgggtgtaggtgaggcacgctggcgcccgcgggcccttctccagccgctacccagtgggaatccgcggggctgaagccccgaaaccaggctgagcgtcccagagcgcaacctccctttcccccagcagcgccggcgccgcagaagccgcgtgtccccaggcgcactcccccaaggtgaacccccgccccccacggaggcggctgggtcgcgggtctgggcggggcgctccggacgccctcccgccgctgcgcacccctcccgcgagctgccagctccctcggcctctccacccaaaactggcccaaccgccaatcgtctgcctctcacctcctacagcaggtgacccatggccaatcgccaggggtctctttgccaggagccgccagggccagccaatcggggcgacccctccgccggggaggggacgggaaaggggtggggggtgaagggggtgaagggggtgtcccgggggacgggctgaacctcagtcaggaccgcctgcaccgcagtccggggatcgggtcgaggggagaagaaaaaggggtgctcgggagcagcccccggctacctcccctggaggcacagagggcgggggccttggcgaatggctttcttgctggccacttgcggaggtttggattcaggatttgttcctagtgtccaagattttgataagaaacttacagaagctgatgcttacctacaaatcttgattgaacaattaaagctttttgatgacaagcttcaaaactgcaaagaagatgaacagagaaagaaaattgaaactctcaaagagacaacaaatagcatggtagaatcaattaaacactgcattgtgttgctgcagattgccaaagaccagagtaatgcggagaagcacgcagatggaatgataagtactattaatcccgtagatgcaatatatcaacctagtcctttggaacctgtgatcagcacaatgccttcccagactgtgttacctccagaacctgttcagttgtgtaagtcagagcagcgtccatcttccctaccagttggacctgtgttggctaccttgggacatcatcagactcctacaccaaatagtacaggcagtggccattcaccaccgagtagcagtctcacttctccaagccacgtgaacttgtctccaaatacagtcccagagttctcttactccagcagtgaagatgaattttatgatgctgatgaattccatcaaagtggctcatccccaaagcgcttaatagattcttctggatctgcctcagtcctgacacacagcagctcgggaaatagtctaaaacgcccagataccacagaatcacttaattcttccttgtccaatggaacaagtgatgctgacctgtttgattcacatgatgacagagatgatgatgcggaggcagggtctgtggaggagcacaagagcgttatcatgcatctcttgtcgcaggttagacttggaatggatcttactaaggtagttcttccaacgtttattcttgaaagaagatctcttttagaaatgtatgcagacttttttgcacatccggacctgtttgtgagcattagtgaccagaaggatcccaaggatcgaatggttcaggttgtgaaatggtacctctcagcctttcatgcgggaaggaaaggatcagttgccaaaaagccatacaatcccattttgggcgagatttttcagtgtcattggacattaccaaatgatactgaagagaacacagaactagtttcagaaggaccagttccctgggtttccaaaaacagtgtaacatttggtccagatatgagcattgaattgtatcttcttgttaaaacactcagcataaaaggctgaaatgggtggatgatgggaaacctgctcagccacaaatgttagtcgagc

SEQ ID NO: 735157 - DNA, 16730 bp, Homo sapiens
gtaagggtctttacatggtttccagatagttcattagttgttgctttctttttttgtctgttttctgttttttttttttaaataactgtggtatgatgtaataggaacttataatttctgagttgcttatttttcctttacagttatagtaaagttatactcatttattttctcctgctttctgcagagtaaaatactgatttttgtctagaaacaagacagtgcaagacaatgttgaaagtgaaattctatgttaaaatatgccagatttattttaagaatttaatatctgtagtcagttatcaatacaaccaaattacataattatgcatgataataggtaaatactgagaagttcacctcattttcttgttaaaggatttggctattaccgtatgtgtcagttagtactcttttgtatggtagtgaaagaaaactcaacccaaactgattcatgaagaagaaagtaaatctggttagatgtggtttgaattaggtaattcatgtcatgaggactcagatctcccatctctatttctacgttccacttttgcattggcttcattttcggttaggttctcccttggtggtggtaaggtggttgtagcaatgtcagcctcccatttttggaaccgagtccataggaggctattctttctagaccttaataggagtaacacaattattgctcatcaccctagctttggccatgtgtcaaatcctgaccagtcacaatttcacagtcatagattctaccctggagctgggatgttactggcctcactagaaacacattgctgatagggtagaaggtgtgttcatcctacccaacccgacccgcaccaaagtcagaatagggaaaaacagatgttgggtgacatgcaactaacgtctgccgtactacactgaagatatttttctatgtttattctccagtgaaagagcttatatttgtggtacataggggattttgttttaatttagaaaatttaattgtagaaaacatgttttataaccctttctctgtactttgttctatatcaggaattgacttgattagataaggtgacatagggtatcttaggccctacaagatagtaaaccccccatcacttgaaagtattcagtagaggcttaaaaaacattattaaaggatgtggttattaggggactttaagaaatgaatatgaaattgaagtaggaaatctttaagctactctgtgagttatgccttttaaaagcaatttgtaattcctgtagatttcttttaaatttaggcagtttcataaatgactatagcatcattttagcaaatttgtgatcctgtaagaggaggataagtgttttttgtttgtttgtttgttttttgtttttttgagacagagtctcactttgtaccccagaaagtaaatctagttagatgtggtttgtctcggctcactgcaacctccaccccgtgcgttctagcaattctcctgcctcagccaccacacctggcctaagaggggaggataagtgttttagtgatcatattagactgaatgtggcagatgagatttcccgcccccccattgttggttagactgacattcaacattcaacaagagccacctgcccttgtaggcatttctgccactatacccctacataaacctagagtgctattgcttacttgctttccttcaaatacattttttcatttgtggcctccacattcttgtgtgtgatgtcctttctctgtgaaatgtcttctaccctttttttcaaagcctagtttagaactgacctcttctatgaaccctctgccgactggcctttccttccccagtcccccaagttcaaaatgatctctttcctttgaatactatagtatttgcacaattcactatctccttatcatattcttcttgtttatttgttatcagctgatgttgacatcataagttcaggttcctaactagatccaatattggaatttttcagcttttgctaagaagagagcttgtatgtctttgggaataatgggcagaaaaagataactttgagaagtcttagacttctaatagctttgatatttaaaagtacatgtaatacaagaggtttttttcctacatttaatgcatggagaagataggacatttagaaatatggaattaatgttcatttgactggcaaaagattattttctcagatgtagtgaagtgtggtaaagaacttcactctagagccagaatgtctgtgtttgtatcccagagcccaccacttacatttaaccattaacattcaacttactgtctctgagtttcagtggcctcatctataaaatgaggataataagagtacctacttcatagagttgttttagtggttaaataaactaacgtaaacttgctagaacttgataaactaatattggatgagaactggttgaaataatgcctggctatagtaaaaacttggtaaatgttagttgccattacaatgcaactactgttcctaccattccctctgccagtgcctggtattcagtagcactcagtaaatgttagttaaatgaagaaataactgaaggaatgaatgaacaaatggttgatgtagagattgcttttccattgttgtttattgaatattttgagatgtataacatactgtctgttaggcactgtgggatgggcactcacggagctgtcttccaaaggggtataggagaggagacgcagtgatctcagcaacctacctttaaaacatatcctagtatctactgccatgttaggttctcttcttttgctttttttaaaaaaaaattctcacaaaactccccccacccacttcagtttatagatgaggaagctcctactacataatagtgcttcccagtctaattcttgacctcattgtatttatatgtcctttttttttttgacagagtctcactcattgcagtggcacaatcacagctcactgcaacctctgcctcccctgctcaagtgatcctcccacctcaacctcctgagtagctgggactacaggcatgcaccaccacgcctggctaatttttgtatttttttgtagagatgcggttttgccatgttggccaggctggtctcgaactcctgggctcaagccatctgcccactttggcctctgagagtgctgagattataggcatgagccaccattcccagccatgttttcctttttcattgaactttatctactttagccattaaactccactccattggtcttgtcattactaagagctgaaccacctgcaaaatattaagttaaaaagcgttttctttgacaacagttttcttttcttcatcttcctctatcactttacttctgaacttttattctctcattttgatctgacccctacttctctgtttttcctggccatttagtactttcttgttttgctcatcccatttcccagtggagaccttctggtctgctgctttatcactggttttgttagaagacatacaaatggcaaggaggtatatgaaaaggtgcctaacatcattgatcatcagagaaatgcagaccaaaactacaatgagatatcatttcaccccagttaaaatggctttttttttttttttccaaaagacaggcaataacaaagtactggtgaggatgtggagtaaagggaacccacatacactattagtaggaatgtaaattagtacagccactgtggagaacagtttgaaggttcctcaaaaaactaaaaatagagctaccatataatccagcaatcccactgctaggtatatatccaaaagaaaggcaatcaatatacggaagagatacctgcacacccaggtttattgcagcactattcacaatagccaagatttggaagcaacccaggtgtccaacagatgaatggataaagaaaacatggtatataaacacaatggaatactattcagctgtgaaaaagaatgaaatcctgtcatttgcaatcctgtcttgaatagaactggaggtcatgatgttaagtgaaataagacaggcacaaacttcacatgttctcacttatttgtgggagctaaaaattaaaacaatcgaactcatggagctagagaatagaattatggttaccagaggctggaagggtggttgggcgtataagtgtagggggagtggggatggttaatgggtacaaaaaaatgagaacgaataagatctacttgataacacaacagggtgactatagtcaacagtaattatacatttaaaaataactagaagagtataattagattgtaacacaaaagataaatgcttgaggtgatggatacctatttaccctgatgtgattattacttatttcatgcctatatcaaaatatttatactccaaaaatatatatacctactatgtacccacaaaaatttaaaaatttatatattgtttttgctatcacctttagaatttcttgtcattggatagttcgtctgtataccattctggtcttcattccccagggcccccgttgtctgatttttctgcttctagaactgttagaggtcacaaaagcaagatggttgtatctatcacaatttttgtctgactttaactgggtatctgttacgatttagtagtcatcttactgacttcttgttggtttccaattgaatcctcacagtagactgttttcattgtaatcagtatcgaattatagcctgttcccttcttcataaatgaaggctttcttcttcaacagttcttagtgacttcacctgtactttatttctctgctttgaatatttcgaagaaaacatattcttgctctttcccaaggttaacactacatacattaccttgaccacaggatgttttcttgcagattgtgacctaattccatcacccttcagcagcccccaccgttttcatggattcagctaaaccttctgtaagatgactctttttccccctaatctttatatctcttttgatatgtagctttagtctcactttttttccttttggattttgccagttagatgtctccctggaattccacttcagcatggctaagactaagcttgtcttctctttcctccccaaagcaaattgtaattaggatagactgaaggtgacagaagataactaagatcttcttcatcctttcggctcttatggaagctgaattccagtagtcattctaaatttgttgtatgtcagcttatggtatcttttcatgtctttacattcagccaaagaggaagttccttgaaggggagaccagagggcgtgctgtgcttcttaatcctctctttcttaaccagtaagaggcattcagtagatatctgatgatactgattaatagaggggaacttttcagattcttttttttttttaaccctagtaagctttagtacaaactaaatgctgagagattatcaagtaagggattgatcatcacaagaagactcaggatgttacatcctgtaggttttatagtttcctatattgtaaaaaatatgagttatagcagcttgtctggatgtcatacaggtataaaaatcagttttataaacttgagtaaattggggcccattttagaaaaaactcttgcaggctgtgaatgccaatatataagtaaagtattaagtataatgttatttaatgtgggcaaacataaagccaggtgtaaattttttaggtttaaaatcttatagaactatacatccaaaagaaaatttcaagttaaacataatacaaagcaatacaatctaaattaacattaatttaatgtgatgaatgatattgccttgctaaaagtgggtcactacttacaatgtgcaaatggtactcatcgttagggtatagattcttttaaactatgacatacgtacactaccatgtggaacgtgatgatgtgttctctgttctaactactgggaagacttccttggcatagcacatgccatggggtcagttggctttgacttcatatagatatgccatttacttggtcagtgtcacttctatgacaagtagtatgttgtgccagtttgattataagtacaaatatgggcaatgaagtaacttggttttaaggttgttactaagctgagtaacagtgtgtggctatacaaatttttataggctatcaggaatgaaaacacaggagattgttgtagattcaagtattttagattcaagtttgaagatgctcatgcagatgtttaactgagttgtatagacctttatgtttctttctttttctctttttttttttttgagacagagtcttgctctgtcacccaagctggagtgcaatggtgtgatctcggcttactgcaacctccgcctcccaggttcaagcaattctcctgcctcagcctcccaagtagctgggattacagatgtgcaccacgacgcccagctgattttttgtattttagtagaggcggggtctcaccatgttgtcaagatggtctcaatctcctgaccttgtgatccacccacctctgcctcccaaagtgctgtgattacaggcgtgagccaccgcgcctgactgacctttatgtttcttaactttatgctatacatcagttgatatttcaaaaatttaaatggtttctatgattattctttgggctaagaaattgggcattaattgtcctcatatgtatggtttttgtggctacttcatgtagattttatttttggtggttatcaaattggaatttttttttttttttttttttttgagacggagtctcattctgtttcccaggttggagtacagtggtgcaatctcagctcactgcagcctcgacctcccaggctcaagcagtcctctcacctcagccttctaagtagctgggactacaggcacgcaccaccacacctggctagttttttgtgtttttagtagagatggggttttaccctgttggccaggctggtcttgaactcctggcctcaagtgatccacctgcctcagcctcccaaagtgctgggattagaggcatgagccaccacacctggctgaaattggaatttcattggtactgcctgtaattttatgttaatttttttttttttttgtcgtcactagcttttatctaaagcccctagagagaaaggccatgataccttgtatacaaggttataagagtatacaagggaaagggagggctgaagggaacagggtgggctggtacaagcctcattagaaataccattgagtctgtgagtaaaacatcattatatgaaaaggagatgtggttttagggtggtccaattacttttgcaccagcctaataaaattacaagtcattatcaatagagacattgtaaaacctttttttttcccaaaagaagtatcaggtatgataattacatgtctgcccaactttcgttatagattaacataacttaattgtatttaaggtacaatttaggagagttgctgaaaaatgaatctttagtattgggatgccttgattctaccctcaatagctataatggattatgtgtctgagtagattaataaaaatcttttgagcatttttcttgaactacttcactgaagattagctttttgagcatccattttaatttctcagtatataaggatcggtttatcacaactgtattgttttccctggccttgttagattatattttcatatcatgtagaaaaataggtgtattcgttctcccttgaagtcctttgtctcccaaaggaaatggttgcaatacagatgtgtcacctcttccacaggtaaagtggaatggagaagtagccagttaaatagtgcatgctcaatttggaacatttagagcatacaggaaagttatttatttggtaaatattttttaagcatttactatgtttcatgcattgtactagttgtagaggatataattgaatacaactacatgtagcccttgactttatggaactagtctagtataaagatttaagattgcctggcatggtggctcacgccactaatcccagcactttgagaggccaaggcaggattgcttgaggccagaagtttaagagtagcttggtcaacataatgagactccatctctaaaataaatagatagatagatagatagatagatagatagatagatagatagaagtagttagacaacacaaagcagtttcactcatcttgtggcaaggagttatgtatttctaatcaaatttggcaactcaagcattttcaacaaaatctacatgttttttcagaataaagtgaccaacacagaatgttacctgtaaaaatcagagcaataattgctatctaaaataattttgaaaattaagtggtactgaaaggctcatatagcaaaaatatggcctcctgtcattgtactttcctacttcccagactcaccattttcaacattttttagtagtttattttgccattttatagcatagtacctgacattttatttattcaacagacatttcttaagtacctaatacatgccattccttgtttgaagggatgctaaggatacagtggtgaacaaggcgttgtggggttgtatagagggtattcattcctaaccttgaaccaaatatttctttctgttggataatgcattaaaaattgcaaacagtttacaaacttttggagcaatggtggccttgatcataaagtagggactgcttctaccgtatacatgcttggtggtgtatttgtgatatctggctaaagtttctacatggaaattgactgactttagttttgagacttctgggaaccagtcaggcaaaatagtgaaactgtgtatcctgtttccaagagttgtcttttaaggttatctgcttcattcatttggcctgacttgctaggcaaatgcctagggtaaatatgatttgattaactataacaacaacagcaacaacaacaactttattttttagagcagtttgaggttcacagcaaaattgagcagaatgtacagagattttccctatacccgcttcccctacgcatgtgcggcctcccctactatcaacatcccccaccagagtggtttgttacaattaatgaacctacattgacacatcattatcactcaaggtccgtagtttacattagagtccactcttggtgttgtgtatgggtttggtcgattttataatgacatttatccaccattatagtgtcatacatagtaattttgctaccctaaaaatccagtgtgctccacctgttcctccttccctcctccctcatccctggcaaccactgaactttttaacatctccatagttttgccttttccagaatgtcatatcattggaatcacacagtatgcagccttttcaaatgggcttctttccgttagtaataggcatttaagtttcatcctcatcttttcatggcttgatagctcatttctttccctccctcttttcttccctgtcttccttccttcctcttctttcctgtttcctctttcttcttccttttttaagagacaaggtgtctcactctgttgcccaggctggagtgcagtggcccaatcatagctcattgcagccttgaattcctgggctcaagtgatcctcctgcgttagcctcctgagtagctgggatcacaggctccagtcattttagtgctgaataatatttcattatctggatgtaccgcctattcattcacctactgaagaatatcttggttgcttctaagttttggcaattatgagtgaagttactataaacattgtatacaagttttatgtggatgtatgttgtcatctcccttgggcagataccaaggagtgccattgttggatcatatggtaaatatatctttagttttgtacagaattctaggttggtatttttttctctctcagtcctttattttatttggagacagtctcgctatgtcgcccaggctgccatacagtggtgccatctgggctcactgaaacctccacctcccaggttcaagcgattcttgtgccttggcctcccaagtagctgggattacaggagtgcgccaccacgcctgctaatttttgtatttttagtagagacagggttttgccatgttgcccaggctggtctcaaactcctgaccttaagtgattcacccacctcaatctcccaaaatcctgggattacaggcctgagctactgtgcctgatctctctcagtactttaaagaaatatttcattccacttttcttttttttcttctttttgagatggagtctcactctgtcgcctgggctggagtgcagtggcgcgatctcagctcactgccacctccgcctcctgggttcaagtgattctcctgcctcagcctcctgaatagctgagattacaggcgcccaccaccatgcccagctaattttttgcatttttagtagagacgggggttccaccatgttggccaggctggtctcgaactcctgacctcgtgattcgcacatctcggcctcccaaattgctgggattacaggtgtgagctaccacgcctggcccactcttcttgcttacatagtttctgaggagatgtcagatgtaatttttatttttgctcttctgtaggcaagttgagttttttccccctctagcttctctcaggatttttttctttatctttgattttcagtagtttgaaaattatatgcctagctgtcagggttttttgcttgtttgtttttgttttctcaggtgtgactccagaaaggttctaaagaggagctttacaatctcttctctggggtttatggagacttcctttacccttctgtgttagccccttaaagcactgcgtcaaccttaaaagggcacaggaaagggtgtctatgccatttttatgccatttatcctgcttggtgttttctgagctttcttcatctgcggtttaatgtctcacattaatttgtagaaattctctgtcattgtttcaaatttttcttcagttcttttctctgtttcttcttctggtgttcccattatgcttttgtggttgtcgtacagttattggatattttgttccaggcttttttttttccagtctttttttccttttgcttctcggttttgtaggtgtctgttgagatactctcaagtgcagatattctttcctcagctttgtctagtttactaataagcccattaaaggcagtcttcatttctgttacagtctttttgatcagtagcatttcttttttattctttcttaaaatttctgtctttctgcttacattgcccatctgttcttgcatggtttctactttgtccattagagttcttaggatatttatcataattatttcaaatttctggtgtaacaattccaacatccctgcaacatccaagtctagtttcgatgcttactgtgtctcttccagctgtgttttttcctatttaatatgtcttataattttttcttgatagccatacatgatgcattaggtaacagaaactgctgtgagtggacctttagtaatgtggtggtaaggtgtgcatggaggggaaacattttcagtctgttagtgaacttttgtcaacttcacatgtgcttctcaagtccatcctgtaagtgggagagtagggctagagaggactgaagttgggtatatattaaatactttctcctacaaagaagcctagaggggacgcattaggggattttttttcccccagtattcactgtgatgacccttattgagctcctggaggtaaaactcacaaaactgtggttctcccccctgcccatattactacatgtccctggagtttatatctttcagacttgtctgcactgagcttccaccaatttgtcaaatacagatcaggtttccctaccacccgtgcagttgaaaacccacatacaacttttgactcctccagagcttaactactcatagcctgctattgactggaagccttgccaataacataaacagttgattaatacatattttatatgttttctgtattatatattgtattcttacaataaagagaaaagaagatgttattaagaaaatcataaggaagataaaatatatttactgttcattaagtggttcccatgggtgctggttcccatggaggttgccccttgtgagtttttgctcagggaagttgtgattctctatatttgcctgttggtctcctaatttgggagtcatcagttttccctgtgacctcacttctcttacagagttaagaacagttgttggtttttcagtttgttcagtgttttacatgttgttagaacacagtggtacttctaagtttcttaacatgctagatcagaaacctgaagtctcacctaatttggctttttatattttttcttcttttttttcttccattgctaccaaagcatttttcatctgtgtctggggtgacattagagcagaatgtgatttctaggtaaacattattgggctccctagcagaaaaatttttgaaagtagtacatgaattctgtataattaaaattttcttttcatcttaataggtataggtaataggcacggcctattttttttttgctcaacagtctaaaatagtaatttaatcacctaatagccttagttatatagttgaaagaagagttggaaatctgattcatgggttggaaatcacctgtcacatatgagttttaggcactggtcactttattttgaaacagctttggggttttttcctttttcaactcataataggctttaacagcttttagttttgtttctgtttttttaacagcatgagttgccaaatttggttatagcttcttggtacaagatgggtaaatttgctttgtgttgtgtaattactttttattttaaatgctacctcttttatgaacactaactttacactaagattaggaaaatgagaattgcatgtctgcaacaaatagctatctgtagtattaaattgtgaaaatgtagactttggattggagctggcatctcttaatatgtaattgtaacatagagtaaataagtattttgtcccttgtagggtcaaacagtacagtgcatgggcagaattagagatgtaggcttttttttttttttttttttttactggcttagagaaccgtttgatcagctaatatggaattaagtccctagggctgcccaggcacaacattaactgctattaaaggaaaatttaaaagagtattagtgaaggttaaatactgaccatggacatctggcaaaattgatgttttttttcccctccaccattgtttatagtttattgttatttatcagagaattaatgtttattttcagaatctattaccataagaaatctgtttgaggacttcgtatgtgccaggaattctactaaataatgatataatgctgaacagaattagataggatcctcacttcgttaagcttacagtctagtggtatagatcaacattaatcaaagaataacacaaatagaaagcagagcagtggttcatgggattgactgtagagaagcatgagggaagttcccaggtgatggaaaatactttatttcttaatcgtggtggttacatgtgtgcatatgtttatgaaaatatattgtacatttaaagtggatacattttatcacatgtaaattatgactctataaagttaattaaaaagaataactcaggtaaggtggtgtgtgcgcctgtagtcccagctatttctgaggcaggaagatcacttgagcccaggagtttgagttcagcatgggcaacatgagacctgtgagactttgtctctaaaaaaatttaaataaataactaagataaatgtaaaattacagctgtagtaagttctacaaaggagagttacatgggctatgacgatgtaagatagcaagaactgacattggcagggaggaaatgatgatgagtagaagtaaataagtgaagtgtggggattgatgtcaaggggacagtataaaagaaataacagcatgcgccaaggccctaaaattggaaagtccttggcaaattaaaggagtttgaaaaaggccattgtgtgcaaagcagaaaataggtactacaaggtaaaagatggagctaagcggtaggtaaggctaaaccttgtcagccattgttaaatattgaattgtatcctaagcacaactcagtggaaagcagttaaagttctttaattgggggaggcaatgaaggggtaataaaattggttatagaaatactgctctggctctagtgttgagaatgaattggagtagccagagtagattcaagaagactttagtaagattattccaacaggccaggacctgttatagggtggtggcaatggagagagatggacagaatggagagtgtatttaggaggtaaaaatgacagaacttggtgatgcactgaatgtgaaatggggaaggtgtctaggaggactactaggtttatggtttgcgtattagggtggatgatagcagtttcatttactgagacagggagccctggcagagtacccagcttttagagtgggtagggggaaggggagagtgcatctggtgttgggcattttgaagtgatttacatacaacaaactgaaggtatctttaacactgagtccagcaggttagcatatttattcagcaagcattgcacctttttttgttgtttttggggtcttcaactcctggcctcgaatcctccctccttcccccgcctctcccagcctccgcctcccaaagtgctgggatttcaggagtgagccaccgcgcctggccagcatcgcgctgtttgtgcagtgtgccctgtgctaggtcttgcagtgggtaccagtagagacataaaagtacaaaagataattggacgtttagtagagtcctgaaagggggcgggataggaagatacctaaccataagaaaaaccagcaagagcggaaaaggagctagtcctccagatcaataagttaatcacttatgtttgtgattccctgcattttgggtgattctctgtcgaggtcctcttaagtccagacttttgatataatctgcagtttgcgccatttggattcctgaagcatctttacaagccacctacattccttatggagctgtggcacaacagcaagcccacgatgtctcaccggattaataaaaatataggcgctcacgcttttgtttaccgatatagtatctcctcctcccctcactccatcaacccccacgcgacacaactttccggaagtaagcaaaatccgttatcaaggtgaaactccggggaccaggctccacagctgccataaactggatggcacgttagaagccggtgggtgtaggtgaggcacgctggcgcccgcgggcccttctccagccgctacccagtgggaatccgcggggctgaagccccgaaaccaggctgagcgtcccagagcgcaacctccctttcccccagcagcgccggcgccgcagaagccgcgtgtccccaggcgcactcccccaaggtgaacccccgccccccacggaggcggctgggtcgcgggtctgggcggggcgctccggacgccctcccgccgctgcgcacccctcccgcgagctgccagctccctcggcctctccacccaaaactggcccaaccgccaatcgtctgcctctcacctcctacagcaggtgacccatggccaatcgccaggggtctctttgccaggagccgccagggccagccaatcggggcgacccctccgccggggaggggacgggaaaggggtggggggtgaagggggtgaagggggtgtcccgggggacgggctgaacctcagtcaggaccgcctgcaccgcagtccggggatcgggtcgaggggagaagaaaaaggggtgctcgggagcagcccccggctacctcccctggaggcacagagggcgggggccttggcgaatggctttcttgctggccacttgcggaggtttggattcaggatttgttcctagtgtccaagattttgataagaaacttacagaagctgatgcttacctacaaatcttgattgaacaattaaagctttttgatgacaagcttcaaaactgcaaagaagatgaacagagaaagaaaattgaaactctcaaagagacaacaaatagcatggtagaatcaattaaacactgcattgtgttgctgcagattgccaaagaccagagtaatgcggagaagcacgcagatggaatgataagtactattaatcccgtagatgcaatatatcaacctagtcctttggaacctgtgatcagcacaatgccttcccagactgtgttacctccagaacctgttcagttgtgtaagtcagagcagcgtccatcttccctaccagttggacctgtgttggctaccttgggacatcatcagactcctacaccaaatagtacaggcagtggccattcaccaccgagtagcagtctcacttctccaagccacgtgaacttgtctccaaatacagtcccagagttctcttactccagcagtgaagatgaattttatgatgctgatgaattccatcaaagtggctcatccccaaagcgcttaatagattcttctggatctgcctcagtcctgacacacagcagctcgggaaatagtctaaaacgcccagataccacagaatcacttaattcttccttgtccaatggaacaagtgatgctgacctgtttgattcacatgatgacagagatgatgatgcggaggcagggtctgcttcagtttcgtcgacgcggccgc

SEQ ID NO: 735158 - DNA, 18733 bp, Homo sapiens
gtaagggtctttacatggtttccagatagttcattagttgttgctttctttttttgtctgttttctgttttttttttttaaataactgtggtatgatgtaataggaacttataatttctgagttgcttatttttcctttacagttatagtaaagttatactcatttattttctcctgctttctgcagagtaaaatactgatttttgtctagaaacaagacagtgcaagacaatgttgaaagtgaaattctatgttaaaatatgccagatttattttaagaatttaatatctgtagtcagttatcaatacaaccaaattacataattatgcatgataataggtaaatactgagaagttcacctcattttcttgttaaaggatttggctattaccgtatgtgtcagttagtactcttttgtatggtagtgaaagaaaactcaacccaaactgattcatgaagaagaaagtaaatctggttagatgtggtttgaattaggtaattcatgtcatgaggactcagatctcccatctctatttctacgttccacttttgcattggcttcattttcggttaggttctcccttggtggtggtaaggtggttgtagcaatgtcagcctcccatttttggaaccgagtccataggaggctattctttctagaccttaataggagtaacacaattattgctcatcaccctagctttggccatgtgtcaaatcctgaccagtcacaatttcacagtcatagattctaccctggagctgggatgttactggcctcactagaaacacattgctgatagggtagaaggtgtgttcatcctacccaacccgacccgcaccaaagtcagaatagggaaaaacagatgttgggtgacatgcaactaacgtctgccgtactacactgaagatatttttctatgtttattctccagtgaaagagcttatatttgtggtacataggggattttgttttaatttagaaaatttaattgtagaaaacatgttttataaccctttctctgtactttgttctatatcaggaattgacttgattagataaggtgacatagggtatcttaggccctacaagatagtaaaccccccatcacttgaaagtattcagtagaggcttaaaaaacattattaaaggatgtggttattaggggactttaagaaatgaatatgaaattgaagtaggaaatctttaagctactctgtgagttatgccttttaaaagcaatttgtaattcctgtagatttcttttaaatttaggcagtttcataaatgactatagcatcattttagcaaatttgtgatcctgtaagaggaggataagtgttttttgtttgtttgtttgttttttgtttttttgagacagagtctcactttgtaccccagaaagtaaatctagttagatgtggtttgtctcggctcactgcaacctccaccccgtgcgttctagcaattctcctgcctcagccaccacacctggcctaagaggggaggataagtgttttagtgatcatattagactgaatgtggcagatgagatttcccgcccccccattgttggttagactgacattcaacattcaacaagagccacctgcccttgtaggcatttctgccactatacccctacataaacctagagtgctattgcttacttgctttccttcaaatacattttttcatttgtggcctccacattcttgtgtgtgatgtcctttctctgtgaaatgtcttctaccctttttttcaaagcctagtttagaactgacctcttctatgaaccctctgccgactggcctttccttccccagtcccccaagttcaaaatgatctctttcctttgaatactatagtatttgcacaattcactatctccttatcatattcttcttgtttatttgttatcagctgatgttgacatcataagttcaggttcctaactagatccaatattggaatttttcagcttttgctaagaagagagcttgtatgtctttgggaataatgggcagaaaaagataactttgagaagtcttagacttctaatagctttgatatttaaaagtacatgtaatacaagaggtttttttcctacatttaatgcatggagaagataggacatttagaaatatggaattaatgttcatttgactggcaaaagattattttctcagatgtagtgaagtgtggtaaagaacttcactctagagccagaatgtctgtgtttgtatcccagagcccaccacttacatttaaccattaacattcaacttactgtctctgagtttcagtggcctcatctataaaatgaggataataagagtacctacttcatagagttgttttagtggttaaataaactaacgtaaacttgctagaacttgataaactaatattggatgagaactggttgaaataatgcctggctatagtaaaaacttggtaaatgttagttgccattacaatgcaactactgttcctaccattccctctgccagtgcctggtattcagtagcactcagtaaatgttagttaaatgaagaaataactgaaggaatgaatgaacaaatggttgatgtagagattgcttttccattgttgtttattgaatattttgagatgtataacatactgtctgttaggcactgtgggatgggcactcacggagctgtcttccaaaggggtataggagaggagacgcagtgatctcagcaacctacctttaaaacatatcctagtatctactgccatgttaggttctcttcttttgctttttttaaaaaaaaattctcacaaaactccccccacccacttcagtttatagatgaggaagctcctactacataatagtgcttcccagtctaattcttgacctcattgtatttatatgtcctttttttttttgacagagtctcactcattgcagtggcacaatcacagctcactgcaacctctgcctcccctgctcaagtgatcctcccacctcaacctcctgagtagctgggactacaggcatgcaccaccacgcctggctaatttttgtatttttttgtagagatgcggttttgccatgttggccaggctggtctcgaactcctgggctcaagccatctgcccactttggcctctgagagtgctgagattataggcatgagccaccattcccagccatgttttcctttttcattgaactttatctactttagccattaaactccactccattggtcttgtcattactaagagctgaaccacctgcaaaatattaagttaaaaagcgttttctttgacaacagttttcttttcttcatcttcctctatcactttacttctgaacttttattctctcattttgatctgacccctacttctctgtttttcctggccatttagtactttcttgttttgctcatcccatttcccagtggagaccttctggtctgctgctttatcactggttttgttagaagacatacaaatggcaaggaggtatatgaaaaggtgcctaacatcattgatcatcagagaaatgcagaccaaaactacaatgagatatcatttcaccccagttaaaatggctttttttttttttttccaaaagacaggcaataacaaagtactggtgaggatgtggagtaaagggaacccacatacactattagtaggaatgtaaattagtacagccactgtggagaacagtttgaaggttcctcaaaaaactaaaaatagagctaccatataatccagcaatcccactgctaggtatatatccaaaagaaaggcaatcaatatacggaagagatacctgcacacccaggtttattgcagcactattcacaatagccaagatttggaagcaacccaggtgtccaacagatgaatggataaagaaaacatggtatataaacacaatggaatactattcagctgtgaaaaagaatgaaatcctgtcatttgcaatcctgtcttgaatagaactggaggtcatgatgttaagtgaaataagacaggcacaaacttcacatgttctcacttatttgtgggagctaaaaattaaaacaatcgaactcatggagctagagaatagaattatggttaccagaggctggaagggtggttgggcgtataagtgtagggggagtggggatggttaatgggtacaaaaaaatgagaacgaataagatctacttgataacacaacagggtgactatagtcaacagtaattatacatttaaaaataactagaagagtataattagattgtaacacaaaagataaatgcttgaggtgatggatacctatttaccctgatgtgattattacttatttcatgcctatatcaaaatatttatactccaaaaatatatatacctactatgtacccacaaaaatttaaaaatttatatattgtttttgctatcacctttagaatttcttgtcattggatagttcgtctgtataccattctggtcttcattccccagggcccccgttgtctgatttttctgcttctagaactgttagaggtcacaaaagcaagatggttgtatctatcacaatttttgtctgactttaactgggtatctgttacgatttagtagtcatcttactgacttcttgttggtttccaattgaatcctcacagtagactgttttcattgtaatcagtatcgaattatagcctgttcccttcttcataaatgaaggctttcttcttcaacagttcttagtgacttcacctgtactttatttctctgctttgaatatttcgaagaaaacatattcttgctctttcccaaggttaacactacatacattaccttgaccacaggatgttttcttgcagattgtgacctaattccatcacccttcagcagcccccaccgttttcatggattcagctaaaccttctgtaagatgactctttttccccctaatctttatatctcttttgatatgtagctttagtctcactttttttccttttggattttgccagttagatgtctccctggaattccacttcagcatggctaagactaagcttgtcttctctttcctccccaaagcaaattgtaattaggatagactgaaggtgacagaagataactaagatcttcttcatcctttcggctcttatggaagctgaattccagtagtcattctaaatttgttgtatgtcagcttatggtatcttttcatgtctttacattcagccaaagaggaagttccttgaaggggagaccagagggcgtgctgtgcttcttaatcctctctttcttaaccagtaagaggcattcagtagatatctgatgatactgattaatagaggggaacttttcagattcttttttttttttaaccctagtaagctttagtacaaactaaatgctgagagattatcaagtaagggattgatcatcacaagaagactcaggatgttacatcctgtaggttttatagtttcctatattgtaaaaaatatgagttatagcagcttgtctggatgtcatacaggtataaaaatcagttttataaacttgagtaaattggggcccattttagaaaaaactcttgcaggctgtgaatgccaatatataagtaaagtattaagtataatgttatttaatgtgggcaaacataaagccaggtgtaaattttttaggtttaaaatcttatagaactatacatccaaaagaaaatttcaagttaaacataatacaaagcaatacaatctaaattaacattaatttaatgtgatgaatgatattgccttgctaaaagtgggtcactacttacaatgtgcaaatggtactcatcgttagggtatagattcttttaaactatgacatacgtacactaccatgtggaacgtgatgatgtgttctctgttctaactactgggaagacttccttggcatagcacatgccatggggtcagttggctttgacttcatatagatatgccatttacttggtcagtgtcacttctatgacaagtagtatgttgtgccagtttgattataagtacaaatatgggcaatgaagtaacttggttttaaggttgttactaagctgagtaacagtgtgtggctatacaaatttttataggctatcaggaatgaaaacacaggagattgttgtagattcaagtattttagattcaagtttgaagatgctcatgcagatgtttaactgagttgtatagacctttatgtttctttctttttctctttttttttttttgagacagagtcttgctctgtcacccaagctggagtgcaatggtgtgatctcggcttactgcaacctccgcctcccaggttcaagcaattctcctgcctcagcctcccaagtagctgggattacagatgtgcaccacgacgcccagctgattttttgtattttagtagaggcggggtctcaccatgttgtcaagatggtctcaatctcctgaccttgtgatccacccacctctgcctcccaaagtgctgtgattacaggcgtgagccaccgcgcctgactgacctttatgtttcttaactttatgctatacatcagttgatatttcaaaaatttaaatggtttctatgattattctttgggctaagaaattgggcattaattgtcctcatatgtatggtttttgtggctacttcatgtagattttatttttggtggttatcaaattggaatttttttttttttttttttttttgagacggagtctcattctgtttcccaggttggagtacagtggtgcaatctcagctcactgcagcctcgacctcccaggctcaagcagtcctctcacctcagccttctaagtagctgggactacaggcacgcaccaccacacctggctagttttttgtgtttttagtagagatggggttttaccctgttggccaggctggtcttgaactcctggcctcaagtgatccacctgcctcagcctcccaaagtgctgggattagaggcatgagccaccacacctggctgaaattggaatttcattggtactgcctgtaattttatgttaatttttttttttttttgtcgtcactagcttttatctaaagcccctagagagaaaggccatgataccttgtatacaaggttataagagtatacaagggaaagggagggctgaagggaacagggtgggctggtacaagcctcattagaaataccattgagtctgtgagtaaaacatcattatatgaaaaggagatgtggttttagggtggtccaattacttttgcaccagcctaataaaattacaagtcattatcaatagagacattgtaaaacctttttttttcccaaaagaagtatcaggtatgataattacatgtctgcccaactttcgttatagattaacataacttaattgtatttaaggtacaatttaggagagttgctgaaaaatgaatctttagtattgggatgccttgattctaccctcaatagctataatggattatgtgtctgagtagattaataaaaatcttttgagcatttttcttgaactacttcactgaagattagctttttgagcatccattttaatttctcagtatataaggatcggtttatcacaactgtattgttttccctggccttgttagattatattttcatatcatgtagaaaaataggtgtattcgttctcccttgaagtcctttgtctcccaaaggaaatggttgcaatacagatgtgtcacctcttccacaggtaaagtggaatggagaagtagccagttaaatagtgcatgctcaatttggaacatttagagcatacaggaaagttatttatttggtaaatattttttaagcatttactatgtttcatgcattgtactagttgtagaggatataattgaatacaactacatgtagcccttgactttatggaactagtctagtataaagatttaagattgcctggcatggtggctcacgccactaatcccagcactttgagaggccaaggcaggattgcttgaggccagaagtttaagagtagcttggtcaacataatgagactccatctctaaaataaatagatagatagatagatagatagatagatagatagatagatagaagtagttagacaacacaaagcagtttcactcatcttgtggcaaggagttatgtatttctaatcaaatttggcaactcaagcattttcaacaaaatctacatgttttttcagaataaagtgaccaacacagaatgttacctgtaaaaatcagagcaataattgctatctaaaataattttgaaaattaagtggtactgaaaggctcatatagcaaaaatatggcctcctgtcattgtactttcctacttcccagactcaccattttcaacattttttagtagtttattttgccattttatagcatagtacctgacattttatttattcaacagacatttcttaagtacctaatacatgccattccttgtttgaagggatgctaaggatacagtggtgaacaaggcgttgtggggttgtatagagggtattcattcctaaccttgaaccaaatatttctttctgttggataatgcattaaaaattgcaaacagtttacaaacttttggagcaatggtggccttgatcataaagtagggactgcttctaccgtatacatgcttggtggtgtatttgtgatatctggctaaagtttctacatggaaattgactgactttagttttgagacttctgggaaccagtcaggcaaaatagtgaaactgtgtatcctgtttccaagagttgtcttttaaggttatctgcttcattcatttggcctgacttgctaggcaaatgcctagggtaaatatgatttgattaactataacaacaacagcaacaacaacaactttattttttagagcagtttgaggttcacagcaaaattgagcagaatgtacagagattttccctatacccgcttcccctacgcatgtgcggcctcccctactatcaacatcccccaccagagtggtttgttacaattaatgaacctacattgacacatcattatcactcaaggtccgtagtttacattagagtccactcttggtgttgtgtatgggtttggtcgattttataatgacatttatccaccattatagtgtcatacatagtaattttgctaccctaaaaatccagtgtgctccacctgttcctccttccctcctccctcatccctggcaaccactgaactttttaacatctccatagttttgccttttccagaatgtcatatcattggaatcacacagtatgcagccttttcaaatgggcttctttccgttagtaataggcatttaagtttcatcctcatcttttcatggcttgatagctcatttctttccctccctcttttcttccctgtcttccttccttcctcttctttcctgtttcctctttcttcttccttttttaagagacaaggtgtctcactctgttgcccaggctggagtgcagtggcccaatcatagctcattgcagccttgaattcctgggctcaagtgatcctcctgcgttagcctcctgagtagctgggatcacaggctccagtcattttagtgctgaataatatttcattatctggatgtaccgcctattcattcacctactgaagaatatcttggttgcttctaagttttggcaattatgagtgaagttactataaacattgtatacaagttttatgtggatgtatgttgtcatctcccttgggcagataccaaggagtgccattgttggatcatatggtaaatatatctttagttttgtacagaattctaggttggtatttttttctctctcagtcctttattttatttggagacagtctcgctatgtcgcccaggctgccatacagtggtgccatctgggctcactgaaacctccacctcccaggttcaagcgattcttgtgccttggcctcccaagtagctgggattacaggagtgcgccaccacgcctgctaatttttgtatttttagtagagacagggttttgccatgttgcccaggctggtctcaaactcctgaccttaagtgattcacccacctcaatctcccaaaatcctgggattacaggcctgagctactgtgcctgatctctctcagtactttaaagaaatatttcattccacttttcttttttttcttctttttgagatggagtctcactctgtcgcctgggctggagtgcagtggcgcgatctcagctcactgccacctccgcctcctgggttcaagtgattctcctgcctcagcctcctgaatagctgagattacaggcgcccaccaccatgcccagctaattttttgcatttttagtagagacgggggttccaccatgttggccaggctggtctcgaactcctgacctcgtgattcgcacatctcggcctcccaaattgctgggattacaggtgtgagctaccacgcctggcccactcttcttgcttacatagtttctgaggagatgtcagatgtaatttttatttttgctcttctgtaggcaagttgagttttttccccctctagcttctctcaggatttttttctttatctttgattttcagtagtttgaaaattatatgcctagctgtcagggttttttgcttgtttgtttttgttttctcaggtgtgactccagaaaggttctaaagaggagctttacaatctcttctctggggtttatggagacttcctttacccttctgtgttagccccttaaagcactgcgtcaaccttaaaagggcacaggaaagggtgtctatgccatttttatgccatttatcctgcttggtgttttctgagctttcttcatctgcggtttaatgtctcacattaatttgtagaaattctctgtcattgtttcaaatttttcttcagttcttttctctgtttcttcttctggtgttcccattatgcttttgtggttgtcgtacagttattggatattttgttccaggcttttttttttccagtctttttttccttttgcttctcggttttgtaggtgtctgttgagatactctcaagtgcagatattctttcctcagctttgtctagtttactaataagcccattaaaggcagtcttcatttctgttacagtctttttgatcagtagcatttcttttttattctttcttaaaatttctgtctttctgcttacattgcccatctgttcttgcatggtttctactttgtccattagagttcttaggatatttatcataattatttcaaatttctggtgtaacaattccaacatccctgcaacatccaagtctagtttcgatgcttactgtgtctcttccagctgtgttttttcctatttaatatgtcttataattttttcttgatagccatacatgatgcattaggtaacagaaactgctgtgagtggacctttagtaatgtggtggtaaggtgtgcatggaggggaaacattttcagtctgttagtgaacttttgtcaacttcacatgtgcttctcaagtccatcctgtaagtgggagagtagggctagagaggactgaagttgggtatatattaaatactttctcctacaaagaagcctagaggggacgcattaggggattttttttcccccagtattcactgtgatgacccttattgagctcctggaggtaaaactcacaaaactgtggttctcccccctgcccatattactacatgtccctggagtttatatctttcagacttgtctgcactgagcttccaccaatttgtcaaatacagatcaggtttccctaccacccgtgcagttgaaaacccacatacaacttttgactcctccagagcttaactactcatagcctgctattgactggaagccttgccaataacataaacagttgattaatacatattttatatgttttctgtattatatattgtattcttacaataaagagaaaagaagatgttattaagaaaatcataaggaagataaaatatatttactgttcattaagtggttcccatgggtgctggttcccatggaggttgccccttgtgagtttttgctcagggaagttgtgattctctatatttgcctgttggtctcctaatttgggagtcatcagttttccctgtgacctcacttctcttacagagttaagaacagttgttggtttttcagtttgttcagtgttttacatgttgttagaacacagtggtacttctaagtttcttaacatgctagatcagaaacctgaagtctcacctaatttggctttttatattttttcttcttttttttcttccattgctaccaaagcatttttcatctgtgtctggggtgacattagagcagaatgtgatttctaggtaaacattattgggctccctagcagaaaaatttttgaaagtagtacatgaattctgtataattaaaattttcttttcatcttaataggtataggtaataggcacggcctattttttttttgctcaacagtctaaaatagtaatttaatcacctaatagccttagttatatagttgaaagaagagttggaaatctgattcatgggttggaaatcacctgtcacatatgagttttaggcactggtcactttattttgaaacagctttggggttttttcctttttcaactcataataggctttaacagcttttagttttgtttctgtttttttaacagcatgagttgccaaatttggttatagcttcttggtacaagatgggtaaatttgctttgtgttgtgtaattactttttattttaaatgctacctcttttatgaacactaactttacactaagattaggaaaatgagaattgcatgtctgcaacaaatagctatctgtagtattaaattgtgaaaatgtagactttggattggagctggcatctcttaatatgtaattgtaacatagagtaaataagtattttgtcccttgtagggtcaaacagtacagtgcatgggcagaattagagatgtaggcttttttttttttttttttttttactggcttagagaaccgtttgatcagctaatatggaattaagtccctagggctgcccaggcacaacattaactgctattaaaggaaaatttaaaagagtattagtgaaggttaaatactgaccatggacatctggcaaaattgatgttttttttcccctccaccattgtttatagtttattgttatttatcagagaattaatgtttattttcagaatctattaccataagaaatctgtttgaggacttcgtatgtgccaggaattctactaaataatgatataatgctgaacagaattagataggatcctcacttcgttaagcttacagtctagtggtatagatcaacattaatcaaagaataacacaaatagaaagcagagcagtggttcatgggattgactgtagagaagcatgagggaagttcccaggtgatggaaaatactttatttcttaatcgtggtggttacatgtgtgcatatgtttatgaaaatatattgtacatttaaagtggatacattttatcacatgtaaattatgactctataaagttaattaaaaagaataactcaggtaaggtggtgtgtgcgcctgtagtcccagctatttctgaggcaggaagatcacttgagcccaggagtttgagttcagcatgggcaacatgagacctgtgagactttgtctctaaaaaaatttaaataaataactaagataaatgtaaaattacagctgtagtaagttctacaaaggagagttacatgggctatgacgatgtaagatagcaagaactgacattggcagggaggaaatgatgatgagtagaagtaaataagtgaagtgtggggattgatgtcaaggggacagtataaaagaaataacagcatgcgccaaggccctaaaattggaaagtccttggcaaattaaaggagtttgaaaaaggccattgtgtgcaaagcagaaaataggtactacaaggtaaaagatggagctaagcggtaggtaaggctaaaccttgtcagccattgttaaatattgaattgtatcctaagcacaactcagtggaaagcagttaaagttctttaattgggggaggcaatgaaggggtaataaaattggttatagaaatactgctctggctctagtgttgagaatgaattggagtagccagagtagattcaagaagactttagtaagattattccaacaggccaggacctgttatagggtggtggcaatggagagagatggacagaatggagagtgtatttaggaggtaaaaatgacagaacttggtgatgcactgaatgtgaaatggggaaggtgtctaggaggactactaggtttatggtttgcgtattagggtggatgatagcagtttcatttactgagacagggagccctggcagagtacccagcttttagagtgggtagggggaaggggagagtgcatctggtgttgggcattttgaagtgatttacatacaacaaactgaaggtatctttaacactgagtccagcaggttagcatatttattcagcaagcattgcacctttttttgttgtttttggggtcttcaactcctggcctcgaatcctccctccttcccccgcctctcccagcctccgcctcccaaagtgctgggatttcaggagtgagccaccgcgcctggccagcatcgcgctgtttgtgcagtgtgccctgtgctaggtcttgcagtgggtaccagtagagacataaaagtacaaaagataattggacgtttagtagagtcctgaaagggggcgggataggaagatacctaaccataagaaaaaccagcaagagcggaaaaggagctagtcctccagatcaataagttaatcacttatgtttgtgattccctgcattttgggtgattctctgtcgaggtcctcttaagtccagacttttgatataatctgcagtttgcgccatttggattcctgaagcatctttacaagccacctacattccttatggagctgtggcacaacagcaagcccacgatgtctcaccggattaataaaaatataggcgctcacgcttttgtttaccgatatagtatctcctcctcccctcactccatcaacccccacgcgacacaactttccggaagtaagcaaaatccgttatcaaggtgaaactccggggaccaggctccacagctgccataaactggatggcacgttagaagccggtgggtgtaggtgaggcacgctggcgcccgcgggcccttctccagccgctacccagtgggaatccgcggggctgaagccccgaaaccaggctgagcgtcccagagcgcaacctccctttcccccagcagcgccggcgccgcagaagccgcgtgtccccaggcgcactcccccaaggtgaacccccgccccccacggaggcggctgggtcgcgggtctgggcggggcgctccggacgccctcccgccgctgcgcacccctcccgcgagctgccagctccctcggcctctccacccaaaactggcccaaccgccaatcgtctgcctctcacctcctacagcaggtgacccatggccaatcgccaggggtctctttgccaggagccgccagggccagccaatcggggcgacccctccgccggggaggggacgggaaaggggtggggggtgaagggggtgaagggggtgtcccgggggacgggctgaacctcagtcaggaccgcctgcaccgcagtccggggatcgggtcgaggggagaagaaaaaggggtgctcgggagcagcccccggctacctcccctggaggcacagagggcgggggccttggcgaatggctttcttgctggccacttgcggaggtttggattcaggatttgttcctagtgtccaagattttgataagaaacttacagaagctgatgcttacctacaaatcttgattgaacaattaaagctttttgatgacaagcttcaaaactgcaaagaagatgaacagagaaagaaaattgaaactctcaaagagacaacaaatagcatggtagaatcaattaaacactgcattgtgttgctgcagattgccaaaagtactattaatcccgtagatgcaatatatcaacctagtcctttggaacctgtgatcagcacaatgccttcccagactgtgttacctccagaacctgttcagttgtgtaagtcagagcagcgtccatcttccctaccagttggacctgtgttggctaccttgggacatcatcagactcctacaccaaatagtacaggcagtggccattcaccaccgagtagcagtctcacttctccaagccacgtgaacttgtctccaaatacagtcccagagttctcttactccagcagtgaagatgaattttatgatgctgatgaattccatcaaagtggctcatccccaaagcgcttaatagattcttctggatctgcctcagtcctgacacacagcagctcgggaaatagtctaaaacgcccagataccacagaatcacttaattcttccttgtccaatggaacaagtgatgctgacctgtttgattcacatgatgacagagatgatgatgcggaggcagggtctgtggaggagcacaagagcgttatcatgcatctcttgtcgcaggttagacttggaatggatcttactaaggtagttcttccaacgtttattcttgaaagaagatctcttttagaaatgtatgcagacttttttgcacatccggacctgtttgtgagcattagtgaccagaaggatcccaaggatcgaatggttcaggttgtgaaatggtacctctcagcctttcatgcgggaaggaaaggatcagttgccaaaaagccatacaatcccattttgggcgagatttttcagtgtcattggacattaccaaatgatactgaagagaacacagaactagtttcagaaggaccagttccctgggtttccaaaaacagtgtaacatttgtggctgagcaggtttcccatcatccacccatttcagccttttatgctgagtgttttaacaagaagatacaattcaatgctcatatctggaccaaatcaaaattccttgggatgtcaattggggtgcacaacatagggcagggctgtgtctcatgtctagactatgatgaacattacattctcacattccccaatggctatggaaggcaagtgtgtccatttcctctgatcagcagtagactctgctgttccttgagacatgccccttccccctcttcctcttaactgtcaaccttacctaaaaacttttgattttgcaggtctatcctcacagtgccctgggtggaattaggaggagaatgcaatattaattgttccaaaacaggctatagtgcaaatatcatcttccacactaaacccttctatgggggcaagaagcacagaattactgccgagattttgtaggtattttttctgccttagagctcttatgcttttctgaaataactgccttttgtcttgaactacagcttctggattaggagtgtgaaagaatggttctgtctttgtaagcgtgtttcacattttatgtgtcatgtcttttgctgaagtcccatatcagaagaagacctaaaacatatattcagagcagtcagaggtcattgataggtttccttcctaaaaacctgacttgcaatgttgaactaaaagaggccttcctaggttgcctagctaaaccagattatggatccctaatttattcttgccagattgaatgatgagctggtccttacagcagactttgtgacccctgcagcactgcctcctggtcctcacagctatccctttttctgtgcctttgctggggaaaaacagtaaccatcacattttgcacgcatctggcttgcttccacttgacactcttgggtcacgtgcagatgactgtgccagtcagtggaaagtctatagtgatggcaccatgactctctctgcctctggaacccttaactgggggggaaggggacagtgggaaagaaagtttcaggcgttgatagcagctctcctccctctgccctggtcatgtctcccttttctggcctctttcaatcctgtttatgccttgcccttcctaaccaggcctttgctgtgttgcttatcttctcacattccatagttgtgtgtccaagtagaggtctgttacggcttttgcagaatggatccttgctcagggaaagtattcacaccatctggcacagaggtccctttcaacctgaggatgaaagcctgcattatattcttaagcaaagccttccctgacccccagtgcccatgtaagctcaccacagcacttaccacctagaatttcaatggtggttacgtctctctccactacgctgtgaacagcttgaggatagggaatttgccaactctgttatggtccttgcacccagaataggacgttcttgcccaaacccaccattcttgggatctcaagttcataagcgtcctgttgaaggccctcattcttatagttagccctggggagtccagttctgttaagatgctttcatcaaaaacttcacagttgctcttctgtgctctactctgtagttgggccacactgagcagattctttggtagaattttcaacttgagactaacacaagtatttccttttctgttcag

SEQ ID NO: 735159 - DNA, 19129 bp, Homo sapiens
gtaagggtctttacatggtttccagatagttcattagttgttgctttctttttttgtctgttttctgttttttttttttaaataactgtggtatgatgtaataggaacttataatttctgagttgcttatttttcctttacagttatagtaaagttatactcatttattttctcctgctttctgcagagtaaaatactgatttttgtctagaaacaagacagtgcaagacaatgttgaaagtgaaattctatgttaaaatatgccagatttattttaagaatttaatatctgtagtcagttatcaatacaaccaaattacataattatgcatgataataggtaaatactgagaagttcacctcattttcttgttaaaggatttggctattaccgtatgtgtcagttagtactcttttgtatggtagtgaaagaaaactcaacccaaactgattcatgaagaagaaagtaaatctggttagatgtggtttgaattaggtaattcatgtcatgaggactcagatctcccatctctatttctacgttccacttttgcattggcttcattttcggttaggttctcccttggtggtggtaaggtggttgtagcaatgtcagcctcccatttttggaaccgagtccataggaggctattctttctagaccttaataggagtaacacaattattgctcatcaccctagctttggccatgtgtcaaatcctgaccagtcacaatttcacagtcatagattctaccctggagctgggatgttactggcctcactagaaacacattgctgatagggtagaaggtgtgttcatcctacccaacccgacccgcaccaaagtcagaatagggaaaaacagatgttgggtgacatgcaactaacgtctgccgtactacactgaagatatttttctatgtttattctccagtgaaagagcttatatttgtggtacataggggattttgttttaatttagaaaatttaattgtagaaaacatgttttataaccctttctctgtactttgttctatatcaggaattgacttgattagataaggtgacatagggtatcttaggccctacaagatagtaaaccccccatcacttgaaagtattcagtagaggcttaaaaaacattattaaaggatgtggttattaggggactttaagaaatgaatatgaaattgaagtaggaaatctttaagctactctgtgagttatgccttttaaaagcaatttgtaattcctgtagatttcttttaaatttaggcagtttcataaatgactatagcatcattttagcaaatttgtgatcctgtaagaggaggataagtgttttttgtttgtttgtttgttttttgtttttttgagacagagtctcactttgtaccccagaaagtaaatctagttagatgtggtttgtctcggctcactgcaacctccaccccgtgcgttctagcaattctcctgcctcagccaccacacctggcctaagaggggaggataagtgttttagtgatcatattagactgaatgtggcagatgagatttcccgcccccccattgttggttagactgacattcaacattcaacaagagccacctgcccttgtaggcatttctgccactatacccctacataaacctagagtgctattgcttacttgctttccttcaaatacattttttcatttgtggcctccacattcttgtgtgtgatgtcctttctctgtgaaatgtcttctaccctttttttcaaagcctagtttagaactgacctcttctatgaaccctctgccgactggcctttccttccccagtcccccaagttcaaaatgatctctttcctttgaatactatagtatttgcacaattcactatctccttatcatattcttcttgtttatttgttatcagctgatgttgacatcataagttcaggttcctaactagatccaatattggaatttttcagcttttgctaagaagagagcttgtatgtctttgggaataatgggcagaaaaagataactttgagaagtcttagacttctaatagctttgatatttaaaagtacatgtaatacaagaggtttttttcctacatttaatgcatggagaagataggacatttagaaatatggaattaatgttcatttgactggcaaaagattattttctcagatgtagtgaagtgtggtaaagaacttcactctagagccagaatgtctgtgtttgtatcccagagcccaccacttacatttaaccattaacattcaacttactgtctctgagtttcagtggcctcatctataaaatgaggataataagagtacctacttcatagagttgttttagtggttaaataaactaacgtaaacttgctagaacttgataaactaatattggatgagaactggttgaaataatgcctggctatagtaaaaacttggtaaatgttagttgccattacaatgcaactactgttcctaccattccctctgccagtgcctggtattcagtagcactcagtaaatgttagttaaatgaagaaataactgaaggaatgaatgaacaaatggttgatgtagagattgcttttccattgttgtttattgaatattttgagatgtataacatactgtctgttaggcactgtgggatgggcactcacggagctgtcttccaaaggggtataggagaggagacgcagtgatctcagcaacctacctttaaaacatatcctagtatctactgccatgttaggttctcttcttttgctttttttaaaaaaaaattctcacaaaactccccccacccacttcagtttatagatgaggaagctcctactacataatagtgcttcccagtctaattcttgacctcattgtatttatatgtcctttttttttttgacagagtctcactcattgcagtggcacaatcacagctcactgcaacctctgcctcccctgctcaagtgatcctcccacctcaacctcctgagtagctgggactacaggcatgcaccaccacgcctggctaatttttgtatttttttgtagagatgcggttttgccatgttggccaggctggtctcgaactcctgggctcaagccatctgcccactttggcctctgagagtgctgagattataggcatgagccaccattcccagccatgttttcctttttcattgaactttatctactttagccattaaactccactccattggtcttgtcattactaagagctgaaccacctgcaaaatattaagttaaaaagcgttttctttgacaacagttttcttttcttcatcttcctctatcactttacttctgaacttttattctctcattttgatctgacccctacttctctgtttttcctggccatttagtactttcttgttttgctcatcccatttcccagtggagaccttctggtctgctgctttatcactggttttgttagaagacatacaaatggcaaggaggtatatgaaaaggtgcctaacatcattgatcatcagagaaatgcagaccaaaactacaatgagatatcatttcaccccagttaaaatggctttttttttttttttccaaaagacaggcaataacaaagtactggtgaggatgtggagtaaagggaacccacatacactattagtaggaatgtaaattagtacagccactgtggagaacagtttgaaggttcctcaaaaaactaaaaatagagctaccatataatccagcaatcccactgctaggtatatatccaaaagaaaggcaatcaatatacggaagagatacctgcacacccaggtttattgcagcactattcacaatagccaagatttggaagcaacccaggtgtccaacagatgaatggataaagaaaacatggtatataaacacaatggaatactattcagctgtgaaaaagaatgaaatcctgtcatttgcaatcctgtcttgaatagaactggaggtcatgatgttaagtgaaataagacaggcacaaacttcacatgttctcacttatttgtgggagctaaaaattaaaacaatcgaactcatggagctagagaatagaattatggttaccagaggctggaagggtggttgggcgtataagtgtagggggagtggggatggttaatgggtacaaaaaaatgagaacgaataagatctacttgataacacaacagggtgactatagtcaacagtaattatacatttaaaaataactagaagagtataattagattgtaacacaaaagataaatgcttgaggtgatggatacctatttaccctgatgtgattattacttatttcatgcctatatcaaaatatttatactccaaaaatatatatacctactatgtacccacaaaaatttaaaaatttatatattgtttttgctatcacctttagaatttcttgtcattggatagttcgtctgtataccattctggtcttcattccccagggcccccgttgtctgatttttctgcttctagaactgttagaggtcacaaaagcaagatggttgtatctatcacaatttttgtctgactttaactgggtatctgttacgatttagtagtcatcttactgacttcttgttggtttccaattgaatcctcacagtagactgttttcattgtaatcagtatcgaattatagcctgttcccttcttcataaatgaaggctttcttcttcaacagttcttagtgacttcacctgtactttatttctctgctttgaatatttcgaagaaaacatattcttgctctttcccaaggttaacactacatacattaccttgaccacaggatgttttcttgcagattgtgacctaattccatcacccttcagcagcccccaccgttttcatggattcagctaaaccttctgtaagatgactctttttccccctaatctttatatctcttttgatatgtagctttagtctcactttttttccttttggattttgccagttagatgtctccctggaattccacttcagcatggctaagactaagcttgtcttctctttcctccccaaagcaaattgtaattaggatagactgaaggtgacagaagataactaagatcttcttcatcctttcggctcttatggaagctgaattccagtagtcattctaaatttgttgtatgtcagcttatggtatcttttcatgtctttacattcagccaaagaggaagttccttgaaggggagaccagagggcgtgctgtgcttcttaatcctctctttcttaaccagtaagaggcattcagtagatatctgatgatactgattaatagaggggaacttttcagattcttttttttttttaaccctagtaagctttagtacaaactaaatgctgagagattatcaagtaagggattgatcatcacaagaagactcaggatgttacatcctgtaggttttatagtttcctatattgtaaaaaatatgagttatagcagcttgtctggatgtcatacaggtataaaaatcagttttataaacttgagtaaattggggcccattttagaaaaaactcttgcaggctgtgaatgccaatatataagtaaagtattaagtataatgttatttaatgtgggcaaacataaagccaggtgtaaattttttaggtttaaaatcttatagaactatacatccaaaagaaaatttcaagttaaacataatacaaagcaatacaatctaaattaacattaatttaatgtgatgaatgatattgccttgctaaaagtgggtcactacttacaatgtgcaaatggtactcatcgttagggtatagattcttttaaactatgacatacgtacactaccatgtggaacgtgatgatgtgttctctgttctaactactgggaagacttccttggcatagcacatgccatggggtcagttggctttgacttcatatagatatgccatttacttggtcagtgtcacttctatgacaagtagtatgttgtgccagtttgattataagtacaaatatgggcaatgaagtaacttggttttaaggttgttactaagctgagtaacagtgtgtggctatacaaatttttataggctatcaggaatgaaaacacaggagattgttgtagattcaagtattttagattcaagtttgaagatgctcatgcagatgtttaactgagttgtatagacctttatgtttctttctttttctctttttttttttttgagacagagtcttgctctgtcacccaagctggagtgcaatggtgtgatctcggcttactgcaacctccgcctcccaggttcaagcaattctcctgcctcagcctcccaagtagctgggattacagatgtgcaccacgacgcccagctgattttttgtattttagtagaggcggggtctcaccatgttgtcaagatggtctcaatctcctgaccttgtgatccacccacctctgcctcccaaagtgctgtgattacaggcgtgagccaccgcgcctgactgacctttatgtttcttaactttatgctatacatcagttgatatttcaaaaatttaaatggtttctatgattattctttgggctaagaaattgggcattaattgtcctcatatgtatggtttttgtggctacttcatgtagattttatttttggtggttatcaaattggaatttttttttttttttttttttttgagacggagtctcattctgtttcccaggttggagtacagtggtgcaatctcagctcactgcagcctcgacctcccaggctcaagcagtcctctcacctcagccttctaagtagctgggactacaggcacgcaccaccacacctggctagttttttgtgtttttagtagagatggggttttaccctgttggccaggctggtcttgaactcctggcctcaagtgatccacctgcctcagcctcccaaagtgctgggattagaggcatgagccaccacacctggctgaaattggaatttcattggtactgcctgtaattttatgttaatttttttttttttttgtcgtcactagcttttatctaaagcccctagagagaaaggccatgataccttgtatacaaggttataagagtatacaagggaaagggagggctgaagggaacagggtgggctggtacaagcctcattagaaataccattgagtctgtgagtaaaacatcattatatgaaaaggagatgtggttttagggtggtccaattacttttgcaccagcctaataaaattacaagtcattatcaatagagacattgtaaaacctttttttttcccaaaagaagtatcaggtatgataattacatgtctgcccaactttcgttatagattaacataacttaattgtatttaaggtacaatttaggagagttgctgaaaaatgaatctttagtattgggatgccttgattctaccctcaatagctataatggattatgtgtctgagtagattaataaaaatcttttgagcatttttcttgaactacttcactgaagattagctttttgagcatccattttaatttctcagtatataaggatcggtttatcacaactgtattgttttccctggccttgttagattatattttcatatcatgtagaaaaataggtgtattcgttctcccttgaagtcctttgtctcccaaaggaaatggttgcaatacagatgtgtcacctcttccacaggtaaagtggaatggagaagtagccagttaaatagtgcatgctcaatttggaacatttagagcatacaggaaagttatttatttggtaaatattttttaagcatttactatgtttcatgcattgtactagttgtagaggatataattgaatacaactacatgtagcccttgactttatggaactagtctagtataaagatttaagattgcctggcatggtggctcacgccactaatcccagcactttgagaggccaaggcaggattgcttgaggccagaagtttaagagtagcttggtcaacataatgagactccatctctaaaataaatagatagatagatagatagatagatagatagatagatagatagaagtagttagacaacacaaagcagtttcactcatcttgtggcaaggagttatgtatttctaatcaaatttggcaactcaagcattttcaacaaaatctacatgttttttcagaataaagtgaccaacacagaatgttacctgtaaaaatcagagcaataattgctatctaaaataattttgaaaattaagtggtactgaaaggctcatatagcaaaaatatggcctcctgtcattgtactttcctacttcccagactcaccattttcaacattttttagtagtttattttgccattttatagcatagtacctgacattttatttattcaacagacatttcttaagtacctaatacatgccattccttgtttgaagggatgctaaggatacagtggtgaacaaggcgttgtggggttgtatagagggtattcattcctaaccttgaaccaaatatttctttctgttggataatgcattaaaaattgcaaacagtttacaaacttttggagcaatggtggccttgatcataaagtagggactgcttctaccgtatacatgcttggtggtgtatttgtgatatctggctaaagtttctacatggaaattgactgactttagttttgagacttctgggaaccagtcaggcaaaatagtgaaactgtgtatcctgtttccaagagttgtcttttaaggttatctgcttcattcatttggcctgacttgctaggcaaatgcctagggtaaatatgatttgattaactataacaacaacagcaacaacaacaactttattttttagagcagtttgaggttcacagcaaaattgagcagaatgtacagagattttccctatacccgcttcccctacgcatgtgcggcctcccctactatcaacatcccccaccagagtggtttgttacaattaatgaacctacattgacacatcattatcactcaaggtccgtagtttacattagagtccactcttggtgttgtgtatgggtttggtcgattttataatgacatttatccaccattatagtgtcatacatagtaattttgctaccctaaaaatccagtgtgctccacctgttcctccttccctcctccctcatccctggcaaccactgaactttttaacatctccatagttttgccttttccagaatgtcatatcattggaatcacacagtatgcagccttttcaaatgggcttctttccgttagtaataggcatttaagtttcatcctcatcttttcatggcttgatagctcatttctttccctccctcttttcttccctgtcttccttccttcctcttctttcctgtttcctctttcttcttccttttttaagagacaaggtgtctcactctgttgcccaggctggagtgcagtggcccaatcatagctcattgcagccttgaattcctgggctcaagtgatcctcctgcgttagcctcctgagtagctgggatcacaggctccagtcattttagtgctgaataatatttcattatctggatgtaccgcctattcattcacctactgaagaatatcttggttgcttctaagttttggcaattatgagtgaagttactataaacattgtatacaagttttatgtggatgtatgttgtcatctcccttgggcagataccaaggagtgccattgttggatcatatggtaaatatatctttagttttgtacagaattctaggttggtatttttttctctctcagtcctttattttatttggagacagtctcgctatgtcgcccaggctgccatacagtggtgccatctgggctcactgaaacctccacctcccaggttcaagcgattcttgtgccttggcctcccaagtagctgggattacaggagtgcgccaccacgcctgctaatttttgtatttttagtagagacagggttttgccatgttgcccaggctggtctcaaactcctgaccttaagtgattcacccacctcaatctcccaaaatcctgggattacaggcctgagctactgtgcctgatctctctcagtactttaaagaaatatttcattccacttttcttttttttcttctttttgagatggagtctcactctgtcgcctgggctggagtgcagtggcgcgatctcagctcactgccacctccgcctcctgggttcaagtgattctcctgcctcagcctcctgaatagctgagattacaggcgcccaccaccatgcccagctaattttttgcatttttagtagagacgggggttccaccatgttggccaggctggtctcgaactcctgacctcgtgattcgcacatctcggcctcccaaattgctgggattacaggtgtgagctaccacgcctggcccactcttcttgcttacatagtttctgaggagatgtcagatgtaatttttatttttgctcttctgtaggcaagttgagttttttccccctctagcttctctcaggatttttttctttatctttgattttcagtagtttgaaaattatatgcctagctgtcagggttttttgcttgtttgtttttgttttctcaggtgtgactccagaaaggttctaaagaggagctttacaatctcttctctggggtttatggagacttcctttacccttctgtgttagccccttaaagcactgcgtcaaccttaaaagggcacaggaaagggtgtctatgccatttttatgccatttatcctgcttggtgttttctgagctttcttcatctgcggtttaatgtctcacattaatttgtagaaattctctgtcattgtttcaaatttttcttcagttcttttctctgtttcttcttctggtgttcccattatgcttttgtggttgtcgtacagttattggatattttgttccaggcttttttttttccagtctttttttccttttgcttctcggttttgtaggtgtctgttgagatactctcaagtgcagatattctttcctcagctttgtctagtttactaataagcccattaaaggcagtcttcatttctgttacagtctttttgatcagtagcatttcttttttattctttcttaaaatttctgtctttctgcttacattgcccatctgttcttgcatggtttctactttgtccattagagttcttaggatatttatcataattatttcaaatttctggtgtaacaattccaacatccctgcaacatccaagtctagtttcgatgcttactgtgtctcttccagctgtgttttttcctatttaatatgtcttataattttttcttgatagccatacatgatgcattaggtaacagaaactgctgtgagtggacctttagtaatgtggtggtaaggtgtgcatggaggggaaacattttcagtctgttagtgaacttttgtcaacttcacatgtgcttctcaagtccatcctgtaagtgggagagtagggctagagaggactgaagttgggtatatattaaatactttctcctacaaagaagcctagaggggacgcattaggggattttttttcccccagtattcactgtgatgacccttattgagctcctggaggtaaaactcacaaaactgtggttctcccccctgcccatattactacatgtccctggagtttatatctttcagacttgtctgcactgagcttccaccaatttgtcaaatacagatcaggtttccctaccacccgtgcagttgaaaacccacatacaacttttgactcctccagagcttaactactcatagcctgctattgactggaagccttgccaataacataaacagttgattaatacatattttatatgttttctgtattatatattgtattcttacaataaagagaaaagaagatgttattaagaaaatcataaggaagataaaatatatttactgttcattaagtggttcccatgggtgctggttcccatggaggttgccccttgtgagtttttgctcagggaagttgtgattctctatatttgcctgttggtctcctaatttgggagtcatcagttttccctgtgacctcacttctcttacagagttaagaacagttgttggtttttcagtttgttcagtgttttacatgttgttagaacacagtggtacttctaagtttcttaacatgctagatcagaaacctgaagtctcacctaatttggctttttatattttttcttcttttttttcttccattgctaccaaagcatttttcatctgtgtctggggtgacattagagcagaatgtgatttctaggtaaacattattgggctccctagcagaaaaatttttgaaagtagtacatgaattctgtataattaaaattttcttttcatcttaataggtataggtaataggcacggcctattttttttttgctcaacagtctaaaatagtaatttaatcacctaatagccttagttatatagttgaaagaagagttggaaatctgattcatgggttggaaatcacctgtcacatatgagttttaggcactggtcactttattttgaaacagctttggggttttttcctttttcaactcataataggctttaacagcttttagttttgtttctgtttttttaacagcatgagttgccaaatttggttatagcttcttggtacaagatgggtaaatttgctttgtgttgtgtaattactttttattttaaatgctacctcttttatgaacactaactttacactaagattaggaaaatgagaattgcatgtctgcaacaaatagctatctgtagtattaaattgtgaaaatgtagactttggattggagctggcatctcttaatatgtaattgtaacatagagtaaataagtattttgtcccttgtagggtcaaacagtacagtgcatgggcagaattagagatgtaggcttttttttttttttttttttttactggcttagagaaccgtttgatcagctaatatggaattaagtccctagggctgcccaggcacaacattaactgctattaaaggaaaatttaaaagagtattagtgaaggttaaatactgaccatggacatctggcaaaattgatgttttttttcccctccaccattgtttatagtttattgttatttatcagagaattaatgtttattttcagaatctattaccataagaaatctgtttgaggacttcgtatgtgccaggaattctactaaataatgatataatgctgaacagaattagataggatcctcacttcgttaagcttacagtctagtggtatagatcaacattaatcaaagaataacacaaatagaaagcagagcagtggttcatgggattgactgtagagaagcatgagggaagttcccaggtgatggaaaatactttatttcttaatcgtggtggttacatgtgtgcatatgtttatgaaaatatattgtacatttaaagtggatacattttatcacatgtaaattatgactctataaagttaattaaaaagaataactcaggtaaggtggtgtgtgcgcctgtagtcccagctatttctgaggcaggaagatcacttgagcccaggagtttgagttcagcatgggcaacatgagacctgtgagactttgtctctaaaaaaatttaaataaataactaagataaatgtaaaattacagctgtagtaagttctacaaaggagagttacatgggctatgacgatgtaagatagcaagaactgacattggcagggaggaaatgatgatgagtagaagtaaataagtgaagtgtggggattgatgtcaaggggacagtataaaagaaataacagcatgcgccaaggccctaaaattggaaagtccttggcaaattaaaggagtttgaaaaaggccattgtgtgcaaagcagaaaataggtactacaaggtaaaagatggagctaagcggtaggtaaggctaaaccttgtcagccattgttaaatattgaattgtatcctaagcacaactcagtggaaagcagttaaagttctttaattgggggaggcaatgaaggggtaataaaattggttatagaaatactgctctggctctagtgttgagaatgaattggagtagccagagtagattcaagaagactttagtaagattattccaacaggccaggacctgttatagggtggtggcaatggagagagatggacagaatggagagtgtatttaggaggtaaaaatgacagaacttggtgatgcactgaatgtgaaatggggaaggtgtctaggaggactactaggtttatggtttgcgtattagggtggatgatagcagtttcatttactgagacagggagccctggcagagtacccagcttttagagtgggtagggggaaggggagagtgcatctggtgttgggcattttgaagtgatttacatacaacaaactgaaggtatctttaacactgagtccagcaggttagcatatttattcagcaagcattgcacctttttttgttgtttttggggtcttcaactcctggcctcgaatcctccctccttcccccgcctctcccagcctccgcctcccaaagtgctgggatttcaggagtgagccaccgcgcctggccagcatcgcgctgtttgtgcagtgtgccctgtgctaggtcttgcagtgggtaccagtagagacataaaagtacaaaagataattggacgtttagtagagtcctgaaagggggcgggataggaagatacctaaccataagaaaaaccagcaagagcggaaaaggagctagtcctccagatcaataagttaatcacttatgtttgtgattccctgcattttgggtgattctctgtcgaggtcctcttaagtccagacttttgatataatctgcagtttgcgccatttggattcctgaagcatctttacaagccacctacattccttatggagctgtggcacaacagcaagcccacgatgtctcaccggattaataaaaatataggcgctcacgcttttgtttaccgatatagtatctcctcctcccctcactccatcaacccccacgcgacacaactttccggaagtaagcaaaatccgttatcaaggtgaaactccggggaccaggctccacagctgccataaactggatggcacgttagaagccggtgggtgtaggtgaggcacgctggcgcccgcgggcccttctccagccgctacccagtgggaatccgcggggctgaagccccgaaaccaggctgagcgtcccagagcgcaacctccctttcccccagcagcgccggcgccgcagaagccgcgtgtccccaggcgcactcccccaaggtgaacccccgccccccacggaggcggctgggtcgcgggtctgggcggggcgctccggacgccctcccgccgctgcgcacccctcccgcgagctgccagctccctcggcctctccacccaaaactggcccaaccgccaatcgtctgcctctcacctcctacagcaggtgacccatggccaatcgccaggggtctctttgccaggagccgccagggccagccaatcggggcgacccctccgccggggaggggacgggaaaggggtggggggtgaagggggtgaagggggtgtcccgggggacgggctgaacctcagtcaggaccgcctgcaccgcagtccggggatcgggtcgaggggagaagaaaaaggggtgctcgggagcagcccccggctacctcccctggaggcacagagggcgggggccttggcgaatggctttcttgctggccacttgcggaggtttggattcaggatttgttcctagtgtccaagattttgataagaaacttacagaagctgatgcttacctacaaatcttgattgaacaattaaagctttttgatgacaagcttcaaaactgcaaagaagatgaacagagaaagaaaattgaaactctcaaagagacaacaaatagcatggtagaatcaattaaacactgcattgtgttgctgcagattgccaaaagtactattaatcccgtagatgcaatatatcaacctagtcctttggaacctgtgatcagcacaatgccttcccagactgtgttacctccagaacctgttcagttgtgtaagtcagagcagcgtccatcttccctaccagttggacctgtgttggctaccttgggacatcatcagactcctacaccaaatagtacaggcagtggccattcaccaccgagtagcagtctcacttctccaagccacgtgaacttgtctccaaatacagtcccagagttctcttactccagcagtgaagatgaattttatgatgctgatgaattccatcaaagtggctcatccccaaagcgcttaatagattcttctggatctgcctcagtcctgacacacagcagctcgggaaatagtctaaaacgcccagataccacagaatcacttaattcttccttgtccaatggaacaagtgatgctgacctgtttgattcacatgatgacagagatgatgatgcggaggcagggtctgtggaggagcacaagagcgttatcatgcatctcttgtcgcaggttagacttggaatggatcttactaaggtagttcttccaacgtttattcttgaaagaagatctcttttagaaatgtatgcagacttttttgcacatccggacctgtttgtgagcattagtgaccagaaggatcccaaggatcgaatggttcaggttgtgaaatggtacctctcagcctttcatgcgggaaggaaaggatcagttgccaaaaagccatacaatcccattttgggcgagatttttcagtgtcattggacattaccaaatgatactgaagagaacacagaactagtttcagaaggaccagttccctgggtttccaaaaacagtgtaacatttgtggctgagcaggtttcccatcatccacccatttcagccttttatgctgagtgttttaacaagaagatacaattcaatgctcatatctggaccaaatcaaaattccttgggatgtcaattggggtgcacaacatagggcagggctgtgtctcatgtctagactatgatgaacattacattctcacattccccaatggctatggaaggcaagtgtgtccatttcctctgatcagcagtagactctgctgttccttgagacatgccccttccccctcttcctcttaactgtcaaccttacctaaaaacttttgattttgcaggtctatcctcacagtgccctgggtggaattaggaggagaatgcaatattaattgttccaaaacaggctatagtgcaaatatcatcttccacactaaacccttctatgggggcaagaagcacagaattactgccgagattttttctccaaatgacaagaagtctttttgctcaattgaaggggaatggaatggtgtgatgtatgcaaaatatgcaacaggggaaaatacagtctttgtagataccaagaagttgcctataatcaagaagaaagtgaggaagttggaagatcagaacgagtatgaatcccgcagcctttggaaggatgtcactttcaacttaaaaatcagagacattgatgcagcaactgaagcaaagcacaggcttgaagaaagacaaagagcagaagcccgagaaaggaaggagaaggaaattcagtgggagacaaggttatttcatgaagatggagaatgctgggtttatgatgaaccattactgaaacgtcttggtgctgccaagcattaggttggaagatgcaaagtttatacctgatgatcagggcagtaggcataattcagcaacaaacaatcttcctttgggagaaacctgttcattccaatcttctaattacagtggttcctatctcagggatactggactttctgacgcagatgaacaattaaggggaaaagcttcccttttccctctgtggcagttacgattttgacttcagtcctgagaaaaacttcaggttttgaaaatcagatgatgtcttctccttttccaaacaccacacgttgaaagcatttataaatccaagtctgaaactctgcgctctagtactgctgttaagatacacaacttgtttcttagttcatataatctcgggatacacacacacacacacatatatatacacacacatacgtatacacacacatacatatatataaatatacctgatgccagatttttttcataaatattctgcctactgtaaatatgggttcctctgagttgttttagaaaattagcgcaatgtattaaaatcaagtgttaggaaatttcatggtcttacctacaataacttttattttggaattgaactattattaaattgtatctaatcctggattacagtttaattaattattcttagtgcttaaggcttcataaagtaatttttccaacctttttttaaaaagagcatcttttattatcttttatggttaaacttggaagccaattatttggcaaccttgaatacaagagctagcttttcaaagaaagacacttgaaataatggaggatccattcttttcctctgtcagattgtatgttctgtctttagcccctgccaggcaattccccagaatcttcacttaactcatattgcacatgtagggctgcctaccaacattttatccaaaaatgttttattgccttagagggtttgggaagagtgtgtatttatagatccccaccccacagtgaacaaaaatagatagatagatagaataaaatgaatgccacagcagcagatggctcattctgaagggaaatacagaactatatctatctatctatctatcatcttttttatttaaaaatacattaaaaaaacaggtattagtacctagcatttagttagttattcaatatactggttacgtaaggcctttcaagaagtagattctcagtctgagaggacacaggccagggcttctcaaagtgctgctgcaggctttctggtctcgcttggcc

SEQ ID NO: 735160 - DNA, 19171 bp, Homo sapiens
  misc_feature (19171)..(19171): n is a, c, g, or t
gtaagggtctttacatggtttccagatagttcattagttgttgctttctttttttgtctgttttctgttttttttttttaaataactgtggtatgatgtaataggaacttataatttctgagttgcttatttttcctttacagttatagtaaagttatactcatttattttctcctgctttctgcagagtaaaatactgatttttgtctagaaacaagacagtgcaagacaatgttgaaagtgaaattctatgttaaaatatgccagatttattttaagaatttaatatctgtagtcagttatcaatacaaccaaattacataattatgcatgataataggtaaatactgagaagttcacctcattttcttgttaaaggatttggctattaccgtatgtgtcagttagtactcttttgtatggtagtgaaagaaaactcaacccaaactgattcatgaagaagaaagtaaatctggttagatgtggtttgaattaggtaattcatgtcatgaggactcagatctcccatctctatttctacgttccacttttgcattggcttcattttcggttaggttctcccttggtggtggtaaggtggttgtagcaatgtcagcctcccatttttggaaccgagtccataggaggctattctttctagaccttaataggagtaacacaattattgctcatcaccctagctttggccatgtgtcaaatcctgaccagtcacaatttcacagtcatagattctaccctggagctgggatgttactggcctcactagaaacacattgctgatagggtagaaggtgtgttcatcctacccaacccgacccgcaccaaagtcagaatagggaaaaacagatgttgggtgacatgcaactaacgtctgccgtactacactgaagatatttttctatgtttattctccagtgaaagagcttatatttgtggtacataggggattttgttttaatttagaaaatttaattgtagaaaacatgttttataaccctttctctgtactttgttctatatcaggaattgacttgattagataaggtgacatagggtatcttaggccctacaagatagtaaaccccccatcacttgaaagtattcagtagaggcttaaaaaacattattaaaggatgtggttattaggggactttaagaaatgaatatgaaattgaagtaggaaatctttaagctactctgtgagttatgccttttaaaagcaatttgtaattcctgtagatttcttttaaatttaggcagtttcataaatgactatagcatcattttagcaaatttgtgatcctgtaagaggaggataagtgttttttgtttgtttgtttgttttttgtttttttgagacagagtctcactttgtaccccagaaagtaaatctagttagatgtggtttgtctcggctcactgcaacctccaccccgtgcgttctagcaattctcctgcctcagccaccacacctggcctaagaggggaggataagtgttttagtgatcatattagactgaatgtggcagatgagatttcccgcccccccattgttggttagactgacattcaacattcaacaagagccacctgcccttgtaggcatttctgccactatacccctacataaacctagagtgctattgcttacttgctttccttcaaatacattttttcatttgtggcctccacattcttgtgtgtgatgtcctttctctgtgaaatgtcttctaccctttttttcaaagcctagtttagaactgacctcttctatgaaccctctgccgactggcctttccttccccagtcccccaagttcaaaatgatctctttcctttgaatactatagtatttgcacaattcactatctccttatcatattcttcttgtttatttgttatcagctgatgttgacatcataagttcaggttcctaactagatccaatattggaatttttcagcttttgctaagaagagagcttgtatgtctttgggaataatgggcagaaaaagataactttgagaagtcttagacttctaatagctttgatatttaaaagtacatgtaatacaagaggtttttttcctacatttaatgcatggagaagataggacatttagaaatatggaattaatgttcatttgactggcaaaagattattttctcagatgtagtgaagtgtggtaaagaacttcactctagagccagaatgtctgtgtttgtatcccagagcccaccacttacatttaaccattaacattcaacttactgtctctgagtttcagtggcctcatctataaaatgaggataataagagtacctacttcatagagttgttttagtggttaaataaactaacgtaaacttgctagaacttgataaactaatattggatgagaactggttgaaataatgcctggctatagtaaaaacttggtaaatgttagttgccattacaatgcaactactgttcctaccattccctctgccagtgcctggtattcagtagcactcagtaaatgttagttaaatgaagaaataactgaaggaatgaatgaacaaatggttgatgtagagattgcttttccattgttgtttattgaatattttgagatgtataacatactgtctgttaggcactgtgggatgggcactcacggagctgtcttccaaaggggtataggagaggagacgcagtgatctcagcaacctacctttaaaacatatcctagtatctactgccatgttaggttctcttcttttgctttttttaaaaaaaaattctcacaaaactccccccacccacttcagtttatagatgaggaagctcctactacataatagtgcttcccagtctaattcttgacctcattgtatttatatgtcctttttttttttgacagagtctcactcattgcagtggcacaatcacagctcactgcaacctctgcctcccctgctcaagtgatcctcccacctcaacctcctgagtagctgggactacaggcatgcaccaccacgcctggctaatttttgtatttttttgtagagatgcggttttgccatgttggccaggctggtctcgaactcctgggctcaagccatctgcccactttggcctctgagagtgctgagattataggcatgagccaccattcccagccatgttttcctttttcattgaactttatctactttagccattaaactccactccattggtcttgtcattactaagagctgaaccacctgcaaaatattaagttaaaaagcgttttctttgacaacagttttcttttcttcatcttcctctatcactttacttctgaacttttattctctcattttgatctgacccctacttctctgtttttcctggccatttagtactttcttgttttgctcatcccatttcccagtggagaccttctggtctgctgctttatcactggttttgttagaagacatacaaatggcaaggaggtatatgaaaaggtgcctaacatcattgatcatcagagaaatgcagaccaaaactacaatgagatatcatttcaccccagttaaaatggctttttttttttttttccaaaagacaggcaataacaaagtactggtgaggatgtggagtaaagggaacccacatacactattagtaggaatgtaaattagtacagccactgtggagaacagtttgaaggttcctcaaaaaactaaaaatagagctaccatataatccagcaatcccactgctaggtatatatccaaaagaaaggcaatcaatatacggaagagatacctgcacacccaggtttattgcagcactattcacaatagccaagatttggaagcaacccaggtgtccaacagatgaatggataaagaaaacatggtatataaacacaatggaatactattcagctgtgaaaaagaatgaaatcctgtcatttgcaatcctgtcttgaatagaactggaggtcatgatgttaagtgaaataagacaggcacaaacttcacatgttctcacttatttgtgggagctaaaaattaaaacaatcgaactcatggagctagagaatagaattatggttaccagaggctggaagggtggttgggcgtataagtgtagggggagtggggatggttaatgggtacaaaaaaatgagaacgaataagatctacttgataacacaacagggtgactatagtcaacagtaattatacatttaaaaataactagaagagtataattagattgtaacacaaaagataaatgcttgaggtgatggatacctatttaccctgatgtgattattacttatttcatgcctatatcaaaatatttatactccaaaaatatatatacctactatgtacccacaaaaatttaaaaatttatatattgtttttgctatcacctttagaatttcttgtcattggatagttcgtctgtataccattctggtcttcattccccagggcccccgttgtctgatttttctgcttctagaactgttagaggtcacaaaagcaagatggttgtatctatcacaatttttgtctgactttaactgggtatctgttacgatttagtagtcatcttactgacttcttgttggtttccaattgaatcctcacagtagactgttttcattgtaatcagtatcgaattatagcctgttcccttcttcataaatgaaggctttcttcttcaacagttcttagtgacttcacctgtactttatttctctgctttgaatatttcgaagaaaacatattcttgctctttcccaaggttaacactacatacattaccttgaccacaggatgttttcttgcagattgtgacctaattccatcacccttcagcagcccccaccgttttcatggattcagctaaaccttctgtaagatgactctttttccccctaatctttatatctcttttgatatgtagctttagtctcactttttttccttttggattttgccagttagatgtctccctggaattccacttcagcatggctaagactaagcttgtcttctctttcctccccaaagcaaattgtaattaggatagactgaaggtgacagaagataactaagatcttcttcatcctttcggctcttatggaagctgaattccagtagtcattctaaatttgttgtatgtcagcttatggtatcttttcatgtctttacattcagccaaagaggaagttccttgaaggggagaccagagggcgtgctgtgcttcttaatcctctctttcttaaccagtaagaggcattcagtagatatctgatgatactgattaatagaggggaacttttcagattcttttttttttttaaccctagtaagctttagtacaaactaaatgctgagagattatcaagtaagggattgatcatcacaagaagactcaggatgttacatcctgtaggttttatagtttcctatattgtaaaaaatatgagttatagcagcttgtctggatgtcatacaggtataaaaatcagttttataaacttgagtaaattggggcccattttagaaaaaactcttgcaggctgtgaatgccaatatataagtaaagtattaagtataatgttatttaatgtgggcaaacataaagccaggtgtaaattttttaggtttaaaatcttatagaactatacatccaaaagaaaatttcaagttaaacataatacaaagcaatacaatctaaattaacattaatttaatgtgatgaatgatattgccttgctaaaagtgggtcactacttacaatgtgcaaatggtactcatcgttagggtatagattcttttaaactatgacatacgtacactaccatgtggaacgtgatgatgtgttctctgttctaactactgggaagacttccttggcatagcacatgccatggggtcagttggctttgacttcatatagatatgccatttacttggtcagtgtcacttctatgacaagtagtatgttgtgccagtttgattataagtacaaatatgggcaatgaagtaacttggttttaaggttgttactaagctgagtaacagtgtgtggctatacaaatttttataggctatcaggaatgaaaacacaggagattgttgtagattcaagtattttagattcaagtttgaagatgctcatgcagatgtttaactgagttgtatagacctttatgtttctttctttttctctttttttttttttgagacagagtcttgctctgtcacccaagctggagtgcaatggtgtgatctcggcttactgcaacctccgcctcccaggttcaagcaattctcctgcctcagcctcccaagtagctgggattacagatgtgcaccacgacgcccagctgattttttgtattttagtagaggcggggtctcaccatgttgtcaagatggtctcaatctcctgaccttgtgatccacccacctctgcctcccaaagtgctgtgattacaggcgtgagccaccgcgcctgactgacctttatgtttcttaactttatgctatacatcagttgatatttcaaaaatttaaatggtttctatgattattctttgggctaagaaattgggcattaattgtcctcatatgtatggtttttgtggctacttcatgtagattttatttttggtggttatcaaattggaatttttttttttttttttttttttgagacggagtctcattctgtttcccaggttggagtacagtggtgcaatctcagctcactgcagcctcgacctcccaggctcaagcagtcctctcacctcagccttctaagtagctgggactacaggcacgcaccaccacacctggctagttttttgtgtttttagtagagatggggttttaccctgttggccaggctggtcttgaactcctggcctcaagtgatccacctgcctcagcctcccaaagtgctgggattagaggcatgagccaccacacctggctgaaattggaatttcattggtactgcctgtaattttatgttaatttttttttttttttgtcgtcactagcttttatctaaagcccctagagagaaaggccatgataccttgtatacaaggttataagagtatacaagggaaagggagggctgaagggaacagggtgggctggtacaagcctcattagaaataccattgagtctgtgagtaaaacatcattatatgaaaaggagatgtggttttagggtggtccaattacttttgcaccagcctaataaaattacaagtcattatcaatagagacattgtaaaacctttttttttcccaaaagaagtatcaggtatgataattacatgtctgcccaactttcgttatagattaacataacttaattgtatttaaggtacaatttaggagagttgctgaaaaatgaatctttagtattgggatgccttgattctaccctcaatagctataatggattatgtgtctgagtagattaataaaaatcttttgagcatttttcttgaactacttcactgaagattagctttttgagcatccattttaatttctcagtatataaggatcggtttatcacaactgtattgttttccctggccttgttagattatattttcatatcatgtagaaaaataggtgtattcgttctcccttgaagtcctttgtctcccaaaggaaatggttgcaatacagatgtgtcacctcttccacaggtaaagtggaatggagaagtagccagttaaatagtgcatgctcaatttggaacatttagagcatacaggaaagttatttatttggtaaatattttttaagcatttactatgtttcatgcattgtactagttgtagaggatataattgaatacaactacatgtagcccttgactttatggaactagtctagtataaagatttaagattgcctggcatggtggctcacgccactaatcccagcactttgagaggccaaggcaggattgcttgaggccagaagtttaagagtagcttggtcaacataatgagactccatctctaaaataaatagatagatagatagatagatagatagatagatagatagatagaagtagttagacaacacaaagcagtttcactcatcttgtggcaaggagttatgtatttctaatcaaatttggcaactcaagcattttcaacaaaatctacatgttttttcagaataaagtgaccaacacagaatgttacctgtaaaaatcagagcaataattgctatctaaaataattttgaaaattaagtggtactgaaaggctcatatagcaaaaatatggcctcctgtcattgtactttcctacttcccagactcaccattttcaacattttttagtagtttattttgccattttatagcatagtacctgacattttatttattcaacagacatttcttaagtacctaatacatgccattccttgtttgaagggatgctaaggatacagtggtgaacaaggcgttgtggggttgtatagagggtattcattcctaaccttgaaccaaatatttctttctgttggataatgcattaaaaattgcaaacagtttacaaacttttggagcaatggtggccttgatcataaagtagggactgcttctaccgtatacatgcttggtggtgtatttgtgatatctggctaaagtttctacatggaaattgactgactttagttttgagacttctgggaaccagtcaggcaaaatagtgaaactgtgtatcctgtttccaagagttgtcttttaaggttatctgcttcattcatttggcctgacttgctaggcaaatgcctagggtaaatatgatttgattaactataacaacaacagcaacaacaacaactttattttttagagcagtttgaggttcacagcaaaattgagcagaatgtacagagattttccctatacccgcttcccctacgcatgtgcggcctcccctactatcaacatcccccaccagagtggtttgttacaattaatgaacctacattgacacatcattatcactcaaggtccgtagtttacattagagtccactcttggtgttgtgtatgggtttggtcgattttataatgacatttatccaccattatagtgtcatacatagtaattttgctaccctaaaaatccagtgtgctccacctgttcctccttccctcctccctcatccctggcaaccactgaactttttaacatctccatagttttgccttttccagaatgtcatatcattggaatcacacagtatgcagccttttcaaatgggcttctttccgttagtaataggcatttaagtttcatcctcatcttttcatggcttgatagctcatttctttccctccctcttttcttccctgtcttccttccttcctcttctttcctgtttcctctttcttcttccttttttaagagacaaggtgtctcactctgttgcccaggctggagtgcagtggcccaatcatagctcattgcagccttgaattcctgggctcaagtgatcctcctgcgttagcctcctgagtagctgggatcacaggctccagtcattttagtgctgaataatatttcattatctggatgtaccgcctattcattcacctactgaagaatatcttggttgcttctaagttttggcaattatgagtgaagttactataaacattgtatacaagttttatgtggatgtatgttgtcatctcccttgggcagataccaaggagtgccattgttggatcatatggtaaatatatctttagttttgtacagaattctaggttggtatttttttctctctcagtcctttattttatttggagacagtctcgctatgtcgcccaggctgccatacagtggtgccatctgggctcactgaaacctccacctcccaggttcaagcgattcttgtgccttggcctcccaagtagctgggattacaggagtgcgccaccacgcctgctaatttttgtatttttagtagagacagggttttgccatgttgcccaggctggtctcaaactcctgaccttaagtgattcacccacctcaatctcccaaaatcctgggattacaggcctgagctactgtgcctgatctctctcagtactttaaagaaatatttcattccacttttcttttttttcttctttttgagatggagtctcactctgtcgcctgggctggagtgcagtggcgcgatctcagctcactgccacctccgcctcctgggttcaagtgattctcctgcctcagcctcctgaatagctgagattacaggcgcccaccaccatgcccagctaattttttgcatttttagtagagacgggggttccaccatgttggccaggctggtctcgaactcctgacctcgtgattcgcacatctcggcctcccaaattgctgggattacaggtgtgagctaccacgcctggcccactcttcttgcttacatagtttctgaggagatgtcagatgtaatttttatttttgctcttctgtaggcaagttgagttttttccccctctagcttctctcaggatttttttctttatctttgattttcagtagtttgaaaattatatgcctagctgtcagggttttttgcttgtttgtttttgttttctcaggtgtgactccagaaaggttctaaagaggagctttacaatctcttctctggggtttatggagacttcctttacccttctgtgttagccccttaaagcactgcgtcaaccttaaaagggcacaggaaagggtgtctatgccatttttatgccatttatcctgcttggtgttttctgagctttcttcatctgcggtttaatgtctcacattaatttgtagaaattctctgtcattgtttcaaatttttcttcagttcttttctctgtttcttcttctggtgttcccattatgcttttgtggttgtcgtacagttattggatattttgttccaggcttttttttttccagtctttttttccttttgcttctcggttttgtaggtgtctgttgagatactctcaagtgcagatattctttcctcagctttgtctagtttactaataagcccattaaaggcagtcttcatttctgttacagtctttttgatcagtagcatttcttttttattctttcttaaaatttctgtctttctgcttacattgcccatctgttcttgcatggtttctactttgtccattagagttcttaggatatttatcataattatttcaaatttctggtgtaacaattccaacatccctgcaacatccaagtctagtttcgatgcttactgtgtctcttccagctgtgttttttcctatttaatatgtcttataattttttcttgatagccatacatgatgcattaggtaacagaaactgctgtgagtggacctttagtaatgtggtggtaaggtgtgcatggaggggaaacattttcagtctgttagtgaacttttgtcaacttcacatgtgcttctcaagtccatcctgtaagtgggagagtagggctagagaggactgaagttgggtatatattaaatactttctcctacaaagaagcctagaggggacgcattaggggattttttttcccccagtattcactgtgatgacccttattgagctcctggaggtaaaactcacaaaactgtggttctcccccctgcccatattactacatgtccctggagtttatatctttcagacttgtctgcactgagcttccaccaatttgtcaaatacagatcaggtttccctaccacccgtgcagttgaaaacccacatacaacttttgactcctccagagcttaactactcatagcctgctattgactggaagccttgccaataacataaacagttgattaatacatattttatatgttttctgtattatatattgtattcttacaataaagagaaaagaagatgttattaagaaaatcataaggaagataaaatatatttactgttcattaagtggttcccatgggtgctggttcccatggaggttgccccttgtgagtttttgctcagggaagttgtgattctctatatttgcctgttggtctcctaatttgggagtcatcagttttccctgtgacctcacttctcttacagagttaagaacagttgttggtttttcagtttgttcagtgttttacatgttgttagaacacagtggtacttctaagtttcttaacatgctagatcagaaacctgaagtctcacctaatttggctttttatattttttcttcttttttttcttccattgctaccaaagcatttttcatctgtgtctggggtgacattagagcagaatgtgatttctaggtaaacattattgggctccctagcagaaaaatttttgaaagtagtacatgaattctgtataattaaaattttcttttcatcttaataggtataggtaataggcacggcctattttttttttgctcaacagtctaaaatagtaatttaatcacctaatagccttagttatatagttgaaagaagagttggaaatctgattcatgggttggaaatcacctgtcacatatgagttttaggcactggtcactttattttgaaacagctttggggttttttcctttttcaactcataataggctttaacagcttttagttttgtttctgtttttttaacagcatgagttgccaaatttggttatagcttcttggtacaagatgggtaaatttgctttgtgttgtgtaattactttttattttaaatgctacctcttttatgaacactaactttacactaagattaggaaaatgagaattgcatgtctgcaacaaatagctatctgtagtattaaattgtgaaaatgtagactttggattggagctggcatctcttaatatgtaattgtaacatagagtaaataagtattttgtcccttgtagggtcaaacagtacagtgcatgggcagaattagagatgtaggcttttttttttttttttttttttactggcttagagaaccgtttgatcagctaatatggaattaagtccctagggctgcccaggcacaacattaactgctattaaaggaaaatttaaaagagtattagtgaaggttaaatactgaccatggacatctggcaaaattgatgttttttttcccctccaccattgtttatagtttattgttatttatcagagaattaatgtttattttcagaatctattaccataagaaatctgtttgaggacttcgtatgtgccaggaattctactaaataatgatataatgctgaacagaattagataggatcctcacttcgttaagcttacagtctagtggtatagatcaacattaatcaaagaataacacaaatagaaagcagagcagtggttcatgggattgactgtagagaagcatgagggaagttcccaggtgatggaaaatactttatttcttaatcgtggtggttacatgtgtgcatatgtttatgaaaatatattgtacatttaaagtggatacattttatcacatgtaaattatgactctataaagttaattaaaaagaataactcaggtaaggtggtgtgtgcgcctgtagtcccagctatttctgaggcaggaagatcacttgagcccaggagtttgagttcagcatgggcaacatgagacctgtgagactttgtctctaaaaaaatttaaataaataactaagataaatgtaaaattacagctgtagtaagttctacaaaggagagttacatgggctatgacgatgtaagatagcaagaactgacattggcagggaggaaatgatgatgagtagaagtaaataagtgaagtgtggggattgatgtcaaggggacagtataaaagaaataacagcatgcgccaaggccctaaaattggaaagtccttggcaaattaaaggagtttgaaaaaggccattgtgtgcaaagcagaaaataggtactacaaggtaaaagatggagctaagcggtaggtaaggctaaaccttgtcagccattgttaaatattgaattgtatcctaagcacaactcagtggaaagcagttaaagttctttaattgggggaggcaatgaaggggtaataaaattggttatagaaatactgctctggctctagtgttgagaatgaattggagtagccagagtagattcaagaagactttagtaagattattccaacaggccaggacctgttatagggtggtggcaatggagagagatggacagaatggagagtgtatttaggaggtaaaaatgacagaacttggtgatgcactgaatgtgaaatggggaaggtgtctaggaggactactaggtttatggtttgcgtattagggtggatgatagcagtttcatttactgagacagggagccctggcagagtacccagcttttagagtgggtagggggaaggggagagtgcatctggtgttgggcattttgaagtgatttacatacaacaaactgaaggtatctttaacactgagtccagcaggttagcatatttattcagcaagcattgcacctttttttgttgtttttggggtcttcaactcctggcctcgaatcctccctccttcccccgcctctcccagcctccgcctcccaaagtgctgggatttcaggagtgagccaccgcgcctggccagcatcgcgctgtttgtgcagtgtgccctgtgctaggtcttgcagtgggtaccagtagagacataaaagtacaaaagataattggacgtttagtagagtcctgaaagggggcgggataggaagatacctaaccataagaaaaaccagcaagagcggaaaaggagctagtcctccagatcaataagttaatcacttatgtttgtgattccctgcattttgggtgattctctgtcgaggtcctcttaagtccagacttttgatataatctgcagtttgcgccatttggattcctgaagcatctttacaagccacctacattccttatggagctgtggcacaacagcaagcccacgatgtctcaccggattaataaaaatataggcgctcacgcttttgtttaccgatatagtatctcctcctcccctcactccatcaacccccacgcgacacaactttccggaagtaagcaaaatccgttatcaaggtgaaactccggggaccaggctccacagctgccataaactggatggcacgttagaagccggtgggtgtaggtgaggcacgctggcgcccgcgggcccttctccagccgctacccagtgggaatccgcggggctgaagccccgaaaccaggctgagcgtcccagagcgcaacctccctttcccccagcagcgccggcgccgcagaagccgcgtgtccccaggcgcactcccccaaggtgaacccccgccccccacggaggcggctgggtcgcgggtctgggcggggcgctccggacgccctcccgccgctgcgcacccctcccgcgagctgccagctccctcggcctctccacccaaaactggcccaaccgccaatcgtctgcctctcacctcctacagcaggtgacccatggccaatcgccaggggtctctttgccaggagccgccagggccagccaatcggggcgacccctccgccggggaggggacgggaaaggggtggggggtgaagggggtgaagggggtgtcccgggggacgggctgaacctcagtcaggaccgcctgcaccgcagtccggggatcgggtcgaggggagaagaaaaaggggtgctcgggagcagcccccggctacctcccctggaggcacagagggcgggggccttggcgaatggctttcttgctggccacttgcggaggtttggattcaggatttgttcctagtgtccaagattttgataagaaacttacagaagctgatgcttacctacaaatcttgattgaacaattaaagctttttgatgacaagcttcaaaactgcaaagaagatgaacagagaaagaaaattgaaactctcaaagagacaacaaatagcatggtagaatcaattaaacactgcattgtgttgctgcagattgccaaaagtactattaatcccgtagatgcaatatatcaacctagtcctttggaacctgtgatcagcacaatgccttcccagactgtgttacctccagaacctgttcagttgtgtaagtcagagcagcgtccatcttccctaccagttggacctgtgttggctaccttgggacatcatcagactcctacaccaaatagtacaggcagtggccattcaccaccgagtagcagtctcacttctccaagccacgtgaacttgtctccaaatacagtcccagagttctcttactccagcagtgaagatgaattttatgatgctgatgaattccatcaaagtggctcatccccaaagcgcttaatagattcttctggatctgcctcagtcctgacacacagcagctcgggaaatagtctaaaacgcccagataccacagaatcacttaattcttccttgtccaatggaacaagtgatgctgacctgtttgattcacatgatgacagagatgatgatgcggaggcagggtctgtggaggagcacaagagcgttatcatgcatctcttgtcgcaggttagacttggaatggatcttactaaggtagttcttccaacgtttattcttgaaagaagatctcttttagaaatgtatgcagacttttttgcacatccggacctgtttgtgagcattagtgaccagaaggatcccaaggatcgaatggttcaggttgtgaaatggtacctctcagcctttcatgcgggaaggaaaggatcagttgccaaaaagccatacaatcccattttgggcgagatttttcagtgtcattggacattaccaaatgatactgaagagaacacagaactagtttcagaaggaccagttccctgggtttccaaaaacagtgtaacatttgtggctgagcaggtttcccatcatccacccatttcagccttttatgctgagtgttttaacaagaagatacaattcaatgctcatatctggaccaaatcaaaattccttgggatgtcaattggggtgcacaacatagggcagggctgtgtctcatgtctagactatgatgaacattacattctcacattccccaatggctatggaaggcaagtgtgtccatttcctctgatcagcagtagactctgctgttccttgagacatgccccttccccctcttcctcttaactgtcaaccttacctaaaaacttttgattttgcaggtctatcctcacagtgccctgggtggaattaggaggagaatgcaatattaattgttccaaaacaggctatagtgcaaatatcatcttccacactaaacccttctatgggggcaagaagcacagaattactgccgagattttttctccaaatgacaagaagtctttttgctcaattgaaggggaatggaatggtgtgatgtatgcaaaatatgcaacaggggaaaatacagtctttgtagataccaagaagttgcctataatcaagaagaaagtgaggaagttggaagatcagaacgagtatgaatcccgcagcctttggaaggatgtcactttcaacttaaaaatcagagacattgatgcagcaactgaagcaaagcacaggcttgaagaaagacaaagagcagaagcccgagaaaggaaggagaaggaaattcagtgggagacaaggttatttcatgaagatggagaatgctgggtttatgatgaaccattactgaaacgtcttggtgctgccaagcattaggttggaagatgcaaagtttatacctgatgatcagggcagtaggcataattcagcaacaaacaatcttcctttgggagaaacctgttcattccaatcttctaattacagtggttcctatctcagggatactggactttctgacgcagatgaacaattaaggggaaaagcttcccttttccctctgtggcagttacgattttgacttcagtcctgagaaaaacttcaggttttgaaaatcagatgatgtcttctccttttccaaacaccacacgttgaaagcatttataaatccaagtctgaaactctgcgctctagtactgctgttaagatacacaacttgtttcttagttcatataatctcgggatacacacacacacacacatatatatacacacacatacgtatacacacacatacatatatataaatatacctgatgccagatttttttcataaatattctgcctactgtaaatatgggttcctctgagttgttttagaaaattagcgcaatgtattaaaatcaagtgttaggaaatttcatggtcttacctacaataacttttattttggaattgaactattattaaattgtatctaatcctggaaaaaaaaaaaaaaaaaaaaaaaaaaaaaaaacaaaaaaaagaacaaaataaaaaaaaagaaaacaacaaaaaaaaaaacaacaaaaaacaaaagagagggaggaggcgcaacaagcacaacgaagcactaccccgggagggggcacgccgcacacagaacgccggagcggcacgcccggaccccactatctagaaacgacaaagcgtgtgcccacacaaaacaaaagtaaaaagagcgcagacttatcaatcagacacacgccaagcgacgagacgcggccgcagatcctcaacaaacacagcacactgaatagcaaggtggagagaaacacaacctggtggctgacgcagcgacacacatcctgcgaaggaaaagacgagacactcacactaccatgggagagtggaggagcaaaacaacacacaggcgagaagaacaacaaaaacccagccacaccagcaaacataaacacgccaccatgacaacggcgacaacacaacaacgaccacgtctcaagcccgagtcactaactgagcacagacaacaccgcacacacaactacaatcagccgcggaacaaaggacaactaactacgaacgacaaccgactgatcagagcagagacaaacactcaactccaaccgagggagcgatcaaagaacaaataaggan

SEQ ID NO: 735161 - DNA, 18660 bp, Homo sapiens
gtaagggtctttacatggtttccagatagttcattagttgttgctttctttttttgtctgttttctgttttttttttttaaataactgtggtatgatgtaataggaacttataatttctgagttgcttatttttcctttacagttatagtaaagttatactcatttattttctcctgctttctgcagagtaaaatactgatttttgtctagaaacaagacagtgcaagacaatgttgaaagtgaaattctatgttaaaatatgccagatttattttaagaatttaatatctgtagtcagttatcaatacaaccaaattacataattatgcatgataataggtaaatactgagaagttcacctcattttcttgttaaaggatttggctattaccgtatgtgtcagttagtactcttttgtatggtagtgaaagaaaactcaacccaaactgattcatgaagaagaaagtaaatctggttagatgtggtttgaattaggtaattcatgtcatgaggactcagatctcccatctctatttctacgttccacttttgcattggcttcattttcggttaggttctcccttggtggtggtaaggtggttgtagcaatgtcagcctcccatttttggaaccgagtccataggaggctattctttctagaccttaataggagtaacacaattattgctcatcaccctagctttggccatgtgtcaaatcctgaccagtcacaatttcacagtcatagattctaccctggagctgggatgttactggcctcactagaaacacattgctgatagggtagaaggtgtgttcatcctacccaacccgacccgcaccaaagtcagaatagggaaaaacagatgttgggtgacatgcaactaacgtctgccgtactacactgaagatatttttctatgtttattctccagtgaaagagcttatatttgtggtacataggggattttgttttaatttagaaaatttaattgtagaaaacatgttttataaccctttctctgtactttgttctatatcaggaattgacttgattagataaggtgacatagggtatcttaggccctacaagatagtaaaccccccatcacttgaaagtattcagtagaggcttaaaaaacattattaaaggatgtggttattaggggactttaagaaatgaatatgaaattgaagtaggaaatctttaagctactctgtgagttatgccttttaaaagcaatttgtaattcctgtagatttcttttaaatttaggcagtttcataaatgactatagcatcattttagcaaatttgtgatcctgtaagaggaggataagtgttttttgtttgtttgtttgttttttgtttttttgagacagagtctcactttgtaccccagaaagtaaatctagttagatgtggtttgtctcggctcactgcaacctccaccccgtgcgttctagcaattctcctgcctcagccaccacacctggcctaagaggggaggataagtgttttagtgatcatattagactgaatgtggcagatgagatttcccgcccccccattgttggttagactgacattcaacattcaacaagagccacctgcccttgtaggcatttctgccactatacccctacataaacctagagtgctattgcttacttgctttccttcaaatacattttttcatttgtggcctccacattcttgtgtgtgatgtcctttctctgtgaaatgtcttctaccctttttttcaaagcctagtttagaactgacctcttctatgaaccctctgccgactggcctttccttccccagtcccccaagttcaaaatgatctctttcctttgaatactatagtatttgcacaattcactatctccttatcatattcttcttgtttatttgttatcagctgatgttgacatcataagttcaggttcctaactagatccaatattggaatttttcagcttttgctaagaagagagcttgtatgtctttgggaataatgggcagaaaaagataactttgagaagtcttagacttctaatagctttgatatttaaaagtacatgtaatacaagaggtttttttcctacatttaatgcatggagaagataggacatttagaaatatggaattaatgttcatttgactggcaaaagattattttctcagatgtagtgaagtgtggtaaagaacttcactctagagccagaatgtctgtgtttgtatcccagagcccaccacttacatttaaccattaacattcaacttactgtctctgagtttcagtggcctcatctataaaatgaggataataagagtacctacttcatagagttgttttagtggttaaataaactaacgtaaacttgctagaacttgataaactaatattggatgagaactggttgaaataatgcctggctatagtaaaaacttggtaaatgttagttgccattacaatgcaactactgttcctaccattccctctgccagtgcctggtattcagtagcactcagtaaatgttagttaaatgaagaaataactgaaggaatgaatgaacaaatggttgatgtagagattgcttttccattgttgtttattgaatattttgagatgtataacatactgtctgttaggcactgtgggatgggcactcacggagctgtcttccaaaggggtataggagaggagacgcagtgatctcagcaacctacctttaaaacatatcctagtatctactgccatgttaggttctcttcttttgctttttttaaaaaaaaattctcacaaaactccccccacccacttcagtttatagatgaggaagctcctactacataatagtgcttcccagtctaattcttgacctcattgtatttatatgtcctttttttttttgacagagtctcactcattgcagtggcacaatcacagctcactgcaacctctgcctcccctgctcaagtgatcctcccacctcaacctcctgagtagctgggactacaggcatgcaccaccacgcctggctaatttttgtatttttttgtagagatgcggttttgccatgttggccaggctggtctcgaactcctgggctcaagccatctgcccactttggcctctgagagtgctgagattataggcatgagccaccattcccagccatgttttcctttttcattgaactttatctactttagccattaaactccactccattggtcttgtcattactaagagctgaaccacctgcaaaatattaagttaaaaagcgttttctttgacaacagttttcttttcttcatcttcctctatcactttacttctgaacttttattctctcattttgatctgacccctacttctctgtttttcctggccatttagtactttcttgttttgctcatcccatttcccagtggagaccttctggtctgctgctttatcactggttttgttagaagacatacaaatggcaaggaggtatatgaaaaggtgcctaacatcattgatcatcagagaaatgcagaccaaaactacaatgagatatcatttcaccccagttaaaatggctttttttttttttttccaaaagacaggcaataacaaagtactggtgaggatgtggagtaaagggaacccacatacactattagtaggaatgtaaattagtacagccactgtggagaacagtttgaaggttcctcaaaaaactaaaaatagagctaccatataatccagcaatcccactgctaggtatatatccaaaagaaaggcaatcaatatacggaagagatacctgcacacccaggtttattgcagcactattcacaatagccaagatttggaagcaacccaggtgtccaacagatgaatggataaagaaaacatggtatataaacacaatggaatactattcagctgtgaaaaagaatgaaatcctgtcatttgcaatcctgtcttgaatagaactggaggtcatgatgttaagtgaaataagacaggcacaaacttcacatgttctcacttatttgtgggagctaaaaattaaaacaatcgaactcatggagctagagaatagaattatggttaccagaggctggaagggtggttgggcgtataagtgtagggggagtggggatggttaatgggtacaaaaaaatgagaacgaataagatctacttgataacacaacagggtgactatagtcaacagtaattatacatttaaaaataactagaagagtataattagattgtaacacaaaagataaatgcttgaggtgatggatacctatttaccctgatgtgattattacttatttcatgcctatatcaaaatatttatactccaaaaatatatatacctactatgtacccacaaaaatttaaaaatttatatattgtttttgctatcacctttagaatttcttgtcattggatagttcgtctgtataccattctggtcttcattccccagggcccccgttgtctgatttttctgcttctagaactgttagaggtcacaaaagcaagatggttgtatctatcacaatttttgtctgactttaactgggtatctgttacgatttagtagtcatcttactgacttcttgttggtttccaattgaatcctcacagtagactgttttcattgtaatcagtatcgaattatagcctgttcccttcttcataaatgaaggctttcttcttcaacagttcttagtgacttcacctgtactttatttctctgctttgaatatttcgaagaaaacatattcttgctctttcccaaggttaacactacatacattaccttgaccacaggatgttttcttgcagattgtgacctaattccatcacccttcagcagcccccaccgttttcatggattcagctaaaccttctgtaagatgactctttttccccctaatctttatatctcttttgatatgtagctttagtctcactttttttccttttggattttgccagttagatgtctccctggaattccacttcagcatggctaagactaagcttgtcttctctttcctccccaaagcaaattgtaattaggatagactgaaggtgacagaagataactaagatcttcttcatcctttcggctcttatggaagctgaattccagtagtcattctaaatttgttgtatgtcagcttatggtatcttttcatgtctttacattcagccaaagaggaagttccttgaaggggagaccagagggcgtgctgtgcttcttaatcctctctttcttaaccagtaagaggcattcagtagatatctgatgatactgattaatagaggggaacttttcagattcttttttttttttaaccctagtaagctttagtacaaactaaatgctgagagattatcaagtaagggattgatcatcacaagaagactcaggatgttacatcctgtaggttttatagtttcctatattgtaaaaaatatgagttatagcagcttgtctggatgtcatacaggtataaaaatcagttttataaacttgagtaaattggggcccattttagaaaaaactcttgcaggctgtgaatgccaatatataagtaaagtattaagtataatgttatttaatgtgggcaaacataaagccaggtgtaaattttttaggtttaaaatcttatagaactatacatccaaaagaaaatttcaagttaaacataatacaaagcaatacaatctaaattaacattaatttaatgtgatgaatgatattgccttgctaaaagtgggtcactacttacaatgtgcaaatggtactcatcgttagggtatagattcttttaaactatgacatacgtacactaccatgtggaacgtgatgatgtgttctctgttctaactactgggaagacttccttggcatagcacatgccatggggtcagttggctttgacttcatatagatatgccatttacttggtcagtgtcacttctatgacaagtagtatgttgtgccagtttgattataagtacaaatatgggcaatgaagtaacttggttttaaggttgttactaagctgagtaacagtgtgtggctatacaaatttttataggctatcaggaatgaaaacacaggagattgttgtagattcaagtattttagattcaagtttgaagatgctcatgcagatgtttaactgagttgtatagacctttatgtttctttctttttctctttttttttttttgagacagagtcttgctctgtcacccaagctggagtgcaatggtgtgatctcggcttactgcaacctccgcctcccaggttcaagcaattctcctgcctcagcctcccaagtagctgggattacagatgtgcaccacgacgcccagctgattttttgtattttagtagaggcggggtctcaccatgttgtcaagatggtctcaatctcctgaccttgtgatccacccacctctgcctcccaaagtgctgtgattacaggcgtgagccaccgcgcctgactgacctttatgtttcttaactttatgctatacatcagttgatatttcaaaaatttaaatggtttctatgattattctttgggctaagaaattgggcattaattgtcctcatatgtatggtttttgtggctacttcatgtagattttatttttggtggttatcaaattggaatttttttttttttttttttttttgagacggagtctcattctgtttcccaggttggagtacagtggtgcaatctcagctcactgcagcctcgacctcccaggctcaagcagtcctctcacctcagccttctaagtagctgggactacaggcacgcaccaccacacctggctagttttttgtgtttttagtagagatggggttttaccctgttggccaggctggtcttgaactcctggcctcaagtgatccacctgcctcagcctcccaaagtgctgggattagaggcatgagccaccacacctggctgaaattggaatttcattggtactgcctgtaattttatgttaatttttttttttttttgtcgtcactagcttttatctaaagcccctagagagaaaggccatgataccttgtatacaaggttataagagtatacaagggaaagggagggctgaagggaacagggtgggctggtacaagcctcattagaaataccattgagtctgtgagtaaaacatcattatatgaaaaggagatgtggttttagggtggtccaattacttttgcaccagcctaataaaattacaagtcattatcaatagagacattgtaaaacctttttttttcccaaaagaagtatcaggtatgataattacatgtctgcccaactttcgttatagattaacataacttaattgtatttaaggtacaatttaggagagttgctgaaaaatgaatctttagtattgggatgccttgattctaccctcaatagctataatggattatgtgtctgagtagattaataaaaatcttttgagcatttttcttgaactacttcactgaagattagctttttgagcatccattttaatttctcagtatataaggatcggtttatcacaactgtattgttttccctggccttgttagattatattttcatatcatgtagaaaaataggtgtattcgttctcccttgaagtcctttgtctcccaaaggaaatggttgcaatacagatgtgtcacctcttccacaggtaaagtggaatggagaagtagccagttaaatagtgcatgctcaatttggaacatttagagcatacaggaaagttatttatttggtaaatattttttaagcatttactatgtttcatgcattgtactagttgtagaggatataattgaatacaactacatgtagcccttgactttatggaactagtctagtataaagatttaagattgcctggcatggtggctcacgccactaatcccagcactttgagaggccaaggcaggattgcttgaggccagaagtttaagagtagcttggtcaacataatgagactccatctctaaaataaatagatagatagatagatagatagatagatagatagatagatagaagtagttagacaacacaaagcagtttcactcatcttgtggcaaggagttatgtatttctaatcaaatttggcaactcaagcattttcaacaaaatctacatgttttttcagaataaagtgaccaacacagaatgttacctgtaaaaatcagagcaataattgctatctaaaataattttgaaaattaagtggtactgaaaggctcatatagcaaaaatatggcctcctgtcattgtactttcctacttcccagactcaccattttcaacattttttagtagtttattttgccattttatagcatagtacctgacattttatttattcaacagacatttcttaagtacctaatacatgccattccttgtttgaagggatgctaaggatacagtggtgaacaaggcgttgtggggttgtatagagggtattcattcctaaccttgaaccaaatatttctttctgttggataatgcattaaaaattgcaaacagtttacaaacttttggagcaatggtggccttgatcataaagtagggactgcttctaccgtatacatgcttggtggtgtatttgtgatatctggctaaagtttctacatggaaattgactgactttagttttgagacttctgggaaccagtcaggcaaaatagtgaaactgtgtatcctgtttccaagagttgtcttttaaggttatctgcttcattcatttggcctgacttgctaggcaaatgcctagggtaaatatgatttgattaactataacaacaacagcaacaacaacaactttattttttagagcagtttgaggttcacagcaaaattgagcagaatgtacagagattttccctatacccgcttcccctacgcatgtgcggcctcccctactatcaacatcccccaccagagtggtttgttacaattaatgaacctacattgacacatcattatcactcaaggtccgtagtttacattagagtccactcttggtgttgtgtatgggtttggtcgattttataatgacatttatccaccattatagtgtcatacatagtaattttgctaccctaaaaatccagtgtgctccacctgttcctccttccctcctccctcatccctggcaaccactgaactttttaacatctccatagttttgccttttccagaatgtcatatcattggaatcacacagtatgcagccttttcaaatgggcttctttccgttagtaataggcatttaagtttcatcctcatcttttcatggcttgatagctcatttctttccctccctcttttcttccctgtcttccttccttcctcttctttcctgtttcctctttcttcttccttttttaagagacaaggtgtctcactctgttgcccaggctggagtgcagtggcccaatcatagctcattgcagccttgaattcctgggctcaagtgatcctcctgcgttagcctcctgagtagctgggatcacaggctccagtcattttagtgctgaataatatttcattatctggatgtaccgcctattcattcacctactgaagaatatcttggttgcttctaagttttggcaattatgagtgaagttactataaacattgtatacaagttttatgtggatgtatgttgtcatctcccttgggcagataccaaggagtgccattgttggatcatatggtaaatatatctttagttttgtacagaattctaggttggtatttttttctctctcagtcctttattttatttggagacagtctcgctatgtcgcccaggctgccatacagtggtgccatctgggctcactgaaacctccacctcccaggttcaagcgattcttgtgccttggcctcccaagtagctgggattacaggagtgcgccaccacgcctgctaatttttgtatttttagtagagacagggttttgccatgttgcccaggctggtctcaaactcctgaccttaagtgattcacccacctcaatctcccaaaatcctgggattacaggcctgagctactgtgcctgatctctctcagtactttaaagaaatatttcattccacttttcttttttttcttctttttgagatggagtctcactctgtcgcctgggctggagtgcagtggcgcgatctcagctcactgccacctccgcctcctgggttcaagtgattctcctgcctcagcctcctgaatagctgagattacaggcgcccaccaccatgcccagctaattttttgcatttttagtagagacgggggttccaccatgttggccaggctggtctcgaactcctgacctcgtgattcgcacatctcggcctcccaaattgctgggattacaggtgtgagctaccacgcctggcccactcttcttgcttacatagtttctgaggagatgtcagatgtaatttttatttttgctcttctgtaggcaagttgagttttttccccctctagcttctctcaggatttttttctttatctttgattttcagtagtttgaaaattatatgcctagctgtcagggttttttgcttgtttgtttttgttttctcaggtgtgactccagaaaggttctaaagaggagctttacaatctcttctctggggtttatggagacttcctttacccttctgtgttagccccttaaagcactgcgtcaaccttaaaagggcacaggaaagggtgtctatgccatttttatgccatttatcctgcttggtgttttctgagctttcttcatctgcggtttaatgtctcacattaatttgtagaaattctctgtcattgtttcaaatttttcttcagttcttttctctgtttcttcttctggtgttcccattatgcttttgtggttgtcgtacagttattggatattttgttccaggcttttttttttccagtctttttttccttttgcttctcggttttgtaggtgtctgttgagatactctcaagtgcagatattctttcctcagctttgtctagtttactaataagcccattaaaggcagtcttcatttctgttacagtctttttgatcagtagcatttcttttttattctttcttaaaatttctgtctttctgcttacattgcccatctgttcttgcatggtttctactttgtccattagagttcttaggatatttatcataattatttcaaatttctggtgtaacaattccaacatccctgcaacatccaagtctagtttcgatgcttactgtgtctcttccagctgtgttttttcctatttaatatgtcttataattttttcttgatagccatacatgatgcattaggtaacagaaactgctgtgagtggacctttagtaatgtggtggtaaggtgtgcatggaggggaaacattttcagtctgttagtgaacttttgtcaacttcacatgtgcttctcaagtccatcctgtaagtgggagagtagggctagagaggactgaagttgggtatatattaaatactttctcctacaaagaagcctagaggggacgcattaggggattttttttcccccagtattcactgtgatgacccttattgagctcctggaggtaaaactcacaaaactgtggttctcccccctgcccatattactacatgtccctggagtttatatctttcagacttgtctgcactgagcttccaccaatttgtcaaatacagatcaggtttccctaccacccgtgcagttgaaaacccacatacaacttttgactcctccagagcttaactactcatagcctgctattgactggaagccttgccaataacataaacagttgattaatacatattttatatgttttctgtattatatattgtattcttacaataaagagaaaagaagatgttattaagaaaatcataaggaagataaaatatatttactgttcattaagtggttcccatgggtgctggttcccatggaggttgccccttgtgagtttttgctcagggaagttgtgattctctatatttgcctgttggtctcctaatttgggagtcatcagttttccctgtgacctcacttctcttacagagttaagaacagttgttggtttttcagtttgttcagtgttttacatgttgttagaacacagtggtacttctaagtttcttaacatgctagatcagaaacctgaagtctcacctaatttggctttttatattttttcttcttttttttcttccattgctaccaaagcatttttcatctgtgtctggggtgacattagagcagaatgtgatttctaggtaaacattattgggctccctagcagaaaaatttttgaaagtagtacatgaattctgtataattaaaattttcttttcatcttaataggtataggtaataggcacggcctattttttttttgctcaacagtctaaaatagtaatttaatcacctaatagccttagttatatagttgaaagaagagttggaaatctgattcatgggttggaaatcacctgtcacatatgagttttaggcactggtcactttattttgaaacagctttggggttttttcctttttcaactcataataggctttaacagcttttagttttgtttctgtttttttaacagcatgagttgccaaatttggttatagcttcttggtacaagatgggtaaatttgctttgtgttgtgtaattactttttattttaaatgctacctcttttatgaacactaactttacactaagattaggaaaatgagaattgcatgtctgcaacaaatagctatctgtagtattaaattgtgaaaatgtagactttggattggagctggcatctcttaatatgtaattgtaacatagagtaaataagtattttgtcccttgtagggtcaaacagtacagtgcatgggcagaattagagatgtaggcttttttttttttttttttttttactggcttagagaaccgtttgatcagctaatatggaattaagtccctagggctgcccaggcacaacattaactgctattaaaggaaaatttaaaagagtattagtgaaggttaaatactgaccatggacatctggcaaaattgatgttttttttcccctccaccattgtttatagtttattgttatttatcagagaattaatgtttattttcagaatctattaccataagaaatctgtttgaggacttcgtatgtgccaggaattctactaaataatgatataatgctgaacagaattagataggatcctcacttcgttaagcttacagtctagtggtatagatcaacattaatcaaagaataacacaaatagaaagcagagcagtggttcatgggattgactgtagagaagcatgagggaagttcccaggtgatggaaaatactttatttcttaatcgtggtggttacatgtgtgcatatgtttatgaaaatatattgtacatttaaagtggatacattttatcacatgtaaattatgactctataaagttaattaaaaagaataactcaggtaaggtggtgtgtgcgcctgtagtcccagctatttctgaggcaggaagatcacttgagcccaggagtttgagttcagcatgggcaacatgagacctgtgagactttgtctctaaaaaaatttaaataaataactaagataaatgtaaaattacagctgtagtaagttctacaaaggagagttacatgggctatgacgatgtaagatagcaagaactgacattggcagggaggaaatgatgatgagtagaagtaaataagtgaagtgtggggattgatgtcaaggggacagtataaaagaaataacagcatgcgccaaggccctaaaattggaaagtccttggcaaattaaaggagtttgaaaaaggccattgtgtgcaaagcagaaaataggtactacaaggtaaaagatggagctaagcggtaggtaaggctaaaccttgtcagccattgttaaatattgaattgtatcctaagcacaactcagtggaaagcagttaaagttctttaattgggggaggcaatgaaggggtaataaaattggttatagaaatactgctctggctctagtgttgagaatgaattggagtagccagagtagattcaagaagactttagtaagattattccaacaggccaggacctgttatagggtggtggcaatggagagagatggacagaatggagagtgtatttaggaggtaaaaatgacagaacttggtgatgcactgaatgtgaaatggggaaggtgtctaggaggactactaggtttatggtttgcgtattagggtggatgatagcagtttcatttactgagacagggagccctggcagagtacccagcttttagagtgggtagggggaaggggagagtgcatctggtgttgggcattttgaagtgatttacatacaacaaactgaaggtatctttaacactgagtccagcaggttagcatatttattcagcaagcattgcacctttttttgttgtttttggggtcttcaactcctggcctcgaatcctccctccttcccccgcctctcccagcctccgcctcccaaagtgctgggatttcaggagtgagccaccgcgcctggccagcatcgcgctgtttgtgcagtgtgccctgtgctaggtcttgcagtgggtaccagtagagacataaaagtacaaaagataattggacgtttagtagagtcctgaaagggggcgggataggaagatacctaaccataagaaaaaccagcaagagcggaaaaggagctagtcctccagatcaataagttaatcacttatgtttgtgattccctgcattttgggtgattctctgtcgaggtcctcttaagtccagacttttgatataatctgcagtttgcgccatttggattcctgaagcatctttacaagccacctacattccttatggagctgtggcacaacagcaagcccacgatgtctcaccggattaataaaaatataggcgctcacgcttttgtttaccgatatagtatctcctcctcccctcactccatcaacccccacgcgacacaactttccggaagtaagcaaaatccgttatcaaggtgaaactccggggaccaggctccacagctgccataaactggatggcacgttagaagccggtgggtgtaggtgaggcacgctggcgcccgcgggcccttctccagccgctacccagtgggaatccgcggggctgaagccccgaaaccaggctgagcgtcccagagcgcaacctccctttcccccagcagcgccggcgccgcagaagccgcgtgtccccaggcgcactcccccaaggtgaacccccgccccccacggaggcggctgggtcgcgggtctgggcggggcgctccggacgccctcccgccgctgcgcacccctcccgcgagctgccagctccctcggcctctccacccaaaactggcccaaccgccaatcgtctgcctctcacctcctacagcaggtgacccatggccaatcgccaggggtctctttgccaggagccgccagggccagccaatcggggcgacccctccgccggggaggggacgggaaaggggtggggggtgaagggggtgaagggggtgtcccgggggacgggctgaacctcagtcaggaccgcctgcaccgcagtccggggatcgggtcgaggggagaagaaaaaggggtgctcgggagcagcccccggctacctcccctggaggcacagagggcgggggccttggcgaatggctttcttgctggccacttgcggaggtttggattcaggatttgttcctagtgtccaagattttgataagaaacttacagaagctgatgcttacctacaaatcttgattgaacaattaaagctttttgatgacaagcttcaaaactgcaaagaagatgaacagagaaagaaaattgaaactctcaaagagacaacaaatagcatggtagaatcaattaaacactgcattgtgttgctgcagattgccaaaagtactattaatcccgtagatgcaatatatcaacctagtcctttggaacctgtgatcagcacaatgccttcccagactgtgttacctccagaacctgttcagttgtgtaagtcagagcagcgtccatcttccctaccagttggacctgtgttggctaccttgggacatcatcagactcctacaccaaatagtacaggcagtggccattcaccaccgagtagcagtctcacttctccaagccacgtgaacttgtctccaaatacagtcccagagttctcttactccagcagtgaagatgaattttatgatgctgatgaattccatcaaagtggctcatccccaaagcgcttaatagattcttctggatctgcctcagtcctgacacacagcagctcgggaaatagtctaaaacgcccagataccacagaatcacttaattcttccttgtccaatggaacaagtgatgctgacctgtttgattcacatgatgacagagatgatgatgcggaggcagggtctgtggaggagcacaagagcgttatcatgcatctcttgtcgcaggttagacttggaatggatcttactaaggtagttcttccaacgtttattcttgaaagaagatctcttttagaaatgtatgcagacttttttgcacatccggacctgtttgtgagcattagtgaccagaaggatcccaaggatcgaatggttcaggttgtgaaatggtacctctcagcctttcatgcgggaaggaaaggatcagttgccaaaaagccatacaatcccattttgggcgagatttttcagtgtcattggacattaccaaatgatactgaagagaacacagaactagtttcagaaggaccagttccctgggtttccaaaaacagtgtaacatttgtggctgagcaggtttcccatcatccacccatttcagccttttatgctgagtgttttaacaagaagatacaattcaatgctcatatctggaccaaatcaaaattccttgggatgtcaattggggtgcacaacatagggcagggctgtgtctcatgtctagactatgatgaacattacattctcacattccccaatggctatggaaggcaagtgtgtccatttcctctgatcagcagtagactctgctgttccttgagacatgccccttccccctcttcctcttaactgtcaaccttacctaaaaacttttgattttgcaggtctatcctcacagtgccctgggtggaattaggaggagaatgcaatattaattgttccaaaacaggctatagtgcaaatatcatcttccacactaaacccttctatgggggcaagaagcacagaattactgccgagattttttctccaaatgacaagaagtctttttgctcaattgaaggggaatggaatggtgtgatgtatgcaaaatatgcaacaggggaaaatacagtctttgtagataccaagaagttgcctataatcaagaagaaagtgaggaagttggaagatcagaacgagtatgaatcccgcagcctttggaaggatgtcactttcaacttaaaaatcagagacattgatgcagcaactgaagcaaagcacaggcttgaagaaagacaaagagcagaagcccgagaaaggaaggagaaggaaattcagtgggagacaaggttatttcatgaagatggagaatgctgggtttatgatgaaccattactgaaacgtcttggtgctgccaagcattaggttggaagatgcaaagtttatacctgatgatcagggcagtaggcataattcagcaacaaacaatcttcctttgggagaaacctgttcattccaatcttctaattacagtggttcctatctcagggatactggactttctgacgcagatgaacaattaaggggaaaagcttcccttttccctctgtggcagttacgattttgacttcagtcctgagaaaaacttcaggttttgaaaatcagatgatgtcttctccttttccaaacaccacacgttgaaagcatttataaatccaagtctgaaactctgcgctctagtactgctgttaagatacacaacttgtttcttagttcatataatctcgggatacacacacacacacacatatatatacacacacatacgtatacacacacatacatatatataaatatacctgatgccagatttttttcataaatattctgcctactgtaaatatgggttcctctgagttgttttagaaaattagcgcaatgtattaaaatcaagtgttaggaaatttcatggtcttacctacaataacttttattttggaattgaactattattaaattgtatctaatcctggaaaaaaaacaaaaatgctagtaaaatgataatgtaccgaaattggagaaatattcaattgtaactcacttttaaaaataataaaaccttagggggggtcccggtacaaatttccccttatagagggcggttttaaatttaattggcggcttttaacaacgtt

SEQ ID NO: 735162 - DNA, 18450 bp, Homo sapiens
  misc_feature (18374)..(18374): n is a, c, g, or t
  misc_feature (18385)..(18385): n is a, c, g, or t
  misc_feature (18390)..(18390): n is a, c, g, or t
  misc_feature (18393)..(18393): n is a, c, g, or t
  misc_feature (18395)..(18395): n is a, c, g, or t
gtaagggtctttacatggtttccagatagttcattagttgttgctttctttttttgtctgttttctgttttttttttttaaataactgtggtatgatgtaataggaacttataatttctgagttgcttatttttcctttacagttatagtaaagttatactcatttattttctcctgctttctgcagagtaaaatactgatttttgtctagaaacaagacagtgcaagacaatgttgaaagtgaaattctatgttaaaatatgccagatttattttaagaatttaatatctgtagtcagttatcaatacaaccaaattacataattatgcatgataataggtaaatactgagaagttcacctcattttcttgttaaaggatttggctattaccgtatgtgtcagttagtactcttttgtatggtagtgaaagaaaactcaacccaaactgattcatgaagaagaaagtaaatctggttagatgtggtttgaattaggtaattcatgtcatgaggactcagatctcccatctctatttctacgttccacttttgcattggcttcattttcggttaggttctcccttggtggtggtaaggtggttgtagcaatgtcagcctcccatttttggaaccgagtccataggaggctattctttctagaccttaataggagtaacacaattattgctcatcaccctagctttggccatgtgtcaaatcctgaccagtcacaatttcacagtcatagattctaccctggagctgggatgttactggcctcactagaaacacattgctgatagggtagaaggtgtgttcatcctacccaacccgacccgcaccaaagtcagaatagggaaaaacagatgttgggtgacatgcaactaacgtctgccgtactacactgaagatatttttctatgtttattctccagtgaaagagcttatatttgtggtacataggggattttgttttaatttagaaaatttaattgtagaaaacatgttttataaccctttctctgtactttgttctatatcaggaattgacttgattagataaggtgacatagggtatcttaggccctacaagatagtaaaccccccatcacttgaaagtattcagtagaggcttaaaaaacattattaaaggatgtggttattaggggactttaagaaatgaatatgaaattgaagtaggaaatctttaagctactctgtgagttatgccttttaaaagcaatttgtaattcctgtagatttcttttaaatttaggcagtttcataaatgactatagcatcattttagcaaatttgtgatcctgtaagaggaggataagtgttttttgtttgtttgtttgttttttgtttttttgagacagagtctcactttgtaccccagaaagtaaatctagttagatgtggtttgtctcggctcactgcaacctccaccccgtgcgttctagcaattctcctgcctcagccaccacacctggcctaagaggggaggataagtgttttagtgatcatattagactgaatgtggcagatgagatttcccgcccccccattgttggttagactgacattcaacattcaacaagagccacctgcccttgtaggcatttctgccactatacccctacataaacctagagtgctattgcttacttgctttccttcaaatacattttttcatttgtggcctccacattcttgtgtgtgatgtcctttctctgtgaaatgtcttctaccctttttttcaaagcctagtttagaactgacctcttctatgaaccctctgccgactggcctttccttccccagtcccccaagttcaaaatgatctctttcctttgaatactatagtatttgcacaattcactatctccttatcatattcttcttgtttatttgttatcagctgatgttgacatcataagttcaggttcctaactagatccaatattggaatttttcagcttttgctaagaagagagcttgtatgtctttgggaataatgggcagaaaaagataactttgagaagtcttagacttctaatagctttgatatttaaaagtacatgtaatacaagaggtttttttcctacatttaatgcatggagaagataggacatttagaaatatggaattaatgttcatttgactggcaaaagattattttctcagatgtagtgaagtgtggtaaagaacttcactctagagccagaatgtctgtgtttgtatcccagagcccaccacttacatttaaccattaacattcaacttactgtctctgagtttcagtggcctcatctataaaatgaggataataagagtacctacttcatagagttgttttagtggttaaataaactaacgtaaacttgctagaacttgataaactaatattggatgagaactggttgaaataatgcctggctatagtaaaaacttggtaaatgttagttgccattacaatgcaactactgttcctaccattccctctgccagtgcctggtattcagtagcactcagtaaatgttagttaaatgaagaaataactgaaggaatgaatgaacaaatggttgatgtagagattgcttttccattgttgtttattgaatattttgagatgtataacatactgtctgttaggcactgtgggatgggcactcacggagctgtcttccaaaggggtataggagaggagacgcagtgatctcagcaacctacctttaaaacatatcctagtatctactgccatgttaggttctcttcttttgctttttttaaaaaaaaattctcacaaaactccccccacccacttcagtttatagatgaggaagctcctactacataatagtgcttcccagtctaattcttgacctcattgtatttatatgtcctttttttttttgacagagtctcactcattgcagtggcacaatcacagctcactgcaacctctgcctcccctgctcaagtgatcctcccacctcaacctcctgagtagctgggactacaggcatgcaccaccacgcctggctaatttttgtatttttttgtagagatgcggttttgccatgttggccaggctggtctcgaactcctgggctcaagccatctgcccactttggcctctgagagtgctgagattataggcatgagccaccattcccagccatgttttcctttttcattgaactttatctactttagccattaaactccactccattggtcttgtcattactaagagctgaaccacctgcaaaatattaagttaaaaagcgttttctttgacaacagttttcttttcttcatcttcctctatcactttacttctgaacttttattctctcattttgatctgacccctacttctctgtttttcctggccatttagtactttcttgttttgctcatcccatttcccagtggagaccttctggtctgctgctttatcactggttttgttagaagacatacaaatggcaaggaggtatatgaaaaggtgcctaacatcattgatcatcagagaaatgcagaccaaaactacaatgagatatcatttcaccccagttaaaatggctttttttttttttttccaaaagacaggcaataacaaagtactggtgaggatgtggagtaaagggaacccacatacactattagtaggaatgtaaattagtacagccactgtggagaacagtttgaaggttcctcaaaaaactaaaaatagagctaccatataatccagcaatcccactgctaggtatatatccaaaagaaaggcaatcaatatacggaagagatacctgcacacccaggtttattgcagcactattcacaatagccaagatttggaagcaacccaggtgtccaacagatgaatggataaagaaaacatggtatataaacacaatggaatactattcagctgtgaaaaagaatgaaatcctgtcatttgcaatcctgtcttgaatagaactggaggtcatgatgttaagtgaaataagacaggcacaaacttcacatgttctcacttatttgtgggagctaaaaattaaaacaatcgaactcatggagctagagaatagaattatggttaccagaggctggaagggtggttgggcgtataagtgtagggggagtggggatggttaatgggtacaaaaaaatgagaacgaataagatctacttgataacacaacagggtgactatagtcaacagtaattatacatttaaaaataactagaagagtataattagattgtaacacaaaagataaatgcttgaggtgatggatacctatttaccctgatgtgattattacttatttcatgcctatatcaaaatatttatactccaaaaatatatatacctactatgtacccacaaaaatttaaaaatttatatattgtttttgctatcacctttagaatttcttgtcattggatagttcgtctgtataccattctggtcttcattccccagggcccccgttgtctgatttttctgcttctagaactgttagaggtcacaaaagcaagatggttgtatctatcacaatttttgtctgactttaactgggtatctgttacgatttagtagtcatcttactgacttcttgttggtttccaattgaatcctcacagtagactgttttcattgtaatcagtatcgaattatagcctgttcccttcttcataaatgaaggctttcttcttcaacagttcttagtgacttcacctgtactttatttctctgctttgaatatttcgaagaaaacatattcttgctctttcccaaggttaacactacatacattaccttgaccacaggatgttttcttgcagattgtgacctaattccatcacccttcagcagcccccaccgttttcatggattcagctaaaccttctgtaagatgactctttttccccctaatctttatatctcttttgatatgtagctttagtctcactttttttccttttggattttgccagttagatgtctccctggaattccacttcagcatggctaagactaagcttgtcttctctttcctccccaaagcaaattgtaattaggatagactgaaggtgacagaagataactaagatcttcttcatcctttcggctcttatggaagctgaattccagtagtcattctaaatttgttgtatgtcagcttatggtatcttttcatgtctttacattcagccaaagaggaagttccttgaaggggagaccagagggcgtgctgtgcttcttaatcctctctttcttaaccagtaagaggcattcagtagatatctgatgatactgattaatagaggggaacttttcagattcttttttttttttaaccctagtaagctttagtacaaactaaatgctgagagattatcaagtaagggattgatcatcacaagaagactcaggatgttacatcctgtaggttttatagtttcctatattgtaaaaaatatgagttatagcagcttgtctggatgtcatacaggtataaaaatcagttttataaacttgagtaaattggggcccattttagaaaaaactcttgcaggctgtgaatgccaatatataagtaaagtattaagtataatgttatttaatgtgggcaaacataaagccaggtgtaaattttttaggtttaaaatcttatagaactatacatccaaaagaaaatttcaagttaaacataatacaaagcaatacaatctaaattaacattaatttaatgtgatgaatgatattgccttgctaaaagtgggtcactacttacaatgtgcaaatggtactcatcgttagggtatagattcttttaaactatgacatacgtacactaccatgtggaacgtgatgatgtgttctctgttctaactactgggaagacttccttggcatagcacatgccatggggtcagttggctttgacttcatatagatatgccatttacttggtcagtgtcacttctatgacaagtagtatgttgtgccagtttgattataagtacaaatatgggcaatgaagtaacttggttttaaggttgttactaagctgagtaacagtgtgtggctatacaaatttttataggctatcaggaatgaaaacacaggagattgttgtagattcaagtattttagattcaagtttgaagatgctcatgcagatgtttaactgagttgtatagacctttatgtttctttctttttctctttttttttttttgagacagagtcttgctctgtcacccaagctggagtgcaatggtgtgatctcggcttactgcaacctccgcctcccaggttcaagcaattctcctgcctcagcctcccaagtagctgggattacagatgtgcaccacgacgcccagctgattttttgtattttagtagaggcggggtctcaccatgttgtcaagatggtctcaatctcctgaccttgtgatccacccacctctgcctcccaaagtgctgtgattacaggcgtgagccaccgcgcctgactgacctttatgtttcttaactttatgctatacatcagttgatatttcaaaaatttaaatggtttctatgattattctttgggctaagaaattgggcattaattgtcctcatatgtatggtttttgtggctacttcatgtagattttatttttggtggttatcaaattggaatttttttttttttttttttttttgagacggagtctcattctgtttcccaggttggagtacagtggtgcaatctcagctcactgcagcctcgacctcccaggctcaagcagtcctctcacctcagccttctaagtagctgggactacaggcacgcaccaccacacctggctagttttttgtgtttttagtagagatggggttttaccctgttggccaggctggtcttgaactcctggcctcaagtgatccacctgcctcagcctcccaaagtgctgggattagaggcatgagccaccacacctggctgaaattggaatttcattggtactgcctgtaattttatgttaatttttttttttttttgtcgtcactagcttttatctaaagcccctagagagaaaggccatgataccttgtatacaaggttataagagtatacaagggaaagggagggctgaagggaacagggtgggctggtacaagcctcattagaaataccattgagtctgtgagtaaaacatcattatatgaaaaggagatgtggttttagggtggtccaattacttttgcaccagcctaataaaattacaagtcattatcaatagagacattgtaaaacctttttttttcccaaaagaagtatcaggtatgataattacatgtctgcccaactttcgttatagattaacataacttaattgtatttaaggtacaatttaggagagttgctgaaaaatgaatctttagtattgggatgccttgattctaccctcaatagctataatggattatgtgtctgagtagattaataaaaatcttttgagcatttttcttgaactacttcactgaagattagctttttgagcatccattttaatttctcagtatataaggatcggtttatcacaactgtattgttttccctggccttgttagattatattttcatatcatgtagaaaaataggtgtattcgttctcccttgaagtcctttgtctcccaaaggaaatggttgcaatacagatgtgtcacctcttccacaggtaaagtggaatggagaagtagccagttaaatagtgcatgctcaatttggaacatttagagcatacaggaaagttatttatttggtaaatattttttaagcatttactatgtttcatgcattgtactagttgtagaggatataattgaatacaactacatgtagcccttgactttatggaactagtctagtataaagatttaagattgcctggcatggtggctcacgccactaatcccagcactttgagaggccaaggcaggattgcttgaggccagaagtttaagagtagcttggtcaacataatgagactccatctctaaaataaatagatagatagatagatagatagatagatagatagatagatagaagtagttagacaacacaaagcagtttcactcatcttgtggcaaggagttatgtatttctaatcaaatttggcaactcaagcattttcaacaaaatctacatgttttttcagaataaagtgaccaacacagaatgttacctgtaaaaatcagagcaataattgctatctaaaataattttgaaaattaagtggtactgaaaggctcatatagcaaaaatatggcctcctgtcattgtactttcctacttcccagactcaccattttcaacattttttagtagtttattttgccattttatagcatagtacctgacattttatttattcaacagacatttcttaagtacctaatacatgccattccttgtttgaagggatgctaaggatacagtggtgaacaaggcgttgtggggttgtatagagggtattcattcctaaccttgaaccaaatatttctttctgttggataatgcattaaaaattgcaaacagtttacaaacttttggagcaatggtggccttgatcataaagtagggactgcttctaccgtatacatgcttggtggtgtatttgtgatatctggctaaagtttctacatggaaattgactgactttagttttgagacttctgggaaccagtcaggcaaaatagtgaaactgtgtatcctgtttccaagagttgtcttttaaggttatctgcttcattcatttggcctgacttgctaggcaaatgcctagggtaaatatgatttgattaactataacaacaacagcaacaacaacaactttattttttagagcagtttgaggttcacagcaaaattgagcagaatgtacagagattttccctatacccgcttcccctacgcatgtgcggcctcccctactatcaacatcccccaccagagtggtttgttacaattaatgaacctacattgacacatcattatcactcaaggtccgtagtttacattagagtccactcttggtgttgtgtatgggtttggtcgattttataatgacatttatccaccattatagtgtcatacatagtaattttgctaccctaaaaatccagtgtgctccacctgttcctccttccctcctccctcatccctggcaaccactgaactttttaacatctccatagttttgccttttccagaatgtcatatcattggaatcacacagtatgcagccttttcaaatgggcttctttccgttagtaataggcatttaagtttcatcctcatcttttcatggcttgatagctcatttctttccctccctcttttcttccctgtcttccttccttcctcttctttcctgtttcctctttcttcttccttttttaagagacaaggtgtctcactctgttgcccaggctggagtgcagtggcccaatcatagctcattgcagccttgaattcctgggctcaagtgatcctcctgcgttagcctcctgagtagctgggatcacaggctccagtcattttagtgctgaataatatttcattatctggatgtaccgcctattcattcacctactgaagaatatcttggttgcttctaagttttggcaattatgagtgaagttactataaacattgtatacaagttttatgtggatgtatgttgtcatctcccttgggcagataccaaggagtgccattgttggatcatatggtaaatatatctttagttttgtacagaattctaggttggtatttttttctctctcagtcctttattttatttggagacagtctcgctatgtcgcccaggctgccatacagtggtgccatctgggctcactgaaacctccacctcccaggttcaagcgattcttgtgccttggcctcccaagtagctgggattacaggagtgcgccaccacgcctgctaatttttgtatttttagtagagacagggttttgccatgttgcccaggctggtctcaaactcctgaccttaagtgattcacccacctcaatctcccaaaatcctgggattacaggcctgagctactgtgcctgatctctctcagtactttaaagaaatatttcattccacttttcttttttttcttctttttgagatggagtctcactctgtcgcctgggctggagtgcagtggcgcgatctcagctcactgccacctccgcctcctgggttcaagtgattctcctgcctcagcctcctgaatagctgagattacaggcgcccaccaccatgcccagctaattttttgcatttttagtagagacgggggttccaccatgttggccaggctggtctcgaactcctgacctcgtgattcgcacatctcggcctcccaaattgctgggattacaggtgtgagctaccacgcctggcccactcttcttgcttacatagtttctgaggagatgtcagatgtaatttttatttttgctcttctgtaggcaagttgagttttttccccctctagcttctctcaggatttttttctttatctttgattttcagtagtttgaaaattatatgcctagctgtcagggttttttgcttgtttgtttttgttttctcaggtgtgactccagaaaggttctaaagaggagctttacaatctcttctctggggtttatggagacttcctttacccttctgtgttagccccttaaagcactgcgtcaaccttaaaagggcacaggaaagggtgtctatgccatttttatgccatttatcctgcttggtgttttctgagctttcttcatctgcggtttaatgtctcacattaatttgtagaaattctctgtcattgtttcaaatttttcttcagttcttttctctgtttcttcttctggtgttcccattatgcttttgtggttgtcgtacagttattggatattttgttccaggcttttttttttccagtctttttttccttttgcttctcggttttgtaggtgtctgttgagatactctcaagtgcagatattctttcctcagctttgtctagtttactaataagcccattaaaggcagtcttcatttctgttacagtctttttgatcagtagcatttcttttttattctttcttaaaatttctgtctttctgcttacattgcccatctgttcttgcatggtttctactttgtccattagagttcttaggatatttatcataattatttcaaatttctggtgtaacaattccaacatccctgcaacatccaagtctagtttcgatgcttactgtgtctcttccagctgtgttttttcctatttaatatgtcttataattttttcttgatagccatacatgatgcattaggtaacagaaactgctgtgagtggacctttagtaatgtggtggtaaggtgtgcatggaggggaaacattttcagtctgttagtgaacttttgtcaacttcacatgtgcttctcaagtccatcctgtaagtgggagagtagggctagagaggactgaagttgggtatatattaaatactttctcctacaaagaagcctagaggggacgcattaggggattttttttcccccagtattcactgtgatgacccttattgagctcctggaggtaaaactcacaaaactgtggttctcccccctgcccatattactacatgtccctggagtttatatctttcagacttgtctgcactgagcttccaccaatttgtcaaatacagatcaggtttccctaccacccgtgcagttgaaaacccacatacaacttttgactcctccagagcttaactactcatagcctgctattgactggaagccttgccaataacataaacagttgattaatacatattttatatgttttctgtattatatattgtattcttacaataaagagaaaagaagatgttattaagaaaatcataaggaagataaaatatatttactgttcattaagtggttcccatgggtgctggttcccatggaggttgccccttgtgagtttttgctcagggaagttgtgattctctatatttgcctgttggtctcctaatttgggagtcatcagttttccctgtgacctcacttctcttacagagttaagaacagttgttggtttttcagtttgttcagtgttttacatgttgttagaacacagtggtacttctaagtttcttaacatgctagatcagaaacctgaagtctcacctaatttggctttttatattttttcttcttttttttcttccattgctaccaaagcatttttcatctgtgtctggggtgacattagagcagaatgtgatttctaggtaaacattattgggctccctagcagaaaaatttttgaaagtagtacatgaattctgtataattaaaattttcttttcatcttaataggtataggtaataggcacggcctattttttttttgctcaacagtctaaaatagtaatttaatcacctaatagccttagttatatagttgaaagaagagttggaaatctgattcatgggttggaaatcacctgtcacatatgagttttaggcactggtcactttattttgaaacagctttggggttttttcctttttcaactcataataggctttaacagcttttagttttgtttctgtttttttaacagcatgagttgccaaatttggttatagcttcttggtacaagatgggtaaatttgctttgtgttgtgtaattactttttattttaaatgctacctcttttatgaacactaactttacactaagattaggaaaatgagaattgcatgtctgcaacaaatagctatctgtagtattaaattgtgaaaatgtagactttggattggagctggcatctcttaatatgtaattgtaacatagagtaaataagtattttgtcccttgtagggtcaaacagtacagtgcatgggcagaattagagatgtaggcttttttttttttttttttttttactggcttagagaaccgtttgatcagctaatatggaattaagtccctagggctgcccaggcacaacattaactgctattaaaggaaaatttaaaagagtattagtgaaggttaaatactgaccatggacatctggcaaaattgatgttttttttcccctccaccattgtttatagtttattgttatttatcagagaattaatgtttattttcagaatctattaccataagaaatctgtttgaggacttcgtatgtgccaggaattctactaaataatgatataatgctgaacagaattagataggatcctcacttcgttaagcttacagtctagtggtatagatcaacattaatcaaagaataacacaaatagaaagcagagcagtggttcatgggattgactgtagagaagcatgagggaagttcccaggtgatggaaaatactttatttcttaatcgtggtggttacatgtgtgcatatgtttatgaaaatatattgtacatttaaagtggatacattttatcacatgtaaattatgactctataaagttaattaaaaagaataactcaggtaaggtggtgtgtgcgcctgtagtcccagctatttctgaggcaggaagatcacttgagcccaggagtttgagttcagcatgggcaacatgagacctgtgagactttgtctctaaaaaaatttaaataaataactaagataaatgtaaaattacagctgtagtaagttctacaaaggagagttacatgggctatgacgatgtaagatagcaagaactgacattggcagggaggaaatgatgatgagtagaagtaaataagtgaagtgtggggattgatgtcaaggggacagtataaaagaaataacagcatgcgccaaggccctaaaattggaaagtccttggcaaattaaaggagtttgaaaaaggccattgtgtgcaaagcagaaaataggtactacaaggtaaaagatggagctaagcggtaggtaaggctaaaccttgtcagccattgttaaatattgaattgtatcctaagcacaactcagtggaaagcagttaaagttctttaattgggggaggcaatgaaggggtaataaaattggttatagaaatactgctctggctctagtgttgagaatgaattggagtagccagagtagattcaagaagactttagtaagattattccaacaggccaggacctgttatagggtggtggcaatggagagagatggacagaatggagagtgtatttaggaggtaaaaatgacagaacttggtgatgcactgaatgtgaaatggggaaggtgtctaggaggactactaggtttatggtttgcgtattagggtggatgatagcagtttcatttactgagacagggagccctggcagagtacccagcttttagagtgggtagggggaaggggagagtgcatctggtgttgggcattttgaagtgatttacatacaacaaactgaaggtatctttaacactgagtccagcaggttagcatatttattcagcaagcattgcacctttttttgttgtttttggggtcttcaactcctggcctcgaatcctccctccttcccccgcctctcccagcctccgcctcccaaagtgctgggatttcaggagtgagccaccgcgcctggccagcatcgcgctgtttgtgcagtgtgccctgtgctaggtcttgcagtgggtaccagtagagacataaaagtacaaaagataattggacgtttagtagagtcctgaaagggggcgggataggaagatacctaaccataagaaaaaccagcaagagcggaaaaggagctagtcctccagatcaataagttaatcacttatgtttgtgattccctgcattttgggtgattctctgtcgaggtcctcttaagtccagacttttgatataatctgcagtttgcgccatttggattcctgaagcatctttacaagccacctacattccttatggagctgtggcacaacagcaagcccacgatgtctcaccggattaataaaaatataggcgctcacgcttttgtttaccgatatagtatctcctcctcccctcactccatcaacccccacgcgacacaactttccggaagtaagcaaaatccgttatcaaggtgaaactccggggaccaggctccacagctgccataaactggatggcacgttagaagccggtgggtgtaggtgaggcacgctggcgcccgcgggcccttctccagccgctacccagtgggaatccgcggggctgaagccccgaaaccaggctgagcgtcccagagcgcaacctccctttcccccagcagcgccggcgccgcagaagccgcgtgtccccaggcgcactcccccaaggtgaacccccgccccccacggaggcggctgggtcgcgggtctgggcggggcgctccggacgccctcccgccgctgcgcacccctcccgcgagctgccagctccctcggcctctccacccaaaactggcccaaccgccaatcgtctgcctctcacctcctacagcaggtgacccatggccaatcgccaggggtctctttgccaggagccgccagggccagccaatcggggcgacccctccgccggggaggggacgggaaaggggtggggggtgaagggggtgaagggggtgtcccgggggacgggctgaacctcagtcaggaccgcctgcaccgcagtccggggatcgggtcgaggggagaagaaaaaggggtgctcgggagcagcccccggctacctcccctggaggcacagagggcgggggccttggcgaatggctttcttgctggccacttgcggaggtttggattcaggatttgttcctagtgtccaagattttgataagaaacttacagaagctgatgcttacctacaaatcttgattgaacaattaaagctttttgatgacaagcttcaaaactgcaaagaagatgaacagagaaagaaaattgaaactctcaaagagacaacaaatagcatggtagaatcaattaaacactgcattgtgttgctgcagattgccaaaagtactattaatcccgtagatgcaatatatcaacctagtcctttggaacctgtgatcagcacaatgccttcccagactgtgttacctccagaacctgttcagttgtgtaagtcagagcagcgtccatcttccctaccagttggacctgtgttggctaccttgggacatcatcagactcctacaccaaatagtacaggcagtggccattcaccaccgagtagcagtctcacttctccaagccacgtgaacttgtctccaaatacagtcccagagttctcttactccagcagtgaagatgaattttatgatgctgatgaattccatcaaagtggctcatccccaaagcgcttaatagattcttctggatctgcctcagtcctgacacacagcagctcgggaaatagtctaaaacgcccagataccacagaatcacttaattcttccttgtccaatggaacaagtgatgctgacctgtttgattcacatgatgacagagatgatgatgcggaggcagggtctgtggaggagcacaagagcgttatcatgcatctcttgtcgcaggttagacttggaatggatcttactaaggtagttcttccaacgtttattcttgaaagaagatctcttttagaaatgtatgcagacttttttgcacatccggacctgtttgtgagcattagtgaccagaaggatcccaaggatcgaatggttcaggttgtgaaatggtacctctcagcctttcatgcgggaaggaaaggatcagttgccaaaaagccatacaatcccattttgggcgagatttttcagtgtcattggacattaccaaatgatactgaagagaacacagaactagtttcagaaggaccagttccctgggtttccaaaaacagtgtaacatttgtggctgagcaggtttcccatcatccacccatttcagccttttatgctgagtgttttaacaagaagatacaattcaatgctcatatctggaccaaatcaaaattccttgggatgtcaattggggtgcacaacatagggcagggctgtgtctcatgtctagactatgatgaacattacattctcacattccccaatggctatggaaggcaagtgtgtccatttcctctgatcagcagtagactctgctgttccttgagacatgccccttccccctcttcctcttaactgtcaaccttacctaaaaacttttgattttgcaggtctatcctcacagtgccctgggtggaattaggaggagaatgcaatattaattgttccaaaacaggctatagtgcaaatatcatcttccacactaaacccttctatgggggcaagaagcacagaattactgccgagattttttctccaaatgacaagaagtctttttgctcaattgaaggggaatggaatggtgtgatgtatgcaaaatatgcaacaggggaaaatacagtctttgtagataccaagaagttgcctataatcaagaagaaagtgaggaagttggaagatcagaacgagtatgaatcccgcagcctttggaaggatgtcactttcaacttaaaaatcagagacattgatgcagcaactgaagcaaagcacaggcttgaagaaagacaaagagcagaagcccgagaaaggaaggagaaggaaattcagtgggagacaaggttatttcatgaagatggagaatgctgggtttatgatgaaccattactgaaacgtcttggtgctgccaagcattaggttggaagatgcaaagtttatacctgatgatcagggcagtaggcataattcagcaacaaacaatcttcctttgggagaaacctgttcattccaatcttctaattacagtggttcctatctcagggatactggactttctgacgcagatgaacaattaaggggaaaagcttcccttttccctctgtggcagttacgattttgacttcagtcctgagaaaaacttcaggttttgaaaatcagatgatgtcttctccttttccaaacaccacacgttgaaagcatttataaatccaagtctgaaactctgcgctctagtactgctgttaagatacacaacttgtttcttagttcatataatctcgggatacacacacacacacacatatatatacacacacatacgtatacacacacatacatatatataaatatacctgatgccagatttttttcataaatattctgcctactgtaaatatggggnccccgggtggntaaanatngngccggtttaacccggggggaattcggggtaccacacaaaaccattgggaggcaca

SEQ ID NO: 735163 - DNA, 18619 bp, Homo sapiens
gtaagggtctttacatggtttccagatagttcattagttgttgctttctttttttgtctgttttctgttttttttttttaaataactgtggtatgatgtaataggaacttataatttctgagttgcttatttttcctttacagttatagtaaagttatactcatttattttctcctgctttctgcagagtaaaatactgatttttgtctagaaacaagacagtgcaagacaatgttgaaagtgaaattctatgttaaaatatgccagatttattttaagaatttaatatctgtagtcagttatcaatacaaccaaattacataattatgcatgataataggtaaatactgagaagttcacctcattttcttgttaaaggatttggctattaccgtatgtgtcagttagtactcttttgtatggtagtgaaagaaaactcaacccaaactgattcatgaagaagaaagtaaatctggttagatgtggtttgaattaggtaattcatgtcatgaggactcagatctcccatctctatttctacgttccacttttgcattggcttcattttcggttaggttctcccttggtggtggtaaggtggttgtagcaatgtcagcctcccatttttggaaccgagtccataggaggctattctttctagaccttaataggagtaacacaattattgctcatcaccctagctttggccatgtgtcaaatcctgaccagtcacaatttcacagtcatagattctaccctggagctgggatgttactggcctcactagaaacacattgctgatagggtagaaggtgtgttcatcctacccaacccgacccgcaccaaagtcagaatagggaaaaacagatgttgggtgacatgcaactaacgtctgccgtactacactgaagatatttttctatgtttattctccagtgaaagagcttatatttgtggtacataggggattttgttttaatttagaaaatttaattgtagaaaacatgttttataaccctttctctgtactttgttctatatcaggaattgacttgattagataaggtgacatagggtatcttaggccctacaagatagtaaaccccccatcacttgaaagtattcagtagaggcttaaaaaacattattaaaggatgtggttattaggggactttaagaaatgaatatgaaattgaagtaggaaatctttaagctactctgtgagttatgccttttaaaagcaatttgtaattcctgtagatttcttttaaatttaggcagtttcataaatgactatagcatcattttagcaaatttgtgatcctgtaagaggaggataagtgttttttgtttgtttgtttgttttttgtttttttgagacagagtctcactttgtaccccagaaagtaaatctagttagatgtggtttgtctcggctcactgcaacctccaccccgtgcgttctagcaattctcctgcctcagccaccacacctggcctaagaggggaggataagtgttttagtgatcatattagactgaatgtggcagatgagatttcccgcccccccattgttggttagactgacattcaacattcaacaagagccacctgcccttgtaggcatttctgccactatacccctacataaacctagagtgctattgcttacttgctttccttcaaatacattttttcatttgtggcctccacattcttgtgtgtgatgtcctttctctgtgaaatgtcttctaccctttttttcaaagcctagtttagaactgacctcttctatgaaccctctgccgactggcctttccttccccagtcccccaagttcaaaatgatctctttcctttgaatactatagtatttgcacaattcactatctccttatcatattcttcttgtttatttgttatcagctgatgttgacatcataagttcaggttcctaactagatccaatattggaatttttcagcttttgctaagaagagagcttgtatgtctttgggaataatgggcagaaaaagataactttgagaagtcttagacttctaatagctttgatatttaaaagtacatgtaatacaagaggtttttttcctacatttaatgcatggagaagataggacatttagaaatatggaattaatgttcatttgactggcaaaagattattttctcagatgtagtgaagtgtggtaaagaacttcactctagagccagaatgtctgtgtttgtatcccagagcccaccacttacatttaaccattaacattcaacttactgtctctgagtttcagtggcctcatctataaaatgaggataataagagtacctacttcatagagttgttttagtggttaaataaactaacgtaaacttgctagaacttgataaactaatattggatgagaactggttgaaataatgcctggctatagtaaaaacttggtaaatgttagttgccattacaatgcaactactgttcctaccattccctctgccagtgcctggtattcagtagcactcagtaaatgttagttaaatgaagaaataactgaaggaatgaatgaacaaatggttgatgtagagattgcttttccattgttgtttattgaatattttgagatgtataacatactgtctgttaggcactgtgggatgggcactcacggagctgtcttccaaaggggtataggagaggagacgcagtgatctcagcaacctacctttaaaacatatcctagtatctactgccatgttaggttctcttcttttgctttttttaaaaaaaaattctcacaaaactccccccacccacttcagtttatagatgaggaagctcctactacataatagtgcttcccagtctaattcttgacctcattgtatttatatgtcctttttttttttgacagagtctcactcattgcagtggcacaatcacagctcactgcaacctctgcctcccctgctcaagtgatcctcccacctcaacctcctgagtagctgggactacaggcatgcaccaccacgcctggctaatttttgtatttttttgtagagatgcggttttgccatgttggccaggctggtctcgaactcctgggctcaagccatctgcccactttggcctctgagagtgctgagattataggcatgagccaccattcccagccatgttttcctttttcattgaactttatctactttagccattaaactccactccattggtcttgtcattactaagagctgaaccacctgcaaaatattaagttaaaaagcgttttctttgacaacagttttcttttcttcatcttcctctatcactttacttctgaacttttattctctcattttgatctgacccctacttctctgtttttcctggccatttagtactttcttgttttgctcatcccatttcccagtggagaccttctggtctgctgctttatcactggttttgttagaagacatacaaatggcaaggaggtatatgaaaaggtgcctaacatcattgatcatcagagaaatgcagaccaaaactacaatgagatatcatttcaccccagttaaaatggctttttttttttttttccaaaagacaggcaataacaaagtactggtgaggatgtggagtaaagggaacccacatacactattagtaggaatgtaaattagtacagccactgtggagaacagtttgaaggttcctcaaaaaactaaaaatagagctaccatataatccagcaatcccactgctaggtatatatccaaaagaaaggcaatcaatatacggaagagatacctgcacacccaggtttattgcagcactattcacaatagccaagatttggaagcaacccaggtgtccaacagatgaatggataaagaaaacatggtatataaacacaatggaatactattcagctgtgaaaaagaatgaaatcctgtcatttgcaatcctgtcttgaatagaactggaggtcatgatgttaagtgaaataagacaggcacaaacttcacatgttctcacttatttgtgggagctaaaaattaaaacaatcgaactcatggagctagagaatagaattatggttaccagaggctggaagggtggttgggcgtataagtgtagggggagtggggatggttaatgggtacaaaaaaatgagaacgaataagatctacttgataacacaacagggtgactatagtcaacagtaattatacatttaaaaataactagaagagtataattagattgtaacacaaaagataaatgcttgaggtgatggatacctatttaccctgatgtgattattacttatttcatgcctatatcaaaatatttatactccaaaaatatatatacctactatgtacccacaaaaatttaaaaatttatatattgtttttgctatcacctttagaatttcttgtcattggatagttcgtctgtataccattctggtcttcattccccagggcccccgttgtctgatttttctgcttctagaactgttagaggtcacaaaagcaagatggttgtatctatcacaatttttgtctgactttaactgggtatctgttacgatttagtagtcatcttactgacttcttgttggtttccaattgaatcctcacagtagactgttttcattgtaatcagtatcgaattatagcctgttcccttcttcataaatgaaggctttcttcttcaacagttcttagtgacttcacctgtactttatttctctgctttgaatatttcgaagaaaacatattcttgctctttcccaaggttaacactacatacattaccttgaccacaggatgttttcttgcagattgtgacctaattccatcacccttcagcagcccccaccgttttcatggattcagctaaaccttctgtaagatgactctttttccccctaatctttatatctcttttgatatgtagctttagtctcactttttttccttttggattttgccagttagatgtctccctggaattccacttcagcatggctaagactaagcttgtcttctctttcctccccaaagcaaattgtaattaggatagactgaaggtgacagaagataactaagatcttcttcatcctttcggctcttatggaagctgaattccagtagtcattctaaatttgttgtatgtcagcttatggtatcttttcatgtctttacattcagccaaagaggaagttccttgaaggggagaccagagggcgtgctgtgcttcttaatcctctctttcttaaccagtaagaggcattcagtagatatctgatgatactgattaatagaggggaacttttcagattcttttttttttttaaccctagtaagctttagtacaaactaaatgctgagagattatcaagtaagggattgatcatcacaagaagactcaggatgttacatcctgtaggttttatagtttcctatattgtaaaaaatatgagttatagcagcttgtctggatgtcatacaggtataaaaatcagttttataaacttgagtaaattggggcccattttagaaaaaactcttgcaggctgtgaatgccaatatataagtaaagtattaagtataatgttatttaatgtgggcaaacataaagccaggtgtaaattttttaggtttaaaatcttatagaactatacatccaaaagaaaatttcaagttaaacataatacaaagcaatacaatctaaattaacattaatttaatgtgatgaatgatattgccttgctaaaagtgggtcactacttacaatgtgcaaatggtactcatcgttagggtatagattcttttaaactatgacatacgtacactaccatgtggaacgtgatgatgtgttctctgttctaactactgggaagacttccttggcatagcacatgccatggggtcagttggctttgacttcatatagatatgccatttacttggtcagtgtcacttctatgacaagtagtatgttgtgccagtttgattataagtacaaatatgggcaatgaagtaacttggttttaaggttgttactaagctgagtaacagtgtgtggctatacaaatttttataggctatcaggaatgaaaacacaggagattgttgtagattcaagtattttagattcaagtttgaagatgctcatgcagatgtttaactgagttgtatagacctttatgtttctttctttttctctttttttttttttgagacagagtcttgctctgtcacccaagctggagtgcaatggtgtgatctcggcttactgcaacctccgcctcccaggttcaagcaattctcctgcctcagcctcccaagtagctgggattacagatgtgcaccacgacgcccagctgattttttgtattttagtagaggcggggtctcaccatgttgtcaagatggtctcaatctcctgaccttgtgatccacccacctctgcctcccaaagtgctgtgattacaggcgtgagccaccgcgcctgactgacctttatgtttcttaactttatgctatacatcagttgatatttcaaaaatttaaatggtttctatgattattctttgggctaagaaattgggcattaattgtcctcatatgtatggtttttgtggctacttcatgtagattttatttttggtggttatcaaattggaatttttttttttttttttttttttgagacggagtctcattctgtttcccaggttggagtacagtggtgcaatctcagctcactgcagcctcgacctcccaggctcaagcagtcctctcacctcagccttctaagtagctgggactacaggcacgcaccaccacacctggctagttttttgtgtttttagtagagatggggttttaccctgttggccaggctggtcttgaactcctggcctcaagtgatccacctgcctcagcctcccaaagtgctgggattagaggcatgagccaccacacctggctgaaattggaatttcattggtactgcctgtaattttatgttaatttttttttttttttgtcgtcactagcttttatctaaagcccctagagagaaaggccatgataccttgtatacaaggttataagagtatacaagggaaagggagggctgaagggaacagggtgggctggtacaagcctcattagaaataccattgagtctgtgagtaaaacatcattatatgaaaaggagatgtggttttagggtggtccaattacttttgcaccagcctaataaaattacaagtcattatcaatagagacattgtaaaacctttttttttcccaaaagaagtatcaggtatgataattacatgtctgcccaactttcgttatagattaacataacttaattgtatttaaggtacaatttaggagagttgctgaaaaatgaatctttagtattgggatgccttgattctaccctcaatagctataatggattatgtgtctgagtagattaataaaaatcttttgagcatttttcttgaactacttcactgaagattagctttttgagcatccattttaatttctcagtatataaggatcggtttatcacaactgtattgttttccctggccttgttagattatattttcatatcatgtagaaaaataggtgtattcgttctcccttgaagtcctttgtctcccaaaggaaatggttgcaatacagatgtgtcacctcttccacaggtaaagtggaatggagaagtagccagttaaatagtgcatgctcaatttggaacatttagagcatacaggaaagttatttatttggtaaatattttttaagcatttactatgtttcatgcattgtactagttgtagaggatataattgaatacaactacatgtagcccttgactttatggaactagtctagtataaagatttaagattgcctggcatggtggctcacgccactaatcccagcactttgagaggccaaggcaggattgcttgaggccagaagtttaagagtagcttggtcaacataatgagactccatctctaaaataaatagatagatagatagatagatagatagatagatagatagatagaagtagttagacaacacaaagcagtttcactcatcttgtggcaaggagttatgtatttctaatcaaatttggcaactcaagcattttcaacaaaatctacatgttttttcagaataaagtgaccaacacagaatgttacctgtaaaaatcagagcaataattgctatctaaaataattttgaaaattaagtggtactgaaaggctcatatagcaaaaatatggcctcctgtcattgtactttcctacttcccagactcaccattttcaacattttttagtagtttattttgccattttatagcatagtacctgacattttatttattcaacagacatttcttaagtacctaatacatgccattccttgtttgaagggatgctaaggatacagtggtgaacaaggcgttgtggggttgtatagagggtattcattcctaaccttgaaccaaatatttctttctgttggataatgcattaaaaattgcaaacagtttacaaacttttggagcaatggtggccttgatcataaagtagggactgcttctaccgtatacatgcttggtggtgtatttgtgatatctggctaaagtttctacatggaaattgactgactttagttttgagacttctgggaaccagtcaggcaaaatagtgaaactgtgtatcctgtttccaagagttgtcttttaaggttatctgcttcattcatttggcctgacttgctaggcaaatgcctagggtaaatatgatttgattaactataacaacaacagcaacaacaacaactttattttttagagcagtttgaggttcacagcaaaattgagcagaatgtacagagattttccctatacccgcttcccctacgcatgtgcggcctcccctactatcaacatcccccaccagagtggtttgttacaattaatgaacctacattgacacatcattatcactcaaggtccgtagtttacattagagtccactcttggtgttgtgtatgggtttggtcgattttataatgacatttatccaccattatagtgtcatacatagtaattttgctaccctaaaaatccagtgtgctccacctgttcctccttccctcctccctcatccctggcaaccactgaactttttaacatctccatagttttgccttttccagaatgtcatatcattggaatcacacagtatgcagccttttcaaatgggcttctttccgttagtaataggcatttaagtttcatcctcatcttttcatggcttgatagctcatttctttccctccctcttttcttccctgtcttccttccttcctcttctttcctgtttcctctttcttcttccttttttaagagacaaggtgtctcactctgttgcccaggctggagtgcagtggcccaatcatagctcattgcagccttgaattcctgggctcaagtgatcctcctgcgttagcctcctgagtagctgggatcacaggctccagtcattttagtgctgaataatatttcattatctggatgtaccgcctattcattcacctactgaagaatatcttggttgcttctaagttttggcaattatgagtgaagttactataaacattgtatacaagttttatgtggatgtatgttgtcatctcccttgggcagataccaaggagtgccattgttggatcatatggtaaatatatctttagttttgtacagaattctaggttggtatttttttctctctcagtcctttattttatttggagacagtctcgctatgtcgcccaggctgccatacagtggtgccatctgggctcactgaaacctccacctcccaggttcaagcgattcttgtgccttggcctcccaagtagctgggattacaggagtgcgccaccacgcctgctaatttttgtatttttagtagagacagggttttgccatgttgcccaggctggtctcaaactcctgaccttaagtgattcacccacctcaatctcccaaaatcctgggattacaggcctgagctactgtgcctgatctctctcagtactttaaagaaatatttcattccacttttcttttttttcttctttttgagatggagtctcactctgtcgcctgggctggagtgcagtggcgcgatctcagctcactgccacctccgcctcctgggttcaagtgattctcctgcctcagcctcctgaatagctgagattacaggcgcccaccaccatgcccagctaattttttgcatttttagtagagacgggggttccaccatgttggccaggctggtctcgaactcctgacctcgtgattcgcacatctcggcctcccaaattgctgggattacaggtgtgagctaccacgcctggcccactcttcttgcttacatagtttctgaggagatgtcagatgtaatttttatttttgctcttctgtaggcaagttgagttttttccccctctagcttctctcaggatttttttctttatctttgattttcagtagtttgaaaattatatgcctagctgtcagggttttttgcttgtttgtttttgttttctcaggtgtgactccagaaaggttctaaagaggagctttacaatctcttctctggggtttatggagacttcctttacccttctgtgttagccccttaaagcactgcgtcaaccttaaaagggcacaggaaagggtgtctatgccatttttatgccatttatcctgcttggtgttttctgagctttcttcatctgcggtttaatgtctcacattaatttgtagaaattctctgtcattgtttcaaatttttcttcagttcttttctctgtttcttcttctggtgttcccattatgcttttgtggttgtcgtacagttattggatattttgttccaggcttttttttttccagtctttttttccttttgcttctcggttttgtaggtgtctgttgagatactctcaagtgcagatattctttcctcagctttgtctagtttactaataagcccattaaaggcagtcttcatttctgttacagtctttttgatcagtagcatttcttttttattctttcttaaaatttctgtctttctgcttacattgcccatctgttcttgcatggtttctactttgtccattagagttcttaggatatttatcataattatttcaaatttctggtgtaacaattccaacatccctgcaacatccaagtctagtttcgatgcttactgtgtctcttccagctgtgttttttcctatttaatatgtcttataattttttcttgatagccatacatgatgcattaggtaacagaaactgctgtgagtggacctttagtaatgtggtggtaaggtgtgcatggaggggaaacattttcagtctgttagtgaacttttgtcaacttcacatgtgcttctcaagtccatcctgtaagtgggagagtagggctagagaggactgaagttgggtatatattaaatactttctcctacaaagaagcctagaggggacgcattaggggattttttttcccccagtattcactgtgatgacccttattgagctcctggaggtaaaactcacaaaactgtggttctcccccctgcccatattactacatgtccctggagtttatatctttcagacttgtctgcactgagcttccaccaatttgtcaaatacagatcaggtttccctaccacccgtgcagttgaaaacccacatacaacttttgactcctccagagcttaactactcatagcctgctattgactggaagccttgccaataacataaacagttgattaatacatattttatatgttttctgtattatatattgtattcttacaataaagagaaaagaagatgttattaagaaaatcataaggaagataaaatatatttactgttcattaagtggttcccatgggtgctggttcccatggaggttgccccttgtgagtttttgctcagggaagttgtgattctctatatttgcctgttggtctcctaatttgggagtcatcagttttccctgtgacctcacttctcttacagagttaagaacagttgttggtttttcagtttgttcagtgttttacatgttgttagaacacagtggtacttctaagtttcttaacatgctagatcagaaacctgaagtctcacctaatttggctttttatattttttcttcttttttttcttccattgctaccaaagcatttttcatctgtgtctggggtgacattagagcagaatgtgatttctaggtaaacattattgggctccctagcagaaaaatttttgaaagtagtacatgaattctgtataattaaaattttcttttcatcttaataggtataggtaataggcacggcctattttttttttgctcaacagtctaaaatagtaatttaatcacctaatagccttagttatatagttgaaagaagagttggaaatctgattcatgggttggaaatcacctgtcacatatgagttttaggcactggtcactttattttgaaacagctttggggttttttcctttttcaactcataataggctttaacagcttttagttttgtttctgtttttttaacagcatgagttgccaaatttggttatagcttcttggtacaagatgggtaaatttgctttgtgttgtgtaattactttttattttaaatgctacctcttttatgaacactaactttacactaagattaggaaaatgagaattgcatgtctgcaacaaatagctatctgtagtattaaattgtgaaaatgtagactttggattggagctggcatctcttaatatgtaattgtaacatagagtaaataagtattttgtcccttgtagggtcaaacagtacagtgcatgggcagaattagagatgtaggcttttttttttttttttttttttactggcttagagaaccgtttgatcagctaatatggaattaagtccctagggctgcccaggcacaacattaactgctattaaaggaaaatttaaaagagtattagtgaaggttaaatactgaccatggacatctggcaaaattgatgttttttttcccctccaccattgtttatagtttattgttatttatcagagaattaatgtttattttcagaatctattaccataagaaatctgtttgaggacttcgtatgtgccaggaattctactaaataatgatataatgctgaacagaattagataggatcctcacttcgttaagcttacagtctagtggtatagatcaacattaatcaaagaataacacaaatagaaagcagagcagtggttcatgggattgactgtagagaagcatgagggaagttcccaggtgatggaaaatactttatttcttaatcgtggtggttacatgtgtgcatatgtttatgaaaatatattgtacatttaaagtggatacattttatcacatgtaaattatgactctataaagttaattaaaaagaataactcaggtaaggtggtgtgtgcgcctgtagtcccagctatttctgaggcaggaagatcacttgagcccaggagtttgagttcagcatgggcaacatgagacctgtgagactttgtctctaaaaaaatttaaataaataactaagataaatgtaaaattacagctgtagtaagttctacaaaggagagttacatgggctatgacgatgtaagatagcaagaactgacattggcagggaggaaatgatgatgagtagaagtaaataagtgaagtgtggggattgatgtcaaggggacagtataaaagaaataacagcatgcgccaaggccctaaaattggaaagtccttggcaaattaaaggagtttgaaaaaggccattgtgtgcaaagcagaaaataggtactacaaggtaaaagatggagctaagcggtaggtaaggctaaaccttgtcagccattgttaaatattgaattgtatcctaagcacaactcagtggaaagcagttaaagttctttaattgggggaggcaatgaaggggtaataaaattggttatagaaatactgctctggctctagtgttgagaatgaattggagtagccagagtagattcaagaagactttagtaagattattccaacaggccaggacctgttatagggtggtggcaatggagagagatggacagaatggagagtgtatttaggaggtaaaaatgacagaacttggtgatgcactgaatgtgaaatggggaaggtgtctaggaggactactaggtttatggtttgcgtattagggtggatgatagcagtttcatttactgagacagggagccctggcagagtacccagcttttagagtgggtagggggaaggggagagtgcatctggtgttgggcattttgaagtgatttacatacaacaaactgaaggtatctttaacactgagtccagcaggttagcatatttattcagcaagcattgcacctttttttgttgtttttggggtcttcaactcctggcctcgaatcctccctccttcccccgcctctcccagcctccgcctcccaaagtgctgggatttcaggagtgagccaccgcgcctggccagcatcgcgctgtttgtgcagtgtgccctgtgctaggtcttgcagtgggtaccagtagagacataaaagtacaaaagataattggacgtttagtagagtcctgaaagggggcgggataggaagatacctaaccataagaaaaaccagcaagagcggaaaaggagctagtcctccagatcaataagttaatcacttatgtttgtgattccctgcattttgggtgattctctgtcgaggtcctcttaagtccagacttttgatataatctgcagtttgcgccatttggattcctgaagcatctttacaagccacctacattccttatggagctgtggcacaacagcaagcccacgatgtctcaccggattaataaaaatataggcgctcacgcttttgtttaccgatatagtatctcctcctcccctcactccatcaacccccacgcgacacaactttccggaagtaagcaaaatccgttatcaaggtgaaactccggggaccaggctccacagctgccataaactggatggcacgttagaagccggtgggtgtaggtgaggcacgctggcgcccgcgggcccttctccagccgctacccagtgggaatccgcggggctgaagccccgaaaccaggctgagcgtcccagagcgcaacctccctttcccccagcagcgccggcgccgcagaagccgcgtgtccccaggcgcactcccccaaggtgaacccccgccccccacggaggcggctgggtcgcgggtctgggcggggcgctccggacgccctcccgccgctgcgcacccctcccgcgagctgccagctccctcggcctctccacccaaaactggcccaaccgccaatcgtctgcctctcacctcctacagcaggtgacccatggccaatcgccaggggtctctttgccaggagccgccagggccagccaatcggggcgacccctccgccggggaggggacgggaaaggggtggggggtgaagggggtgaagggggtgtcccgggggacgggctgaacctcagtcaggaccgcctgcaccgcagtccggggatcgggtcgaggggagaagaaaaaggggtgctcgggagcagcccccggctacctcccctggaggcacagagggcgggggccttggcgaatggctttcttgctggccacttgcggaggtttggattcaggatttgttcctagtgtccaagattttgataagaaacttacagaagctgatgcttacctacaaatcttgattgaacaattaaagctttttgatgacaagcttcaaaactgcaaagaagatgaacagagaaagaaaattgaaactctcaaagagacaacaaatagcatggtagaatcaattaaacactgcattgtgttgctgcagattgccaaaagtactattaatcccgtagatgcaatatatcaacctagtcctttggaacctgtgatcagcacaatgccttcccagactgtgttacctccagaacctgttcagttgtgtaagtcagagcagcgtccatcttccctaccagttggacctgtgttggctaccttgggacatcatcagactcctacaccaaatagtacaggcagtggccattcaccaccgagtagcagtctcacttctccaagccacgtgaacttgtctccaaatacagtcccagagttctcttactccagcagtgaagatgaattttatgatgctgatgaattccatcaaagtggctcatccccaaagcgcttaatagattcttctggatctgcctcagtcctgacacacagcagctcgggaaatagtctaaaacgcccagataccacagaatcacttaattcttccttgtccaatggaacaagtgatgctgacctgtttgattcacatgatgacagagatgatgatgcggaggcagggtctgtggaggagcacaagagcgttatcatgcatctcttgtcgcaggttagacttggaatggatcttactaaggtagttcttccaacgtttattcttgaaagaagatctcttttagaaatgtatgcagacttttttgcacatccggacctgtttgtgagcattagtgaccagaaggatcccaaggatcgaatggttcaggttgtgaaatggtacctctcagcctttcatgcgggaaggaaaggatcagttgccaaaaagccatacaatcccattttgggcgagatttttcagtgtcattggacattaccaaatgatactgaagagaacacagaactagtttcagaaggaccagttccctgggtttccaaaaacagtgtaacatttgtggctgagcaggtttcccatcatccacccatttcagccttttatgctgagtgttttaacaagaagatacaattcaatgctcatatctggaccaaatcaaaattccttgggatgtcaattggggtgcacaacatagggcagggctgtgtctcatgtctagactatgatgaacattacattctcacattccccaatggctatggaaggtctatcctcacagtgccctgggtggaattaggaggagaatgcaatattaattgttccaaaacaggctatagtgcaaatatcatcttccacactaaacccttctatgggggcaagaagcacagaattactgccgagattttgtaggtattttttctgccttagagctcttatgcttttctgaaataactgccttttgtcttgaactacagcttctggattaggagtgtgaaagaatggttctgtctttgtaagcgtgtttcacattttatgtgtcatgtcttttgctgaagtcccatatcagaagaagacctaaaacatatattcagagcagtcagaggtcattgataggtttccttcctaaaaacctgacttgcaatgttgaactaaaagaggccttcctaggttgcctagctaaaccagattatggatccctaatttattcttgccagattgaatgatgagctggtccttacagcagactttgtgacccctgcagcactgcctcctggtcctcacagctatccctttttctgtgcctttgctggggaaaaacagtaaccatcacattttgcacgcatctggcttgcttccacttgacactcttgggtcacgtgcagatgactgtgccagtcagtggaaagtctatagtgatggcaccatgactctctctgcctctggaacccttaactgggggggaaggggacagtgggaaagaaagtttcaggcgttgatagcagctctcctccctctgccctggtcatgtctcccttttctggcctctttcaatcctgtttatgccttgcccttcctaaccaggcctttgctgtgttgcttatcttctcacattccatagttgtgtgtccaagtagaggtctgttacggcttttgcagaatggatccttgctcagggaaagtattcacaccatctggcacagaggtccctttcaacctgaggatgaaagcctgcattatattcttaagcaaagccttccctgacccccagtgcccatgtaagctcaccacagcacttaccacctagaatttcaatggtggttacgtctctctccactacgctgtgaacagcttgaggatagggaatttgccaactctgttatggtccttgcacccagaataggacgttcttgcccaaacccaccattcttgggatctcaagttcataagcgtcctgttgaaggccctcattcttatagttagccctggggagtccagttctgttaagatgctttcatcaaaaacttcacagttgctcttctgtgctctactctgtagttgggccacactgagcagattctttggtagaattttcaacttgagactaacacaagtatttccttttctgttcag

SEQ ID NO: 735164 - DNA, 19057 bp, Homo sapiens
  misc_feature (19057)..(19057): n is a, c, g, or t
gtaagggtctttacatggtttccagatagttcattagttgttgctttctttttttgtctgttttctgttttttttttttaaataactgtggtatgatgtaataggaacttataatttctgagttgcttatttttcctttacagttatagtaaagttatactcatttattttctcctgctttctgcagagtaaaatactgatttttgtctagaaacaagacagtgcaagacaatgttgaaagtgaaattctatgttaaaatatgccagatttattttaagaatttaatatctgtagtcagttatcaatacaaccaaattacataattatgcatgataataggtaaatactgagaagttcacctcattttcttgttaaaggatttggctattaccgtatgtgtcagttagtactcttttgtatggtagtgaaagaaaactcaacccaaactgattcatgaagaagaaagtaaatctggttagatgtggtttgaattaggtaattcatgtcatgaggactcagatctcccatctctatttctacgttccacttttgcattggcttcattttcggttaggttctcccttggtggtggtaaggtggttgtagcaatgtcagcctcccatttttggaaccgagtccataggaggctattctttctagaccttaataggagtaacacaattattgctcatcaccctagctttggccatgtgtcaaatcctgaccagtcacaatttcacagtcatagattctaccctggagctgggatgttactggcctcactagaaacacattgctgatagggtagaaggtgtgttcatcctacccaacccgacccgcaccaaagtcagaatagggaaaaacagatgttgggtgacatgcaactaacgtctgccgtactacactgaagatatttttctatgtttattctccagtgaaagagcttatatttgtggtacataggggattttgttttaatttagaaaatttaattgtagaaaacatgttttataaccctttctctgtactttgttctatatcaggaattgacttgattagataaggtgacatagggtatcttaggccctacaagatagtaaaccccccatcacttgaaagtattcagtagaggcttaaaaaacattattaaaggatgtggttattaggggactttaagaaatgaatatgaaattgaagtaggaaatctttaagctactctgtgagttatgccttttaaaagcaatttgtaattcctgtagatttcttttaaatttaggcagtttcataaatgactatagcatcattttagcaaatttgtgatcctgtaagaggaggataagtgttttttgtttgtttgtttgttttttgtttttttgagacagagtctcactttgtaccccagaaagtaaatctagttagatgtggtttgtctcggctcactgcaacctccaccccgtgcgttctagcaattctcctgcctcagccaccacacctggcctaagaggggaggataagtgttttagtgatcatattagactgaatgtggcagatgagatttcccgcccccccattgttggttagactgacattcaacattcaacaagagccacctgcccttgtaggcatttctgccactatacccctacataaacctagagtgctattgcttacttgctttccttcaaatacattttttcatttgtggcctccacattcttgtgtgtgatgtcctttctctgtgaaatgtcttctaccctttttttcaaagcctagtttagaactgacctcttctatgaaccctctgccgactggcctttccttccccagtcccccaagttcaaaatgatctctttcctttgaatactatagtatttgcacaattcactatctccttatcatattcttcttgtttatttgttatcagctgatgttgacatcataagttcaggttcctaactagatccaatattggaatttttcagcttttgctaagaagagagcttgtatgtctttgggaataatgggcagaaaaagataactttgagaagtcttagacttctaatagctttgatatttaaaagtacatgtaatacaagaggtttttttcctacatttaatgcatggagaagataggacatttagaaatatggaattaatgttcatttgactggcaaaagattattttctcagatgtagtgaagtgtggtaaagaacttcactctagagccagaatgtctgtgtttgtatcccagagcccaccacttacatttaaccattaacattcaacttactgtctctgagtttcagtggcctcatctataaaatgaggataataagagtacctacttcatagagttgttttagtggttaaataaactaacgtaaacttgctagaacttgataaactaatattggatgagaactggttgaaataatgcctggctatagtaaaaacttggtaaatgttagttgccattacaatgcaactactgttcctaccattccctctgccagtgcctggtattcagtagcactcagtaaatgttagttaaatgaagaaataactgaaggaatgaatgaacaaatggttgatgtagagattgcttttccattgttgtttattgaatattttgagatgtataacatactgtctgttaggcactgtgggatgggcactcacggagctgtcttccaaaggggtataggagaggagacgcagtgatctcagcaacctacctttaaaacatatcctagtatctactgccatgttaggttctcttcttttgctttttttaaaaaaaaattctcacaaaactccccccacccacttcagtttatagatgaggaagctcctactacataatagtgcttcccagtctaattcttgacctcattgtatttatatgtcctttttttttttgacagagtctcactcattgcagtggcacaatcacagctcactgcaacctctgcctcccctgctcaagtgatcctcccacctcaacctcctgagtagctgggactacaggcatgcaccaccacgcctggctaatttttgtatttttttgtagagatgcggttttgccatgttggccaggctggtctcgaactcctgggctcaagccatctgcccactttggcctctgagagtgctgagattataggcatgagccaccattcccagccatgttttcctttttcattgaactttatctactttagccattaaactccactccattggtcttgtcattactaagagctgaaccacctgcaaaatattaagttaaaaagcgttttctttgacaacagttttcttttcttcatcttcctctatcactttacttctgaacttttattctctcattttgatctgacccctacttctctgtttttcctggccatttagtactttcttgttttgctcatcccatttcccagtggagaccttctggtctgctgctttatcactggttttgttagaagacatacaaatggcaaggaggtatatgaaaaggtgcctaacatcattgatcatcagagaaatgcagaccaaaactacaatgagatatcatttcaccccagttaaaatggctttttttttttttttccaaaagacaggcaataacaaagtactggtgaggatgtggagtaaagggaacccacatacactattagtaggaatgtaaattagtacagccactgtggagaacagtttgaaggttcctcaaaaaactaaaaatagagctaccatataatccagcaatcccactgctaggtatatatccaaaagaaaggcaatcaatatacggaagagatacctgcacacccaggtttattgcagcactattcacaatagccaagatttggaagcaacccaggtgtccaacagatgaatggataaagaaaacatggtatataaacacaatggaatactattcagctgtgaaaaagaatgaaatcctgtcatttgcaatcctgtcttgaatagaactggaggtcatgatgttaagtgaaataagacaggcacaaacttcacatgttctcacttatttgtgggagctaaaaattaaaacaatcgaactcatggagctagagaatagaattatggttaccagaggctggaagggtggttgggcgtataagtgtagggggagtggggatggttaatgggtacaaaaaaatgagaacgaataagatctacttgataacacaacagggtgactatagtcaacagtaattatacatttaaaaataactagaagagtataattagattgtaacacaaaagataaatgcttgaggtgatggatacctatttaccctgatgtgattattacttatttcatgcctatatcaaaatatttatactccaaaaatatatatacctactatgtacccacaaaaatttaaaaatttatatattgtttttgctatcacctttagaatttcttgtcattggatagttcgtctgtataccattctggtcttcattccccagggcccccgttgtctgatttttctgcttctagaactgttagaggtcacaaaagcaagatggttgtatctatcacaatttttgtctgactttaactgggtatctgttacgatttagtagtcatcttactgacttcttgttggtttccaattgaatcctcacagtagactgttttcattgtaatcagtatcgaattatagcctgttcccttcttcataaatgaaggctttcttcttcaacagttcttagtgacttcacctgtactttatttctctgctttgaatatttcgaagaaaacatattcttgctctttcccaaggttaacactacatacattaccttgaccacaggatgttttcttgcagattgtgacctaattccatcacccttcagcagcccccaccgttttcatggattcagctaaaccttctgtaagatgactctttttccccctaatctttatatctcttttgatatgtagctttagtctcactttttttccttttggattttgccagttagatgtctccctggaattccacttcagcatggctaagactaagcttgtcttctctttcctccccaaagcaaattgtaattaggatagactgaaggtgacagaagataactaagatcttcttcatcctttcggctcttatggaagctgaattccagtagtcattctaaatttgttgtatgtcagcttatggtatcttttcatgtctttacattcagccaaagaggaagttccttgaaggggagaccagagggcgtgctgtgcttcttaatcctctctttcttaaccagtaagaggcattcagtagatatctgatgatactgattaatagaggggaacttttcagattcttttttttttttaaccctagtaagctttagtacaaactaaatgctgagagattatcaagtaagggattgatcatcacaagaagactcaggatgttacatcctgtaggttttatagtttcctatattgtaaaaaatatgagttatagcagcttgtctggatgtcatacaggtataaaaatcagttttataaacttgagtaaattggggcccattttagaaaaaactcttgcaggctgtgaatgccaatatataagtaaagtattaagtataatgttatttaatgtgggcaaacataaagccaggtgtaaattttttaggtttaaaatcttatagaactatacatccaaaagaaaatttcaagttaaacataatacaaagcaatacaatctaaattaacattaatttaatgtgatgaatgatattgccttgctaaaagtgggtcactacttacaatgtgcaaatggtactcatcgttagggtatagattcttttaaactatgacatacgtacactaccatgtggaacgtgatgatgtgttctctgttctaactactgggaagacttccttggcatagcacatgccatggggtcagttggctttgacttcatatagatatgccatttacttggtcagtgtcacttctatgacaagtagtatgttgtgccagtttgattataagtacaaatatgggcaatgaagtaacttggttttaaggttgttactaagctgagtaacagtgtgtggctatacaaatttttataggctatcaggaatgaaaacacaggagattgttgtagattcaagtattttagattcaagtttgaagatgctcatgcagatgtttaactgagttgtatagacctttatgtttctttctttttctctttttttttttttgagacagagtcttgctctgtcacccaagctggagtgcaatggtgtgatctcggcttactgcaacctccgcctcccaggttcaagcaattctcctgcctcagcctcccaagtagctgggattacagatgtgcaccacgacgcccagctgattttttgtattttagtagaggcggggtctcaccatgttgtcaagatggtctcaatctcctgaccttgtgatccacccacctctgcctcccaaagtgctgtgattacaggcgtgagccaccgcgcctgactgacctttatgtttcttaactttatgctatacatcagttgatatttcaaaaatttaaatggtttctatgattattctttgggctaagaaattgggcattaattgtcctcatatgtatggtttttgtggctacttcatgtagattttatttttggtggttatcaaattggaatttttttttttttttttttttttgagacggagtctcattctgtttcccaggttggagtacagtggtgcaatctcagctcactgcagcctcgacctcccaggctcaagcagtcctctcacctcagccttctaagtagctgggactacaggcacgcaccaccacacctggctagttttttgtgtttttagtagagatggggttttaccctgttggccaggctggtcttgaactcctggcctcaagtgatccacctgcctcagcctcccaaagtgctgggattagaggcatgagccaccacacctggctgaaattggaatttcattggtactgcctgtaattttatgttaatttttttttttttttgtcgtcactagcttttatctaaagcccctagagagaaaggccatgataccttgtatacaaggttataagagtatacaagggaaagggagggctgaagggaacagggtgggctggtacaagcctcattagaaataccattgagtctgtgagtaaaacatcattatatgaaaaggagatgtggttttagggtggtccaattacttttgcaccagcctaataaaattacaagtcattatcaatagagacattgtaaaacctttttttttcccaaaagaagtatcaggtatgataattacatgtctgcccaactttcgttatagattaacataacttaattgtatttaaggtacaatttaggagagttgctgaaaaatgaatctttagtattgggatgccttgattctaccctcaatagctataatggattatgtgtctgagtagattaataaaaatcttttgagcatttttcttgaactacttcactgaagattagctttttgagcatccattttaatttctcagtatataaggatcggtttatcacaactgtattgttttccctggccttgttagattatattttcatatcatgtagaaaaataggtgtattcgttctcccttgaagtcctttgtctcccaaaggaaatggttgcaatacagatgtgtcacctcttccacaggtaaagtggaatggagaagtagccagttaaatagtgcatgctcaatttggaacatttagagcatacaggaaagttatttatttggtaaatattttttaagcatttactatgtttcatgcattgtactagttgtagaggatataattgaatacaactacatgtagcccttgactttatggaactagtctagtataaagatttaagattgcctggcatggtggctcacgccactaatcccagcactttgagaggccaaggcaggattgcttgaggccagaagtttaagagtagcttggtcaacataatgagactccatctctaaaataaatagatagatagatagatagatagatagatagatagatagatagaagtagttagacaacacaaagcagtttcactcatcttgtggcaaggagttatgtatttctaatcaaatttggcaactcaagcattttcaacaaaatctacatgttttttcagaataaagtgaccaacacagaatgttacctgtaaaaatcagagcaataattgctatctaaaataattttgaaaattaagtggtactgaaaggctcatatagcaaaaatatggcctcctgtcattgtactttcctacttcccagactcaccattttcaacattttttagtagtttattttgccattttatagcatagtacctgacattttatttattcaacagacatttcttaagtacctaatacatgccattccttgtttgaagggatgctaaggatacagtggtgaacaaggcgttgtggggttgtatagagggtattcattcctaaccttgaaccaaatatttctttctgttggataatgcattaaaaattgcaaacagtttacaaacttttggagcaatggtggccttgatcataaagtagggactgcttctaccgtatacatgcttggtggtgtatttgtgatatctggctaaagtttctacatggaaattgactgactttagttttgagacttctgggaaccagtcaggcaaaatagtgaaactgtgtatcctgtttccaagagttgtcttttaaggttatctgcttcattcatttggcctgacttgctaggcaaatgcctagggtaaatatgatttgattaactataacaacaacagcaacaacaacaactttattttttagagcagtttgaggttcacagcaaaattgagcagaatgtacagagattttccctatacccgcttcccctacgcatgtgcggcctcccctactatcaacatcccccaccagagtggtttgttacaattaatgaacctacattgacacatcattatcactcaaggtccgtagtttacattagagtccactcttggtgttgtgtatgggtttggtcgattttataatgacatttatccaccattatagtgtcatacatagtaattttgctaccctaaaaatccagtgtgctccacctgttcctccttccctcctccctcatccctggcaaccactgaactttttaacatctccatagttttgccttttccagaatgtcatatcattggaatcacacagtatgcagccttttcaaatgggcttctttccgttagtaataggcatttaagtttcatcctcatcttttcatggcttgatagctcatttctttccctccctcttttcttccctgtcttccttccttcctcttctttcctgtttcctctttcttcttccttttttaagagacaaggtgtctcactctgttgcccaggctggagtgcagtggcccaatcatagctcattgcagccttgaattcctgggctcaagtgatcctcctgcgttagcctcctgagtagctgggatcacaggctccagtcattttagtgctgaataatatttcattatctggatgtaccgcctattcattcacctactgaagaatatcttggttgcttctaagttttggcaattatgagtgaagttactataaacattgtatacaagttttatgtggatgtatgttgtcatctcccttgggcagataccaaggagtgccattgttggatcatatggtaaatatatctttagttttgtacagaattctaggttggtatttttttctctctcagtcctttattttatttggagacagtctcgctatgtcgcccaggctgccatacagtggtgccatctgggctcactgaaacctccacctcccaggttcaagcgattcttgtgccttggcctcccaagtagctgggattacaggagtgcgccaccacgcctgctaatttttgtatttttagtagagacagggttttgccatgttgcccaggctggtctcaaactcctgaccttaagtgattcacccacctcaatctcccaaaatcctgggattacaggcctgagctactgtgcctgatctctctcagtactttaaagaaatatttcattccacttttcttttttttcttctttttgagatggagtctcactctgtcgcctgggctggagtgcagtggcgcgatctcagctcactgccacctccgcctcctgggttcaagtgattctcctgcctcagcctcctgaatagctgagattacaggcgcccaccaccatgcccagctaattttttgcatttttagtagagacgggggttccaccatgttggccaggctggtctcgaactcctgacctcgtgattcgcacatctcggcctcccaaattgctgggattacaggtgtgagctaccacgcctggcccactcttcttgcttacatagtttctgaggagatgtcagatgtaatttttatttttgctcttctgtaggcaagttgagttttttccccctctagcttctctcaggatttttttctttatctttgattttcagtagtttgaaaattatatgcctagctgtcagggttttttgcttgtttgtttttgttttctcaggtgtgactccagaaaggttctaaagaggagctttacaatctcttctctggggtttatggagacttcctttacccttctgtgttagccccttaaagcactgcgtcaaccttaaaagggcacaggaaagggtgtctatgccatttttatgccatttatcctgcttggtgttttctgagctttcttcatctgcggtttaatgtctcacattaatttgtagaaattctctgtcattgtttcaaatttttcttcagttcttttctctgtttcttcttctggtgttcccattatgcttttgtggttgtcgtacagttattggatattttgttccaggcttttttttttccagtctttttttccttttgcttctcggttttgtaggtgtctgttgagatactctcaagtgcagatattctttcctcagctttgtctagtttactaataagcccattaaaggcagtcttcatttctgttacagtctttttgatcagtagcatttcttttttattctttcttaaaatttctgtctttctgcttacattgcccatctgttcttgcatggtttctactttgtccattagagttcttaggatatttatcataattatttcaaatttctggtgtaacaattccaacatccctgcaacatccaagtctagtttcgatgcttactgtgtctcttccagctgtgttttttcctatttaatatgtcttataattttttcttgatagccatacatgatgcattaggtaacagaaactgctgtgagtggacctttagtaatgtggtggtaaggtgtgcatggaggggaaacattttcagtctgttagtgaacttttgtcaacttcacatgtgcttctcaagtccatcctgtaagtgggagagtagggctagagaggactgaagttgggtatatattaaatactttctcctacaaagaagcctagaggggacgcattaggggattttttttcccccagtattcactgtgatgacccttattgagctcctggaggtaaaactcacaaaactgtggttctcccccctgcccatattactacatgtccctggagtttatatctttcagacttgtctgcactgagcttccaccaatttgtcaaatacagatcaggtttccctaccacccgtgcagttgaaaacccacatacaacttttgactcctccagagcttaactactcatagcctgctattgactggaagccttgccaataacataaacagttgattaatacatattttatatgttttctgtattatatattgtattcttacaataaagagaaaagaagatgttattaagaaaatcataaggaagataaaatatatttactgttcattaagtggttcccatgggtgctggttcccatggaggttgccccttgtgagtttttgctcagggaagttgtgattctctatatttgcctgttggtctcctaatttgggagtcatcagttttccctgtgacctcacttctcttacagagttaagaacagttgttggtttttcagtttgttcagtgttttacatgttgttagaacacagtggtacttctaagtttcttaacatgctagatcagaaacctgaagtctcacctaatttggctttttatattttttcttcttttttttcttccattgctaccaaagcatttttcatctgtgtctggggtgacattagagcagaatgtgatttctaggtaaacattattgggctccctagcagaaaaatttttgaaagtagtacatgaattctgtataattaaaattttcttttcatcttaataggtataggtaataggcacggcctattttttttttgctcaacagtctaaaatagtaatttaatcacctaatagccttagttatatagttgaaagaagagttggaaatctgattcatgggttggaaatcacctgtcacatatgagttttaggcactggtcactttattttgaaacagctttggggttttttcctttttcaactcataataggctttaacagcttttagttttgtttctgtttttttaacagcatgagttgccaaatttggttatagcttcttggtacaagatgggtaaatttgctttgtgttgtgtaattactttttattttaaatgctacctcttttatgaacactaactttacactaagattaggaaaatgagaattgcatgtctgcaacaaatagctatctgtagtattaaattgtgaaaatgtagactttggattggagctggcatctcttaatatgtaattgtaacatagagtaaataagtattttgtcccttgtagggtcaaacagtacagtgcatgggcagaattagagatgtaggcttttttttttttttttttttttactggcttagagaaccgtttgatcagctaatatggaattaagtccctagggctgcccaggcacaacattaactgctattaaaggaaaatttaaaagagtattagtgaaggttaaatactgaccatggacatctggcaaaattgatgttttttttcccctccaccattgtttatagtttattgttatttatcagagaattaatgtttattttcagaatctattaccataagaaatctgtttgaggacttcgtatgtgccaggaattctactaaataatgatataatgctgaacagaattagataggatcctcacttcgttaagcttacagtctagtggtatagatcaacattaatcaaagaataacacaaatagaaagcagagcagtggttcatgggattgactgtagagaagcatgagggaagttcccaggtgatggaaaatactttatttcttaatcgtggtggttacatgtgtgcatatgtttatgaaaatatattgtacatttaaagtggatacattttatcacatgtaaattatgactctataaagttaattaaaaagaataactcaggtaaggtggtgtgtgcgcctgtagtcccagctatttctgaggcaggaagatcacttgagcccaggagtttgagttcagcatgggcaacatgagacctgtgagactttgtctctaaaaaaatttaaataaataactaagataaatgtaaaattacagctgtagtaagttctacaaaggagagttacatgggctatgacgatgtaagatagcaagaactgacattggcagggaggaaatgatgatgagtagaagtaaataagtgaagtgtggggattgatgtcaaggggacagtataaaagaaataacagcatgcgccaaggccctaaaattggaaagtccttggcaaattaaaggagtttgaaaaaggccattgtgtgcaaagcagaaaataggtactacaaggtaaaagatggagctaagcggtaggtaaggctaaaccttgtcagccattgttaaatattgaattgtatcctaagcacaactcagtggaaagcagttaaagttctttaattgggggaggcaatgaaggggtaataaaattggttatagaaatactgctctggctctagtgttgagaatgaattggagtagccagagtagattcaagaagactttagtaagattattccaacaggccaggacctgttatagggtggtggcaatggagagagatggacagaatggagagtgtatttaggaggtaaaaatgacagaacttggtgatgcactgaatgtgaaatggggaaggtgtctaggaggactactaggtttatggtttgcgtattagggtggatgatagcagtttcatttactgagacagggagccctggcagagtacccagcttttagagtgggtagggggaaggggagagtgcatctggtgttgggcattttgaagtgatttacatacaacaaactgaaggtatctttaacactgagtccagcaggttagcatatttattcagcaagcattgcacctttttttgttgtttttggggtcttcaactcctggcctcgaatcctccctccttcccccgcctctcccagcctccgcctcccaaagtgctgggatttcaggagtgagccaccgcgcctggccagcatcgcgctgtttgtgcagtgtgccctgtgctaggtcttgcagtgggtaccagtagagacataaaagtacaaaagataattggacgtttagtagagtcctgaaagggggcgggataggaagatacctaaccataagaaaaaccagcaagagcggaaaaggagctagtcctccagatcaataagttaatcacttatgtttgtgattccctgcattttgggtgattctctgtcgaggtcctcttaagtccagacttttgatataatctgcagtttgcgccatttggattcctgaagcatctttacaagccacctacattccttatggagctgtggcacaacagcaagcccacgatgtctcaccggattaataaaaatataggcgctcacgcttttgtttaccgatatagtatctcctcctcccctcactccatcaacccccacgcgacacaactttccggaagtaagcaaaatccgttatcaaggtgaaactccggggaccaggctccacagctgccataaactggatggcacgttagaagccggtgggtgtaggtgaggcacgctggcgcccgcgggcccttctccagccgctacccagtgggaatccgcggggctgaagccccgaaaccaggctgagcgtcccagagcgcaacctccctttcccccagcagcgccggcgccgcagaagccgcgtgtccccaggcgcactcccccaaggtgaacccccgccccccacggaggcggctgggtcgcgggtctgggcggggcgctccggacgccctcccgccgctgcgcacccctcccgcgagctgccagctccctcggcctctccacccaaaactggcccaaccgccaatcgtctgcctctcacctcctacagcaggtgacccatggccaatcgccaggggtctctttgccaggagccgccagggccagccaatcggggcgacccctccgccggggaggggacgggaaaggggtggggggtgaagggggtgaagggggtgtcccgggggacgggctgaacctcagtcaggaccgcctgcaccgcagtccggggatcgggtcgaggggagaagaaaaaggggtgctcgggagcagcccccggctacctcccctggaggcacagagggcgggggccttggcgaatggctttcttgctggccacttgcggaggtttggattcaggatttgttcctagtgtccaagattttgataagaaacttacagaagctgatgcttacctacaaatcttgattgaacaattaaagctttttgatgacaagcttcaaaactgcaaagaagatgaacagagaaagaaaattgaaactctcaaagagacaacaaatagcatggtagaatcaattaaacactgcattgtgttgctgcagattgccaaaagtactattaatcccgtagatgcaatatatcaacctagtcctttggaacctgtgatcagcacaatgccttcccagactgtgttacctccagaacctgttcagttgtgtaagtcagagcagcgtccatcttccctaccagttggacctgtgttggctaccttgggacatcatcagactcctacaccaaatagtacaggcagtggccattcaccaccgagtagcagtctcacttctccaagccacgtgaacttgtctccaaatacagtcccagagttctcttactccagcagtgaagatgaattttatgatgctgatgaattccatcaaagtggctcatccccaaagcgcttaatagattcttctggatctgcctcagtcctgacacacagcagctcgggaaatagtctaaaacgcccagataccacagaatcacttaattcttccttgtccaatggaacaagtgatgctgacctgtttgattcacatgatgacagagatgatgatgcggaggcagggtctgtggaggagcacaagagcgttatcatgcatctcttgtcgcaggttagacttggaatggatcttactaaggtagttcttccaacgtttattcttgaaagaagatctcttttagaaatgtatgcagacttttttgcacatccggacctgtttgtgagcattagtgaccagaaggatcccaaggatcgaatggttcaggttgtgaaatggtacctctcagcctttcatgcgggaaggaaaggatcagttgccaaaaagccatacaatcccattttgggcgagatttttcagtgtcattggacattaccaaatgatactgaagagaacacagaactagtttcagaaggaccagttccctgggtttccaaaaacagtgtaacatttgtggctgagcaggtttcccatcatccacccatttcagccttttatgctgagtgttttaacaagaagatacaattcaatgctcatatctggaccaaatcaaaattccttgggatgtcaattggggtgcacaacatagggcagggctgtgtctcatgtctagactatgatgaacattacattctcacattccccaatggctatggaaggtctatcctcacagtgccctgggtggaattaggaggagaatgcaatattaattgttccaaaacaggctatagtgcaaatatcatcttccacactaaacccttctatgggggcaagaagcacagaattactgccgagattttttctccaaatgacaagaagtctttttgctcaattgaaggggaatggaatggtgtgatgtatgcaaaatatgcaacaggggaaaatacagtctttgtagataccaagaagttgcctataatcaagaagaaagtgaggaagttggaagatcagaacgagtatgaatcccgcagcctttggaaggatgtcactttcaacttaaaaatcagagacattgatgcagcaactgaagcaaagcacaggcttgaagaaagacaaagagcagaagcccgagaaaggaaggagaaggaaattcagtgggagacaaggttatttcatgaagatggagaatgctgggtttatgatgaaccattactgaaacgtcttggtgctgccaagcattaggttggaagatgcaaagtttatacctgatgatcagggcagtaggcataattcagcaacaaacaatcttcctttgggagaaacctgttcattccaatcttctaattacagtggttcctatctcagggatactggactttctgacgcagatgaacaattaaggggaaaagcttcccttttccctctgtggcagttacgattttgacttcagtcctgagaaaaacttcaggttttgaaaatcagatgatgtcttctccttttccaaacaccacacgttgaaagcatttataaatccaagtctgaaactctgcgctctagtactgctgttaagatacacaacttgtttcttagttcatataatctcgggatacacacacacacacacatatatatacacacacatacgtatacacacacatacatatatataaatatacctgatgccagatttttttcataaatattctgcctactgtaaatatgggttcctctgagttgttttagaaaattagcgcaatgtattaaaatcaagtgttaggaaatttcatggtcttacctacaataacttttattttggaattgaactattattaaattgtatctaatcctggaaaaaaaaaaaaaaaaaaaaaaaaaaaaaaaacaaaaaaaagaacaaaataaaaaaaaagaaaacaacaaaaaaaaaaacaacaaaaaacaaaagagagggaggaggcgcaacaagcacaacgaagcactaccccgggagggggcacgccgcacacagaacgccggagcggcacgcccggaccccactatctagaaacgacaaagcgtgtgcccacacaaaacaaaagtaaaaagagcgcagacttatcaatcagacacacgccaagcgacgagacgcggccgcagatcctcaacaaacacagcacactgaatagcaaggtggagagaaacacaacctggtggctgacgcagcgacacacatcctgcgaaggaaaagacgagacactcacactaccatgggagagtggaggagcaaaacaacacacaggcgagaagaacaacaaaaacccagccacaccagcaaacataaacacgccaccatgacaacggcgacaacacaacaacgaccacgtctcaagcccgagtcactaactgagcacagacaacaccgcacacacaactacaatcagccgcggaacaaaggacaactaactacgaacgacaaccgactgatcagagcagagacaaacactcaactccaaccgagggagcgatcaaagaacaaataaggan

SEQ ID NO: 735165 - DNA, 18546 bp, Homo sapiens
gtaagggtctttacatggtttccagatagttcattagttgttgctttctttttttgtctgttttctgttttttttttttaaataactgtggtatgatgtaataggaacttataatttctgagttgcttatttttcctttacagttatagtaaagttatactcatttattttctcctgctttctgcagagtaaaatactgatttttgtctagaaacaagacagtgcaagacaatgttgaaagtgaaattctatgttaaaatatgccagatttattttaagaatttaatatctgtagtcagttatcaatacaaccaaattacataattatgcatgataataggtaaatactgagaagttcacctcattttcttgttaaaggatttggctattaccgtatgtgtcagttagtactcttttgtatggtagtgaaagaaaactcaacccaaactgattcatgaagaagaaagtaaatctggttagatgtggtttgaattaggtaattcatgtcatgaggactcagatctcccatctctatttctacgttccacttttgcattggcttcattttcggttaggttctcccttggtggtggtaaggtggttgtagcaatgtcagcctcccatttttggaaccgagtccataggaggctattctttctagaccttaataggagtaacacaattattgctcatcaccctagctttggccatgtgtcaaatcctgaccagtcacaatttcacagtcatagattctaccctggagctgggatgttactggcctcactagaaacacattgctgatagggtagaaggtgtgttcatcctacccaacccgacccgcaccaaagtcagaatagggaaaaacagatgttgggtgacatgcaactaacgtctgccgtactacactgaagatatttttctatgtttattctccagtgaaagagcttatatttgtggtacataggggattttgttttaatttagaaaatttaattgtagaaaacatgttttataaccctttctctgtactttgttctatatcaggaattgacttgattagataaggtgacatagggtatcttaggccctacaagatagtaaaccccccatcacttgaaagtattcagtagaggcttaaaaaacattattaaaggatgtggttattaggggactttaagaaatgaatatgaaattgaagtaggaaatctttaagctactctgtgagttatgccttttaaaagcaatttgtaattcctgtagatttcttttaaatttaggcagtttcataaatgactatagcatcattttagcaaatttgtgatcctgtaagaggaggataagtgttttttgtttgtttgtttgttttttgtttttttgagacagagtctcactttgtaccccagaaagtaaatctagttagatgtggtttgtctcggctcactgcaacctccaccccgtgcgttctagcaattctcctgcctcagccaccacacctggcctaagaggggaggataagtgttttagtgatcatattagactgaatgtggcagatgagatttcccgcccccccattgttggttagactgacattcaacattcaacaagagccacctgcccttgtaggcatttctgccactatacccctacataaacctagagtgctattgcttacttgctttccttcaaatacattttttcatttgtggcctccacattcttgtgtgtgatgtcctttctctgtgaaatgtcttctaccctttttttcaaagcctagtttagaactgacctcttctatgaaccctctgccgactggcctttccttccccagtcccccaagttcaaaatgatctctttcctttgaatactatagtatttgcacaattcactatctccttatcatattcttcttgtttatttgttatcagctgatgttgacatcataagttcaggttcctaactagatccaatattggaatttttcagcttttgctaagaagagagcttgtatgtctttgggaataatgggcagaaaaagataactttgagaagtcttagacttctaatagctttgatatttaaaagtacatgtaatacaagaggtttttttcctacatttaatgcatggagaagataggacatttagaaatatggaattaatgttcatttgactggcaaaagattattttctcagatgtagtgaagtgtggtaaagaacttcactctagagccagaatgtctgtgtttgtatcccagagcccaccacttacatttaaccattaacattcaacttactgtctctgagtttcagtggcctcatctataaaatgaggataataagagtacctacttcatagagttgttttagtggttaaataaactaacgtaaacttgctagaacttgataaactaatattggatgagaactggttgaaataatgcctggctatagtaaaaacttggtaaatgttagttgccattacaatgcaactactgttcctaccattccctctgccagtgcctggtattcagtagcactcagtaaatgttagttaaatgaagaaataactgaaggaatgaatgaacaaatggttgatgtagagattgcttttccattgttgtttattgaatattttgagatgtataacatactgtctgttaggcactgtgggatgggcactcacggagctgtcttccaaaggggtataggagaggagacgcagtgatctcagcaacctacctttaaaacatatcctagtatctactgccatgttaggttctcttcttttgctttttttaaaaaaaaattctcacaaaactccccccacccacttcagtttatagatgaggaagctcctactacataatagtgcttcccagtctaattcttgacctcattgtatttatatgtcctttttttttttgacagagtctcactcattgcagtggcacaatcacagctcactgcaacctctgcctcccctgctcaagtgatcctcccacctcaacctcctgagtagctgggactacaggcatgcaccaccacgcctggctaatttttgtatttttttgtagagatgcggttttgccatgttggccaggctggtctcgaactcctgggctcaagccatctgcccactttggcctctgagagtgctgagattataggcatgagccaccattcccagccatgttttcctttttcattgaactttatctactttagccattaaactccactccattggtcttgtcattactaagagctgaaccacctgcaaaatattaagttaaaaagcgttttctttgacaacagttttcttttcttcatcttcctctatcactttacttctgaacttttattctctcattttgatctgacccctacttctctgtttttcctggccatttagtactttcttgttttgctcatcccatttcccagtggagaccttctggtctgctgctttatcactggttttgttagaagacatacaaatggcaaggaggtatatgaaaaggtgcctaacatcattgatcatcagagaaatgcagaccaaaactacaatgagatatcatttcaccccagttaaaatggctttttttttttttttccaaaagacaggcaataacaaagtactggtgaggatgtggagtaaagggaacccacatacactattagtaggaatgtaaattagtacagccactgtggagaacagtttgaaggttcctcaaaaaactaaaaatagagctaccatataatccagcaatcccactgctaggtatatatccaaaagaaaggcaatcaatatacggaagagatacctgcacacccaggtttattgcagcactattcacaatagccaagatttggaagcaacccaggtgtccaacagatgaatggataaagaaaacatggtatataaacacaatggaatactattcagctgtgaaaaagaatgaaatcctgtcatttgcaatcctgtcttgaatagaactggaggtcatgatgttaagtgaaataagacaggcacaaacttcacatgttctcacttatttgtgggagctaaaaattaaaacaatcgaactcatggagctagagaatagaattatggttaccagaggctggaagggtggttgggcgtataagtgtagggggagtggggatggttaatgggtacaaaaaaatgagaacgaataagatctacttgataacacaacagggtgactatagtcaacagtaattatacatttaaaaataactagaagagtataattagattgtaacacaaaagataaatgcttgaggtgatggatacctatttaccctgatgtgattattacttatttcatgcctatatcaaaatatttatactccaaaaatatatatacctactatgtacccacaaaaatttaaaaatttatatattgtttttgctatcacctttagaatttcttgtcattggatagttcgtctgtataccattctggtcttcattccccagggcccccgttgtctgatttttctgcttctagaactgttagaggtcacaaaagcaagatggttgtatctatcacaatttttgtctgactttaactgggtatctgttacgatttagtagtcatcttactgacttcttgttggtttccaattgaatcctcacagtagactgttttcattgtaatcagtatcgaattatagcctgttcccttcttcataaatgaaggctttcttcttcaacagttcttagtgacttcacctgtactttatttctctgctttgaatatttcgaagaaaacatattcttgctctttcccaaggttaacactacatacattaccttgaccacaggatgttttcttgcagattgtgacctaattccatcacccttcagcagcccccaccgttttcatggattcagctaaaccttctgtaagatgactctttttccccctaatctttatatctcttttgatatgtagctttagtctcactttttttccttttggattttgccagttagatgtctccctggaattccacttcagcatggctaagactaagcttgtcttctctttcctccccaaagcaaattgtaattaggatagactgaaggtgacagaagataactaagatcttcttcatcctttcggctcttatggaagctgaattccagtagtcattctaaatttgttgtatgtcagcttatggtatcttttcatgtctttacattcagccaaagaggaagttccttgaaggggagaccagagggcgtgctgtgcttcttaatcctctctttcttaaccagtaagaggcattcagtagatatctgatgatactgattaatagaggggaacttttcagattcttttttttttttaaccctagtaagctttagtacaaactaaatgctgagagattatcaagtaagggattgatcatcacaagaagactcaggatgttacatcctgtaggttttatagtttcctatattgtaaaaaatatgagttatagcagcttgtctggatgtcatacaggtataaaaatcagttttataaacttgagtaaattggggcccattttagaaaaaactcttgcaggctgtgaatgccaatatataagtaaagtattaagtataatgttatttaatgtgggcaaacataaagccaggtgtaaattttttaggtttaaaatcttatagaactatacatccaaaagaaaatttcaagttaaacataatacaaagcaatacaatctaaattaacattaatttaatgtgatgaatgatattgccttgctaaaagtgggtcactacttacaatgtgcaaatggtactcatcgttagggtatagattcttttaaactatgacatacgtacactaccatgtggaacgtgatgatgtgttctctgttctaactactgggaagacttccttggcatagcacatgccatggggtcagttggctttgacttcatatagatatgccatttacttggtcagtgtcacttctatgacaagtagtatgttgtgccagtttgattataagtacaaatatgggcaatgaagtaacttggttttaaggttgttactaagctgagtaacagtgtgtggctatacaaatttttataggctatcaggaatgaaaacacaggagattgttgtagattcaagtattttagattcaagtttgaagatgctcatgcagatgtttaactgagttgtatagacctttatgtttctttctttttctctttttttttttttgagacagagtcttgctctgtcacccaagctggagtgcaatggtgtgatctcggcttactgcaacctccgcctcccaggttcaagcaattctcctgcctcagcctcccaagtagctgggattacagatgtgcaccacgacgcccagctgattttttgtattttagtagaggcggggtctcaccatgttgtcaagatggtctcaatctcctgaccttgtgatccacccacctctgcctcccaaagtgctgtgattacaggcgtgagccaccgcgcctgactgacctttatgtttcttaactttatgctatacatcagttgatatttcaaaaatttaaatggtttctatgattattctttgggctaagaaattgggcattaattgtcctcatatgtatggtttttgtggctacttcatgtagattttatttttggtggttatcaaattggaatttttttttttttttttttttttgagacggagtctcattctgtttcccaggttggagtacagtggtgcaatctcagctcactgcagcctcgacctcccaggctcaagcagtcctctcacctcagccttctaagtagctgggactacaggcacgcaccaccacacctggctagttttttgtgtttttagtagagatggggttttaccctgttggccaggctggtcttgaactcctggcctcaagtgatccacctgcctcagcctcccaaagtgctgggattagaggcatgagccaccacacctggctgaaattggaatttcattggtactgcctgtaattttatgttaatttttttttttttttgtcgtcactagcttttatctaaagcccctagagagaaaggccatgataccttgtatacaaggttataagagtatacaagggaaagggagggctgaagggaacagggtgggctggtacaagcctcattagaaataccattgagtctgtgagtaaaacatcattatatgaaaaggagatgtggttttagggtggtccaattacttttgcaccagcctaataaaattacaagtcattatcaatagagacattgtaaaacctttttttttcccaaaagaagtatcaggtatgataattacatgtctgcccaactttcgttatagattaacataacttaattgtatttaaggtacaatttaggagagttgctgaaaaatgaatctttagtattgggatgccttgattctaccctcaatagctataatggattatgtgtctgagtagattaataaaaatcttttgagcatttttcttgaactacttcactgaagattagctttttgagcatccattttaatttctcagtatataaggatcggtttatcacaactgtattgttttccctggccttgttagattatattttcatatcatgtagaaaaataggtgtattcgttctcccttgaagtcctttgtctcccaaaggaaatggttgcaatacagatgtgtcacctcttccacaggtaaagtggaatggagaagtagccagttaaatagtgcatgctcaatttggaacatttagagcatacaggaaagttatttatttggtaaatattttttaagcatttactatgtttcatgcattgtactagttgtagaggatataattgaatacaactacatgtagcccttgactttatggaactagtctagtataaagatttaagattgcctggcatggtggctcacgccactaatcccagcactttgagaggccaaggcaggattgcttgaggccagaagtttaagagtagcttggtcaacataatgagactccatctctaaaataaatagatagatagatagatagatagatagatagatagatagatagaagtagttagacaacacaaagcagtttcactcatcttgtggcaaggagttatgtatttctaatcaaatttggcaactcaagcattttcaacaaaatctacatgttttttcagaataaagtgaccaacacagaatgttacctgtaaaaatcagagcaataattgctatctaaaataattttgaaaattaagtggtactgaaaggctcatatagcaaaaatatggcctcctgtcattgtactttcctacttcccagactcaccattttcaacattttttagtagtttattttgccattttatagcatagtacctgacattttatttattcaacagacatttcttaagtacctaatacatgccattccttgtttgaagggatgctaaggatacagtggtgaacaaggcgttgtggggttgtatagagggtattcattcctaaccttgaaccaaatatttctttctgttggataatgcattaaaaattgcaaacagtttacaaacttttggagcaatggtggccttgatcataaagtagggactgcttctaccgtatacatgcttggtggtgtatttgtgatatctggctaaagtttctacatggaaattgactgactttagttttgagacttctgggaaccagtcaggcaaaatagtgaaactgtgtatcctgtttccaagagttgtcttttaaggttatctgcttcattcatttggcctgacttgctaggcaaatgcctagggtaaatatgatttgattaactataacaacaacagcaacaacaacaactttattttttagagcagtttgaggttcacagcaaaattgagcagaatgtacagagattttccctatacccgcttcccctacgcatgtgcggcctcccctactatcaacatcccccaccagagtggtttgttacaattaatgaacctacattgacacatcattatcactcaaggtccgtagtttacattagagtccactcttggtgttgtgtatgggtttggtcgattttataatgacatttatccaccattatagtgtcatacatagtaattttgctaccctaaaaatccagtgtgctccacctgttcctccttccctcctccctcatccctggcaaccactgaactttttaacatctccatagttttgccttttccagaatgtcatatcattggaatcacacagtatgcagccttttcaaatgggcttctttccgttagtaataggcatttaagtttcatcctcatcttttcatggcttgatagctcatttctttccctccctcttttcttccctgtcttccttccttcctcttctttcctgtttcctctttcttcttccttttttaagagacaaggtgtctcactctgttgcccaggctggagtgcagtggcccaatcatagctcattgcagccttgaattcctgggctcaagtgatcctcctgcgttagcctcctgagtagctgggatcacaggctccagtcattttagtgctgaataatatttcattatctggatgtaccgcctattcattcacctactgaagaatatcttggttgcttctaagttttggcaattatgagtgaagttactataaacattgtatacaagttttatgtggatgtatgttgtcatctcccttgggcagataccaaggagtgccattgttggatcatatggtaaatatatctttagttttgtacagaattctaggttggtatttttttctctctcagtcctttattttatttggagacagtctcgctatgtcgcccaggctgccatacagtggtgccatctgggctcactgaaacctccacctcccaggttcaagcgattcttgtgccttggcctcccaagtagctgggattacaggagtgcgccaccacgcctgctaatttttgtatttttagtagagacagggttttgccatgttgcccaggctggtctcaaactcctgaccttaagtgattcacccacctcaatctcccaaaatcctgggattacaggcctgagctactgtgcctgatctctctcagtactttaaagaaatatttcattccacttttcttttttttcttctttttgagatggagtctcactctgtcgcctgggctggagtgcagtggcgcgatctcagctcactgccacctccgcctcctgggttcaagtgattctcctgcctcagcctcctgaatagctgagattacaggcgcccaccaccatgcccagctaattttttgcatttttagtagagacgggggttccaccatgttggccaggctggtctcgaactcctgacctcgtgattcgcacatctcggcctcccaaattgctgggattacaggtgtgagctaccacgcctggcccactcttcttgcttacatagtttctgaggagatgtcagatgtaatttttatttttgctcttctgtaggcaagttgagttttttccccctctagcttctctcaggatttttttctttatctttgattttcagtagtttgaaaattatatgcctagctgtcagggttttttgcttgtttgtttttgttttctcaggtgtgactccagaaaggttctaaagaggagctttacaatctcttctctggggtttatggagacttcctttacccttctgtgttagccccttaaagcactgcgtcaaccttaaaagggcacaggaaagggtgtctatgccatttttatgccatttatcctgcttggtgttttctgagctttcttcatctgcggtttaatgtctcacattaatttgtagaaattctctgtcattgtttcaaatttttcttcagttcttttctctgtttcttcttctggtgttcccattatgcttttgtggttgtcgtacagttattggatattttgttccaggcttttttttttccagtctttttttccttttgcttctcggttttgtaggtgtctgttgagatactctcaagtgcagatattctttcctcagctttgtctagtttactaataagcccattaaaggcagtcttcatttctgttacagtctttttgatcagtagcatttcttttttattctttcttaaaatttctgtctttctgcttacattgcccatctgttcttgcatggtttctactttgtccattagagttcttaggatatttatcataattatttcaaatttctggtgtaacaattccaacatccctgcaacatccaagtctagtttcgatgcttactgtgtctcttccagctgtgttttttcctatttaatatgtcttataattttttcttgatagccatacatgatgcattaggtaacagaaactgctgtgagtggacctttagtaatgtggtggtaaggtgtgcatggaggggaaacattttcagtctgttagtgaacttttgtcaacttcacatgtgcttctcaagtccatcctgtaagtgggagagtagggctagagaggactgaagttgggtatatattaaatactttctcctacaaagaagcctagaggggacgcattaggggattttttttcccccagtattcactgtgatgacccttattgagctcctggaggtaaaactcacaaaactgtggttctcccccctgcccatattactacatgtccctggagtttatatctttcagacttgtctgcactgagcttccaccaatttgtcaaatacagatcaggtttccctaccacccgtgcagttgaaaacccacatacaacttttgactcctccagagcttaactactcatagcctgctattgactggaagccttgccaataacataaacagttgattaatacatattttatatgttttctgtattatatattgtattcttacaataaagagaaaagaagatgttattaagaaaatcataaggaagataaaatatatttactgttcattaagtggttcccatgggtgctggttcccatggaggttgccccttgtgagtttttgctcagggaagttgtgattctctatatttgcctgttggtctcctaatttgggagtcatcagttttccctgtgacctcacttctcttacagagttaagaacagttgttggtttttcagtttgttcagtgttttacatgttgttagaacacagtggtacttctaagtttcttaacatgctagatcagaaacctgaagtctcacctaatttggctttttatattttttcttcttttttttcttccattgctaccaaagcatttttcatctgtgtctggggtgacattagagcagaatgtgatttctaggtaaacattattgggctccctagcagaaaaatttttgaaagtagtacatgaattctgtataattaaaattttcttttcatcttaataggtataggtaataggcacggcctattttttttttgctcaacagtctaaaatagtaatttaatcacctaatagccttagttatatagttgaaagaagagttggaaatctgattcatgggttggaaatcacctgtcacatatgagttttaggcactggtcactttattttgaaacagctttggggttttttcctttttcaactcataataggctttaacagcttttagttttgtttctgtttttttaacagcatgagttgccaaatttggttatagcttcttggtacaagatgggtaaatttgctttgtgttgtgtaattactttttattttaaatgctacctcttttatgaacactaactttacactaagattaggaaaatgagaattgcatgtctgcaacaaatagctatctgtagtattaaattgtgaaaatgtagactttggattggagctggcatctcttaatatgtaattgtaacatagagtaaataagtattttgtcccttgtagggtcaaacagtacagtgcatgggcagaattagagatgtaggcttttttttttttttttttttttactggcttagagaaccgtttgatcagctaatatggaattaagtccctagggctgcccaggcacaacattaactgctattaaaggaaaatttaaaagagtattagtgaaggttaaatactgaccatggacatctggcaaaattgatgttttttttcccctccaccattgtttatagtttattgttatttatcagagaattaatgtttattttcagaatctattaccataagaaatctgtttgaggacttcgtatgtgccaggaattctactaaataatgatataatgctgaacagaattagataggatcctcacttcgttaagcttacagtctagtggtatagatcaacattaatcaaagaataacacaaatagaaagcagagcagtggttcatgggattgactgtagagaagcatgagggaagttcccaggtgatggaaaatactttatttcttaatcgtggtggttacatgtgtgcatatgtttatgaaaatatattgtacatttaaagtggatacattttatcacatgtaaattatgactctataaagttaattaaaaagaataactcaggtaaggtggtgtgtgcgcctgtagtcccagctatttctgaggcaggaagatcacttgagcccaggagtttgagttcagcatgggcaacatgagacctgtgagactttgtctctaaaaaaatttaaataaataactaagataaatgtaaaattacagctgtagtaagttctacaaaggagagttacatgggctatgacgatgtaagatagcaagaactgacattggcagggaggaaatgatgatgagtagaagtaaataagtgaagtgtggggattgatgtcaaggggacagtataaaagaaataacagcatgcgccaaggccctaaaattggaaagtccttggcaaattaaaggagtttgaaaaaggccattgtgtgcaaagcagaaaataggtactacaaggtaaaagatggagctaagcggtaggtaaggctaaaccttgtcagccattgttaaatattgaattgtatcctaagcacaactcagtggaaagcagttaaagttctttaattgggggaggcaatgaaggggtaataaaattggttatagaaatactgctctggctctagtgttgagaatgaattggagtagccagagtagattcaagaagactttagtaagattattccaacaggccaggacctgttatagggtggtggcaatggagagagatggacagaatggagagtgtatttaggaggtaaaaatgacagaacttggtgatgcactgaatgtgaaatggggaaggtgtctaggaggactactaggtttatggtttgcgtattagggtggatgatagcagtttcatttactgagacagggagccctggcagagtacccagcttttagagtgggtagggggaaggggagagtgcatctggtgttgggcattttgaagtgatttacatacaacaaactgaaggtatctttaacactgagtccagcaggttagcatatttattcagcaagcattgcacctttttttgttgtttttggggtcttcaactcctggcctcgaatcctccctccttcccccgcctctcccagcctccgcctcccaaagtgctgggatttcaggagtgagccaccgcgcctggccagcatcgcgctgtttgtgcagtgtgccctgtgctaggtcttgcagtgggtaccagtagagacataaaagtacaaaagataattggacgtttagtagagtcctgaaagggggcgggataggaagatacctaaccataagaaaaaccagcaagagcggaaaaggagctagtcctccagatcaataagttaatcacttatgtttgtgattccctgcattttgggtgattctctgtcgaggtcctcttaagtccagacttttgatataatctgcagtttgcgccatttggattcctgaagcatctttacaagccacctacattccttatggagctgtggcacaacagcaagcccacgatgtctcaccggattaataaaaatataggcgctcacgcttttgtttaccgatatagtatctcctcctcccctcactccatcaacccccacgcgacacaactttccggaagtaagcaaaatccgttatcaaggtgaaactccggggaccaggctccacagctgccataaactggatggcacgttagaagccggtgggtgtaggtgaggcacgctggcgcccgcgggcccttctccagccgctacccagtgggaatccgcggggctgaagccccgaaaccaggctgagcgtcccagagcgcaacctccctttcccccagcagcgccggcgccgcagaagccgcgtgtccccaggcgcactcccccaaggtgaacccccgccccccacggaggcggctgggtcgcgggtctgggcggggcgctccggacgccctcccgccgctgcgcacccctcccgcgagctgccagctccctcggcctctccacccaaaactggcccaaccgccaatcgtctgcctctcacctcctacagcaggtgacccatggccaatcgccaggggtctctttgccaggagccgccagggccagccaatcggggcgacccctccgccggggaggggacgggaaaggggtggggggtgaagggggtgaagggggtgtcccgggggacgggctgaacctcagtcaggaccgcctgcaccgcagtccggggatcgggtcgaggggagaagaaaaaggggtgctcgggagcagcccccggctacctcccctggaggcacagagggcgggggccttggcgaatggctttcttgctggccacttgcggaggtttggattcaggatttgttcctagtgtccaagattttgataagaaacttacagaagctgatgcttacctacaaatcttgattgaacaattaaagctttttgatgacaagcttcaaaactgcaaagaagatgaacagagaaagaaaattgaaactctcaaagagacaacaaatagcatggtagaatcaattaaacactgcattgtgttgctgcagattgccaaaagtactattaatcccgtagatgcaatatatcaacctagtcctttggaacctgtgatcagcacaatgccttcccagactgtgttacctccagaacctgttcagttgtgtaagtcagagcagcgtccatcttccctaccagttggacctgtgttggctaccttgggacatcatcagactcctacaccaaatagtacaggcagtggccattcaccaccgagtagcagtctcacttctccaagccacgtgaacttgtctccaaatacagtcccagagttctcttactccagcagtgaagatgaattttatgatgctgatgaattccatcaaagtggctcatccccaaagcgcttaatagattcttctggatctgcctcagtcctgacacacagcagctcgggaaatagtctaaaacgcccagataccacagaatcacttaattcttccttgtccaatggaacaagtgatgctgacctgtttgattcacatgatgacagagatgatgatgcggaggcagggtctgtggaggagcacaagagcgttatcatgcatctcttgtcgcaggttagacttggaatggatcttactaaggtagttcttccaacgtttattcttgaaagaagatctcttttagaaatgtatgcagacttttttgcacatccggacctgtttgtgagcattagtgaccagaaggatcccaaggatcgaatggttcaggttgtgaaatggtacctctcagcctttcatgcgggaaggaaaggatcagttgccaaaaagccatacaatcccattttgggcgagatttttcagtgtcattggacattaccaaatgatactgaagagaacacagaactagtttcagaaggaccagttccctgggtttccaaaaacagtgtaacatttgtggctgagcaggtttcccatcatccacccatttcagccttttatgctgagtgttttaacaagaagatacaattcaatgctcatatctggaccaaatcaaaattccttgggatgtcaattggggtgcacaacatagggcagggctgtgtctcatgtctagactatgatgaacattacattctcacattccccaatggctatggaaggtctatcctcacagtgccctgggtggaattaggaggagaatgcaatattaattgttccaaaacaggctatagtgcaaatatcatcttccacactaaacccttctatgggggcaagaagcacagaattactgccgagattttttctccaaatgacaagaagtctttttgctcaattgaaggggaatggaatggtgtgatgtatgcaaaatatgcaacaggggaaaatacagtctttgtagataccaagaagttgcctataatcaagaagaaagtgaggaagttggaagatcagaacgagtatgaatcccgcagcctttggaaggatgtcactttcaacttaaaaatcagagacattgatgcagcaactgaagcaaagcacaggcttgaagaaagacaaagagcagaagcccgagaaaggaaggagaaggaaattcagtgggagacaaggttatttcatgaagatggagaatgctgggtttatgatgaaccattactgaaacgtcttggtgctgccaagcattaggttggaagatgcaaagtttatacctgatgatcagggcagtaggcataattcagcaacaaacaatcttcctttgggagaaacctgttcattccaatcttctaattacagtggttcctatctcagggatactggactttctgacgcagatgaacaattaaggggaaaagcttcccttttccctctgtggcagttacgattttgacttcagtcctgagaaaaacttcaggttttgaaaatcagatgatgtcttctccttttccaaacaccacacgttgaaagcatttataaatccaagtctgaaactctgcgctctagtactgctgttaagatacacaacttgtttcttagttcatataatctcgggatacacacacacacacacatatatatacacacacatacgtatacacacacatacatatatataaatatacctgatgccagatttttttcataaatattctgcctactgtaaatatgggttcctctgagttgttttagaaaattagcgcaatgtattaaaatcaagtgttaggaaatttcatggtcttacctacaataacttttattttggaattgaactattattaaattgtatctaatcctggaaaaaaaacaaaaatgctagtaaaatgataatgtaccgaaattggagaaatattcaattgtaactcacttttaaaaataataaaaccttagggggggtcccggtacaaatttccccttatagagggcggttttaaatttaattggcggcttttaacaacgtt

SEQ ID NO: 735166 - DNA, 18336 bp, Homo sapiens
  misc_feature (18260)..(18260): n is a, c, g, or t
  misc_feature (18271)..(18271): n is a, c, g, or t
  misc_feature (18276)..(18276): n is a, c, g, or t
  misc_feature (18279)..(18279): n is a, c, g, or t
  misc_feature (18281)..(18281): n is a, c, g, or t
gtaagggtctttacatggtttccagatagttcattagttgttgctttctttttttgtctgttttctgttttttttttttaaataactgtggtatgatgtaataggaacttataatttctgagttgcttatttttcctttacagttatagtaaagttatactcatttattttctcctgctttctgcagagtaaaatactgatttttgtctagaaacaagacagtgcaagacaatgttgaaagtgaaattctatgttaaaatatgccagatttattttaagaatttaatatctgtagtcagttatcaatacaaccaaattacataattatgcatgataataggtaaatactgagaagttcacctcattttcttgttaaaggatttggctattaccgtatgtgtcagttagtactcttttgtatggtagtgaaagaaaactcaacccaaactgattcatgaagaagaaagtaaatctggttagatgtggtttgaattaggtaattcatgtcatgaggactcagatctcccatctctatttctacgttccacttttgcattggcttcattttcggttaggttctcccttggtggtggtaaggtggttgtagcaatgtcagcctcccatttttggaaccgagtccataggaggctattctttctagaccttaataggagtaacacaattattgctcatcaccctagctttggccatgtgtcaaatcctgaccagtcacaatttcacagtcatagattctaccctggagctgggatgttactggcctcactagaaacacattgctgatagggtagaaggtgtgttcatcctacccaacccgacccgcaccaaagtcagaatagggaaaaacagatgttgggtgacatgcaactaacgtctgccgtactacactgaagatatttttctatgtttattctccagtgaaagagcttatatttgtggtacataggggattttgttttaatttagaaaatttaattgtagaaaacatgttttataaccctttctctgtactttgttctatatcaggaattgacttgattagataaggtgacatagggtatcttaggccctacaagatagtaaaccccccatcacttgaaagtattcagtagaggcttaaaaaacattattaaaggatgtggttattaggggactttaagaaatgaatatgaaattgaagtaggaaatctttaagctactctgtgagttatgccttttaaaagcaatttgtaattcctgtagatttcttttaaatttaggcagtttcataaatgactatagcatcattttagcaaatttgtgatcctgtaagaggaggataagtgttttttgtttgtttgtttgttttttgtttttttgagacagagtctcactttgtaccccagaaagtaaatctagttagatgtggtttgtctcggctcactgcaacctccaccccgtgcgttctagcaattctcctgcctcagccaccacacctggcctaagaggggaggataagtgttttagtgatcatattagactgaatgtggcagatgagatttcccgcccccccattgttggttagactgacattcaacattcaacaagagccacctgcccttgtaggcatttctgccactatacccctacataaacctagagtgctattgcttacttgctttccttcaaatacattttttcatttgtggcctccacattcttgtgtgtgatgtcctttctctgtgaaatgtcttctaccctttttttcaaagcctagtttagaactgacctcttctatgaaccctctgccgactggcctttccttccccagtcccccaagttcaaaatgatctctttcctttgaatactatagtatttgcacaattcactatctccttatcatattcttcttgtttatttgttatcagctgatgttgacatcataagttcaggttcctaactagatccaatattggaatttttcagcttttgctaagaagagagcttgtatgtctttgggaataatgggcagaaaaagataactttgagaagtcttagacttctaatagctttgatatttaaaagtacatgtaatacaagaggtttttttcctacatttaatgcatggagaagataggacatttagaaatatggaattaatgttcatttgactggcaaaagattattttctcagatgtagtgaagtgtggtaaagaacttcactctagagccagaatgtctgtgtttgtatcccagagcccaccacttacatttaaccattaacattcaacttactgtctctgagtttcagtggcctcatctataaaatgaggataataagagtacctacttcatagagttgttttagtggttaaataaactaacgtaaacttgctagaacttgataaactaatattggatgagaactggttgaaataatgcctggctatagtaaaaacttggtaaatgttagttgccattacaatgcaactactgttcctaccattccctctgccagtgcctggtattcagtagcactcagtaaatgttagttaaatgaagaaataactgaaggaatgaatgaacaaatggttgatgtagagattgcttttccattgttgtttattgaatattttgagatgtataacatactgtctgttaggcactgtgggatgggcactcacggagctgtcttccaaaggggtataggagaggagacgcagtgatctcagcaacctacctttaaaacatatcctagtatctactgccatgttaggttctcttcttttgctttttttaaaaaaaaattctcacaaaactccccccacccacttcagtttatagatgaggaagctcctactacataatagtgcttcccagtctaattcttgacctcattgtatttatatgtcctttttttttttgacagagtctcactcattgcagtggcacaatcacagctcactgcaacctctgcctcccctgctcaagtgatcctcccacctcaacctcctgagtagctgggactacaggcatgcaccaccacgcctggctaatttttgtatttttttgtagagatgcggttttgccatgttggccaggctggtctcgaactcctgggctcaagccatctgcccactttggcctctgagagtgctgagattataggcatgagccaccattcccagccatgttttcctttttcattgaactttatctactttagccattaaactccactccattggtcttgtcattactaagagctgaaccacctgcaaaatattaagttaaaaagcgttttctttgacaacagttttcttttcttcatcttcctctatcactttacttctgaacttttattctctcattttgatctgacccctacttctctgtttttcctggccatttagtactttcttgttttgctcatcccatttcccagtggagaccttctggtctgctgctttatcactggttttgttagaagacatacaaatggcaaggaggtatatgaaaaggtgcctaacatcattgatcatcagagaaatgcagaccaaaactacaatgagatatcatttcaccccagttaaaatggctttttttttttttttccaaaagacaggcaataacaaagtactggtgaggatgtggagtaaagggaacccacatacactattagtaggaatgtaaattagtacagccactgtggagaacagtttgaaggttcctcaaaaaactaaaaatagagctaccatataatccagcaatcccactgctaggtatatatccaaaagaaaggcaatcaatatacggaagagatacctgcacacccaggtttattgcagcactattcacaatagccaagatttggaagcaacccaggtgtccaacagatgaatggataaagaaaacatggtatataaacacaatggaatactattcagctgtgaaaaagaatgaaatcctgtcatttgcaatcctgtcttgaatagaactggaggtcatgatgttaagtgaaataagacaggcacaaacttcacatgttctcacttatttgtgggagctaaaaattaaaacaatcgaactcatggagctagagaatagaattatggttaccagaggctggaagggtggttgggcgtataagtgtagggggagtggggatggttaatgggtacaaaaaaatgagaacgaataagatctacttgataacacaacagggtgactatagtcaacagtaattatacatttaaaaataactagaagagtataattagattgtaacacaaaagataaatgcttgaggtgatggatacctatttaccctgatgtgattattacttatttcatgcctatatcaaaatatttatactccaaaaatatatatacctactatgtacccacaaaaatttaaaaatttatatattgtttttgctatcacctttagaatttcttgtcattggatagttcgtctgtataccattctggtcttcattccccagggcccccgttgtctgatttttctgcttctagaactgttagaggtcacaaaagcaagatggttgtatctatcacaatttttgtctgactttaactgggtatctgttacgatttagtagtcatcttactgacttcttgttggtttccaattgaatcctcacagtagactgttttcattgtaatcagtatcgaattatagcctgttcccttcttcataaatgaaggctttcttcttcaacagttcttagtgacttcacctgtactttatttctctgctttgaatatttcgaagaaaacatattcttgctctttcccaaggttaacactacatacattaccttgaccacaggatgttttcttgcagattgtgacctaattccatcacccttcagcagcccccaccgttttcatggattcagctaaaccttctgtaagatgactctttttccccctaatctttatatctcttttgatatgtagctttagtctcactttttttccttttggattttgccagttagatgtctccctggaattccacttcagcatggctaagactaagcttgtcttctctttcctccccaaagcaaattgtaattaggatagactgaaggtgacagaagataactaagatcttcttcatcctttcggctcttatggaagctgaattccagtagtcattctaaatttgttgtatgtcagcttatggtatcttttcatgtctttacattcagccaaagaggaagttccttgaaggggagaccagagggcgtgctgtgcttcttaatcctctctttcttaaccagtaagaggcattcagtagatatctgatgatactgattaatagaggggaacttttcagattcttttttttttttaaccctagtaagctttagtacaaactaaatgctgagagattatcaagtaagggattgatcatcacaagaagactcaggatgttacatcctgtaggttttatagtttcctatattgtaaaaaatatgagttatagcagcttgtctggatgtcatacaggtataaaaatcagttttataaacttgagtaaattggggcccattttagaaaaaactcttgcaggctgtgaatgccaatatataagtaaagtattaagtataatgttatttaatgtgggcaaacataaagccaggtgtaaattttttaggtttaaaatcttatagaactatacatccaaaagaaaatttcaagttaaacataatacaaagcaatacaatctaaattaacattaatttaatgtgatgaatgatattgccttgctaaaagtgggtcactacttacaatgtgcaaatggtactcatcgttagggtatagattcttttaaactatgacatacgtacactaccatgtggaacgtgatgatgtgttctctgttctaactactgggaagacttccttggcatagcacatgccatggggtcagttggctttgacttcatatagatatgccatttacttggtcagtgtcacttctatgacaagtagtatgttgtgccagtttgattataagtacaaatatgggcaatgaagtaacttggttttaaggttgttactaagctgagtaacagtgtgtggctatacaaatttttataggctatcaggaatgaaaacacaggagattgttgtagattcaagtattttagattcaagtttgaagatgctcatgcagatgtttaactgagttgtatagacctttatgtttctttctttttctctttttttttttttgagacagagtcttgctctgtcacccaagctggagtgcaatggtgtgatctcggcttactgcaacctccgcctcccaggttcaagcaattctcctgcctcagcctcccaagtagctgggattacagatgtgcaccacgacgcccagctgattttttgtattttagtagaggcggggtctcaccatgttgtcaagatggtctcaatctcctgaccttgtgatccacccacctctgcctcccaaagtgctgtgattacaggcgtgagccaccgcgcctgactgacctttatgtttcttaactttatgctatacatcagttgatatttcaaaaatttaaatggtttctatgattattctttgggctaagaaattgggcattaattgtcctcatatgtatggtttttgtggctacttcatgtagattttatttttggtggttatcaaattggaatttttttttttttttttttttttgagacggagtctcattctgtttcccaggttggagtacagtggtgcaatctcagctcactgcagcctcgacctcccaggctcaagcagtcctctcacctcagccttctaagtagctgggactacaggcacgcaccaccacacctggctagttttttgtgtttttagtagagatggggttttaccctgttggccaggctggtcttgaactcctggcctcaagtgatccacctgcctcagcctcccaaagtgctgggattagaggcatgagccaccacacctggctgaaattggaatttcattggtactgcctgtaattttatgttaatttttttttttttttgtcgtcactagcttttatctaaagcccctagagagaaaggccatgataccttgtatacaaggttataagagtatacaagggaaagggagggctgaagggaacagggtgggctggtacaagcctcattagaaataccattgagtctgtgagtaaaacatcattatatgaaaaggagatgtggttttagggtggtccaattacttttgcaccagcctaataaaattacaagtcattatcaatagagacattgtaaaacctttttttttcccaaaagaagtatcaggtatgataattacatgtctgcccaactttcgttatagattaacataacttaattgtatttaaggtacaatttaggagagttgctgaaaaatgaatctttagtattgggatgccttgattctaccctcaatagctataatggattatgtgtctgagtagattaataaaaatcttttgagcatttttcttgaactacttcactgaagattagctttttgagcatccattttaatttctcagtatataaggatcggtttatcacaactgtattgttttccctggccttgttagattatattttcatatcatgtagaaaaataggtgtattcgttctcccttgaagtcctttgtctcccaaaggaaatggttgcaatacagatgtgtcacctcttccacaggtaaagtggaatggagaagtagccagttaaatagtgcatgctcaatttggaacatttagagcatacaggaaagttatttatttggtaaatattttttaagcatttactatgtttcatgcattgtactagttgtagaggatataattgaatacaactacatgtagcccttgactttatggaactagtctagtataaagatttaagattgcctggcatggtggctcacgccactaatcccagcactttgagaggccaaggcaggattgcttgaggccagaagtttaagagtagcttggtcaacataatgagactccatctctaaaataaatagatagatagatagatagatagatagatagatagatagatagaagtagttagacaacacaaagcagtttcactcatcttgtggcaaggagttatgtatttctaatcaaatttggcaactcaagcattttcaacaaaatctacatgttttttcagaataaagtgaccaacacagaatgttacctgtaaaaatcagagcaataattgctatctaaaataattttgaaaattaagtggtactgaaaggctcatatagcaaaaatatggcctcctgtcattgtactttcctacttcccagactcaccattttcaacattttttagtagtttattttgccattttatagcatagtacctgacattttatttattcaacagacatttcttaagtacctaatacatgccattccttgtttgaagggatgctaaggatacagtggtgaacaaggcgttgtggggttgtatagagggtattcattcctaaccttgaaccaaatatttctttctgttggataatgcattaaaaattgcaaacagtttacaaacttttggagcaatggtggccttgatcataaagtagggactgcttctaccgtatacatgcttggtggtgtatttgtgatatctggctaaagtttctacatggaaattgactgactttagttttgagacttctgggaaccagtcaggcaaaatagtgaaactgtgtatcctgtttccaagagttgtcttttaaggttatctgcttcattcatttggcctgacttgctaggcaaatgcctagggtaaatatgatttgattaactataacaacaacagcaacaacaacaactttattttttagagcagtttgaggttcacagcaaaattgagcagaatgtacagagattttccctatacccgcttcccctacgcatgtgcggcctcccctactatcaacatcccccaccagagtggtttgttacaattaatgaacctacattgacacatcattatcactcaaggtccgtagtttacattagagtccactcttggtgttgtgtatgggtttggtcgattttataatgacatttatccaccattatagtgtcatacatagtaattttgctaccctaaaaatccagtgtgctccacctgttcctccttccctcctccctcatccctggcaaccactgaactttttaacatctccatagttttgccttttccagaatgtcatatcattggaatcacacagtatgcagccttttcaaatgggcttctttccgttagtaataggcatttaagtttcatcctcatcttttcatggcttgatagctcatttctttccctccctcttttcttccctgtcttccttccttcctcttctttcctgtttcctctttcttcttccttttttaagagacaaggtgtctcactctgttgcccaggctggagtgcagtggcccaatcatagctcattgcagccttgaattcctgggctcaagtgatcctcctgcgttagcctcctgagtagctgggatcacaggctccagtcattttagtgctgaataatatttcattatctggatgtaccgcctattcattcacctactgaagaatatcttggttgcttctaagttttggcaattatgagtgaagttactataaacattgtatacaagttttatgtggatgtatgttgtcatctcccttgggcagataccaaggagtgccattgttggatcatatggtaaatatatctttagttttgtacagaattctaggttggtatttttttctctctcagtcctttattttatttggagacagtctcgctatgtcgcccaggctgccatacagtggtgccatctgggctcactgaaacctccacctcccaggttcaagcgattcttgtgccttggcctcccaagtagctgggattacaggagtgcgccaccacgcctgctaatttttgtatttttagtagagacagggttttgccatgttgcccaggctggtctcaaactcctgaccttaagtgattcacccacctcaatctcccaaaatcctgggattacaggcctgagctactgtgcctgatctctctcagtactttaaagaaatatttcattccacttttcttttttttcttctttttgagatggagtctcactctgtcgcctgggctggagtgcagtggcgcgatctcagctcactgccacctccgcctcctgggttcaagtgattctcctgcctcagcctcctgaatagctgagattacaggcgcccaccaccatgcccagctaattttttgcatttttagtagagacgggggttccaccatgttggccaggctggtctcgaactcctgacctcgtgattcgcacatctcggcctcccaaattgctgggattacaggtgtgagctaccacgcctggcccactcttcttgcttacatagtttctgaggagatgtcagatgtaatttttatttttgctcttctgtaggcaagttgagttttttccccctctagcttctctcaggatttttttctttatctttgattttcagtagtttgaaaattatatgcctagctgtcagggttttttgcttgtttgtttttgttttctcaggtgtgactccagaaaggttctaaagaggagctttacaatctcttctctggggtttatggagacttcctttacccttctgtgttagccccttaaagcactgcgtcaaccttaaaagggcacaggaaagggtgtctatgccatttttatgccatttatcctgcttggtgttttctgagctttcttcatctgcggtttaatgtctcacattaatttgtagaaattctctgtcattgtttcaaatttttcttcagttcttttctctgtttcttcttctggtgttcccattatgcttttgtggttgtcgtacagttattggatattttgttccaggcttttttttttccagtctttttttccttttgcttctcggttttgtaggtgtctgttgagatactctcaagtgcagatattctttcctcagctttgtctagtttactaataagcccattaaaggcagtcttcatttctgttacagtctttttgatcagtagcatttcttttttattctttcttaaaatttctgtctttctgcttacattgcccatctgttcttgcatggtttctactttgtccattagagttcttaggatatttatcataattatttcaaatttctggtgtaacaattccaacatccctgcaacatccaagtctagtttcgatgcttactgtgtctcttccagctgtgttttttcctatttaatatgtcttataattttttcttgatagccatacatgatgcattaggtaacagaaactgctgtgagtggacctttagtaatgtggtggtaaggtgtgcatggaggggaaacattttcagtctgttagtgaacttttgtcaacttcacatgtgcttctcaagtccatcctgtaagtgggagagtagggctagagaggactgaagttgggtatatattaaatactttctcctacaaagaagcctagaggggacgcattaggggattttttttcccccagtattcactgtgatgacccttattgagctcctggaggtaaaactcacaaaactgtggttctcccccctgcccatattactacatgtccctggagtttatatctttcagacttgtctgcactgagcttccaccaatttgtcaaatacagatcaggtttccctaccacccgtgcagttgaaaacccacatacaacttttgactcctccagagcttaactactcatagcctgctattgactggaagccttgccaataacataaacagttgattaatacatattttatatgttttctgtattatatattgtattcttacaataaagagaaaagaagatgttattaagaaaatcataaggaagataaaatatatttactgttcattaagtggttcccatgggtgctggttcccatggaggttgccccttgtgagtttttgctcagggaagttgtgattctctatatttgcctgttggtctcctaatttgggagtcatcagttttccctgtgacctcacttctcttacagagttaagaacagttgttggtttttcagtttgttcagtgttttacatgttgttagaacacagtggtacttctaagtttcttaacatgctagatcagaaacctgaagtctcacctaatttggctttttatattttttcttcttttttttcttccattgctaccaaagcatttttcatctgtgtctggggtgacattagagcagaatgtgatttctaggtaaacattattgggctccctagcagaaaaatttttgaaagtagtacatgaattctgtataattaaaattttcttttcatcttaataggtataggtaataggcacggcctattttttttttgctcaacagtctaaaatagtaatttaatcacctaatagccttagttatatagttgaaagaagagttggaaatctgattcatgggttggaaatcacctgtcacatatgagttttaggcactggtcactttattttgaaacagctttggggttttttcctttttcaactcataataggctttaacagcttttagttttgtttctgtttttttaacagcatgagttgccaaatttggttatagcttcttggtacaagatgggtaaatttgctttgtgttgtgtaattactttttattttaaatgctacctcttttatgaacactaactttacactaagattaggaaaatgagaattgcatgtctgcaacaaatagctatctgtagtattaaattgtgaaaatgtagactttggattggagctggcatctcttaatatgtaattgtaacatagagtaaataagtattttgtcccttgtagggtcaaacagtacagtgcatgggcagaattagagatgtaggcttttttttttttttttttttttactggcttagagaaccgtttgatcagctaatatggaattaagtccctagggctgcccaggcacaacattaactgctattaaaggaaaatttaaaagagtattagtgaaggttaaatactgaccatggacatctggcaaaattgatgttttttttcccctccaccattgtttatagtttattgttatttatcagagaattaatgtttattttcagaatctattaccataagaaatctgtttgaggacttcgtatgtgccaggaattctactaaataatgatataatgctgaacagaattagataggatcctcacttcgttaagcttacagtctagtggtatagatcaacattaatcaaagaataacacaaatagaaagcagagcagtggttcatgggattgactgtagagaagcatgagggaagttcccaggtgatggaaaatactttatttcttaatcgtggtggttacatgtgtgcatatgtttatgaaaatatattgtacatttaaagtggatacattttatcacatgtaaattatgactctataaagttaattaaaaagaataactcaggtaaggtggtgtgtgcgcctgtagtcccagctatttctgaggcaggaagatcacttgagcccaggagtttgagttcagcatgggcaacatgagacctgtgagactttgtctctaaaaaaatttaaataaataactaagataaatgtaaaattacagctgtagtaagttctacaaaggagagttacatgggctatgacgatgtaagatagcaagaactgacattggcagggaggaaatgatgatgagtagaagtaaataagtgaagtgtggggattgatgtcaaggggacagtataaaagaaataacagcatgcgccaaggccctaaaattggaaagtccttggcaaattaaaggagtttgaaaaaggccattgtgtgcaaagcagaaaataggtactacaaggtaaaagatggagctaagcggtaggtaaggctaaaccttgtcagccattgttaaatattgaattgtatcctaagcacaactcagtggaaagcagttaaagttctttaattgggggaggcaatgaaggggtaataaaattggttatagaaatactgctctggctctagtgttgagaatgaattggagtagccagagtagattcaagaagactttagtaagattattccaacaggccaggacctgttatagggtggtggcaatggagagagatggacagaatggagagtgtatttaggaggtaaaaatgacagaacttggtgatgcactgaatgtgaaatggggaaggtgtctaggaggactactaggtttatggtttgcgtattagggtggatgatagcagtttcatttactgagacagggagccctggcagagtacccagcttttagagtgggtagggggaaggggagagtgcatctggtgttgggcattttgaagtgatttacatacaacaaactgaaggtatctttaacactgagtccagcaggttagcatatttattcagcaagcattgcacctttttttgttgtttttggggtcttcaactcctggcctcgaatcctccctccttcccccgcctctcccagcctccgcctcccaaagtgctgggatttcaggagtgagccaccgcgcctggccagcatcgcgctgtttgtgcagtgtgccctgtgctaggtcttgcagtgggtaccagtagagacataaaagtacaaaagataattggacgtttagtagagtcctgaaagggggcgggataggaagatacctaaccataagaaaaaccagcaagagcggaaaaggagctagtcctccagatcaataagttaatcacttatgtttgtgattccctgcattttgggtgattctctgtcgaggtcctcttaagtccagacttttgatataatctgcagtttgcgccatttggattcctgaagcatctttacaagccacctacattccttatggagctgtggcacaacagcaagcccacgatgtctcaccggattaataaaaatataggcgctcacgcttttgtttaccgatatagtatctcctcctcccctcactccatcaacccccacgcgacacaactttccggaagtaagcaaaatccgttatcaaggtgaaactccggggaccaggctccacagctgccataaactggatggcacgttagaagccggtgggtgtaggtgaggcacgctggcgcccgcgggcccttctccagccgctacccagtgggaatccgcggggctgaagccccgaaaccaggctgagcgtcccagagcgcaacctccctttcccccagcagcgccggcgccgcagaagccgcgtgtccccaggcgcactcccccaaggtgaacccccgccccccacggaggcggctgggtcgcgggtctgggcggggcgctccggacgccctcccgccgctgcgcacccctcccgcgagctgccagctccctcggcctctccacccaaaactggcccaaccgccaatcgtctgcctctcacctcctacagcaggtgacccatggccaatcgccaggggtctctttgccaggagccgccagggccagccaatcggggcgacccctccgccggggaggggacgggaaaggggtggggggtgaagggggtgaagggggtgtcccgggggacgggctgaacctcagtcaggaccgcctgcaccgcagtccggggatcgggtcgaggggagaagaaaaaggggtgctcgggagcagcccccggctacctcccctggaggcacagagggcgggggccttggcgaatggctttcttgctggccacttgcggaggtttggattcaggatttgttcctagtgtccaagattttgataagaaacttacagaagctgatgcttacctacaaatcttgattgaacaattaaagctttttgatgacaagcttcaaaactgcaaagaagatgaacagagaaagaaaattgaaactctcaaagagacaacaaatagcatggtagaatcaattaaacactgcattgtgttgctgcagattgccaaaagtactattaatcccgtagatgcaatatatcaacctagtcctttggaacctgtgatcagcacaatgccttcccagactgtgttacctccagaacctgttcagttgtgtaagtcagagcagcgtccatcttccctaccagttggacctgtgttggctaccttgggacatcatcagactcctacaccaaatagtacaggcagtggccattcaccaccgagtagcagtctcacttctccaagccacgtgaacttgtctccaaatacagtcccagagttctcttactccagcagtgaagatgaattttatgatgctgatgaattccatcaaagtggctcatccccaaagcgcttaatagattcttctggatctgcctcagtcctgacacacagcagctcgggaaatagtctaaaacgcccagataccacagaatcacttaattcttccttgtccaatggaacaagtgatgctgacctgtttgattcacatgatgacagagatgatgatgcggaggcagggtctgtggaggagcacaagagcgttatcatgcatctcttgtcgcaggttagacttggaatggatcttactaaggtagttcttccaacgtttattcttgaaagaagatctcttttagaaatgtatgcagacttttttgcacatccggacctgtttgtgagcattagtgaccagaaggatcccaaggatcgaatggttcaggttgtgaaatggtacctctcagcctttcatgcgggaaggaaaggatcagttgccaaaaagccatacaatcccattttgggcgagatttttcagtgtcattggacattaccaaatgatactgaagagaacacagaactagtttcagaaggaccagttccctgggtttccaaaaacagtgtaacatttgtggctgagcaggtttcccatcatccacccatttcagccttttatgctgagtgttttaacaagaagatacaattcaatgctcatatctggaccaaatcaaaattccttgggatgtcaattggggtgcacaacatagggcagggctgtgtctcatgtctagactatgatgaacattacattctcacattccccaatggctatggaaggtctatcctcacagtgccctgggtggaattaggaggagaatgcaatattaattgttccaaaacaggctatagtgcaaatatcatcttccacactaaacccttctatgggggcaagaagcacagaattactgccgagattttttctccaaatgacaagaagtctttttgctcaattgaaggggaatggaatggtgtgatgtatgcaaaatatgcaacaggggaaaatacagtctttgtagataccaagaagttgcctataatcaagaagaaagtgaggaagttggaagatcagaacgagtatgaatcccgcagcctttggaaggatgtcactttcaacttaaaaatcagagacattgatgcagcaactgaagcaaagcacaggcttgaagaaagacaaagagcagaagcccgagaaaggaaggagaaggaaattcagtgggagacaaggttatttcatgaagatggagaatgctgggtttatgatgaaccattactgaaacgtcttggtgctgccaagcattaggttggaagatgcaaagtttatacctgatgatcagggcagtaggcataattcagcaacaaacaatcttcctttgggagaaacctgttcattccaatcttctaattacagtggttcctatctcagggatactggactttctgacgcagatgaacaattaaggggaaaagcttcccttttccctctgtggcagttacgattttgacttcagtcctgagaaaaacttcaggttttgaaaatcagatgatgtcttctccttttccaaacaccacacgttgaaagcatttataaatccaagtctgaaactctgcgctctagtactgctgttaagatacacaacttgtttcttagttcatataatctcgggatacacacacacacacacatatatatacacacacatacgtatacacacacatacatatatataaatatacctgatgccagatttttttcataaatattctgcctactgtaaatatggggnccccgggtggntaaanatngngccggtttaacccggggggaattcggggtaccacacaaaaccattgggaggcaca

SEQ ID NO: 735167 - DNA, 17155 bp, Homo sapiens
gtaagggtctttacatggtttccagatagttcattagttgttgctttctttttttgtctgttttctgttttttttttttaaataactgtggtatgatgtaataggaacttataatttctgagttgcttatttttcctttacagttatagtaaagttatactcatttattttctcctgctttctgcagagtaaaatactgatttttgtctagaaacaagacagtgcaagacaatgttgaaagtgaaattctatgttaaaatatgccagatttattttaagaatttaatatctgtagtcagttatcaatacaaccaaattacataattatgcatgataataggtaaatactgagaagttcacctcattttcttgttaaaggatttggctattaccgtatgtgtcagttagtactcttttgtatggtagtgaaagaaaactcaacccaaactgattcatgaagaagaaagtaaatctggttagatgtggtttgaattaggtaattcatgtcatgaggactcagatctcccatctctatttctacgttccacttttgcattggcttcattttcggttaggttctcccttggtggtggtaaggtggttgtagcaatgtcagcctcccatttttggaaccgagtccataggaggctattctttctagaccttaataggagtaacacaattattgctcatcaccctagctttggccatgtgtcaaatcctgaccagtcacaatttcacagtcatagattctaccctggagctgggatgttactggcctcactagaaacacattgctgatagggtagaaggtgtgttcatcctacccaacccgacccgcaccaaagtcagaatagggaaaaacagatgttgggtgacatgcaactaacgtctgccgtactacactgaagatatttttctatgtttattctccagtgaaagagcttatatttgtggtacataggggattttgttttaatttagaaaatttaattgtagaaaacatgttttataaccctttctctgtactttgttctatatcaggaattgacttgattagataaggtgacatagggtatcttaggccctacaagatagtaaaccccccatcacttgaaagtattcagtagaggcttaaaaaacattattaaaggatgtggttattaggggactttaagaaatgaatatgaaattgaagtaggaaatctttaagctactctgtgagttatgccttttaaaagcaatttgtaattcctgtagatttcttttaaatttaggcagtttcataaatgactatagcatcattttagcaaatttgtgatcctgtaagaggaggataagtgttttttgtttgtttgtttgttttttgtttttttgagacagagtctcactttgtaccccagaaagtaaatctagttagatgtggtttgtctcggctcactgcaacctccaccccgtgcgttctagcaattctcctgcctcagccaccacacctggcctaagaggggaggataagtgttttagtgatcatattagactgaatgtggcagatgagatttcccgcccccccattgttggttagactgacattcaacattcaacaagagccacctgcccttgtaggcatttctgccactatacccctacataaacctagagtgctattgcttacttgctttccttcaaatacattttttcatttgtggcctccacattcttgtgtgtgatgtcctttctctgtgaaatgtcttctaccctttttttcaaagcctagtttagaactgacctcttctatgaaccctctgccgactggcctttccttccccagtcccccaagttcaaaatgatctctttcctttgaatactatagtatttgcacaattcactatctccttatcatattcttcttgtttatttgttatcagctgatgttgacatcataagttcaggttcctaactagatccaatattggaatttttcagcttttgctaagaagagagcttgtatgtctttgggaataatgggcagaaaaagataactttgagaagtcttagacttctaatagctttgatatttaaaagtacatgtaatacaagaggtttttttcctacatttaatgcatggagaagataggacatttagaaatatggaattaatgttcatttgactggcaaaagattattttctcagatgtagtgaagtgtggtaaagaacttcactctagagccagaatgtctgtgtttgtatcccagagcccaccacttacatttaaccattaacattcaacttactgtctctgagtttcagtggcctcatctataaaatgaggataataagagtacctacttcatagagttgttttagtggttaaataaactaacgtaaacttgctagaacttgataaactaatattggatgagaactggttgaaataatgcctggctatagtaaaaacttggtaaatgttagttgccattacaatgcaactactgttcctaccattccctctgccagtgcctggtattcagtagcactcagtaaatgttagttaaatgaagaaataactgaaggaatgaatgaacaaatggttgatgtagagattgcttttccattgttgtttattgaatattttgagatgtataacatactgtctgttaggcactgtgggatgggcactcacggagctgtcttccaaaggggtataggagaggagacgcagtgatctcagcaacctacctttaaaacatatcctagtatctactgccatgttaggttctcttcttttgctttttttaaaaaaaaattctcacaaaactccccccacccacttcagtttatagatgaggaagctcctactacataatagtgcttcccagtctaattcttgacctcattgtatttatatgtcctttttttttttgacagagtctcactcattgcagtggcacaatcacagctcactgcaacctctgcctcccctgctcaagtgatcctcccacctcaacctcctgagtagctgggactacaggcatgcaccaccacgcctggctaatttttgtatttttttgtagagatgcggttttgccatgttggccaggctggtctcgaactcctgggctcaagccatctgcccactttggcctctgagagtgctgagattataggcatgagccaccattcccagccatgttttcctttttcattgaactttatctactttagccattaaactccactccattggtcttgtcattactaagagctgaaccacctgcaaaatattaagttaaaaagcgttttctttgacaacagttttcttttcttcatcttcctctatcactttacttctgaacttttattctctcattttgatctgacccctacttctctgtttttcctggccatttagtactttcttgttttgctcatcccatttcccagtggagaccttctggtctgctgctttatcactggttttgttagaagacatacaaatggcaaggaggtatatgaaaaggtgcctaacatcattgatcatcagagaaatgcagaccaaaactacaatgagatatcatttcaccccagttaaaatggctttttttttttttttccaaaagacaggcaataacaaagtactggtgaggatgtggagtaaagggaacccacatacactattagtaggaatgtaaattagtacagccactgtggagaacagtttgaaggttcctcaaaaaactaaaaatagagctaccatataatccagcaatcccactgctaggtatatatccaaaagaaaggcaatcaatatacggaagagatacctgcacacccaggtttattgcagcactattcacaatagccaagatttggaagcaacccaggtgtccaacagatgaatggataaagaaaacatggtatataaacacaatggaatactattcagctgtgaaaaagaatgaaatcctgtcatttgcaatcctgtcttgaatagaactggaggtcatgatgttaagtgaaataagacaggcacaaacttcacatgttctcacttatttgtgggagctaaaaattaaaacaatcgaactcatggagctagagaatagaattatggttaccagaggctggaagggtggttgggcgtataagtgtagggggagtggggatggttaatgggtacaaaaaaatgagaacgaataagatctacttgataacacaacagggtgactatagtcaacagtaattatacatttaaaaataactagaagagtataattagattgtaacacaaaagataaatgcttgaggtgatggatacctatttaccctgatgtgattattacttatttcatgcctatatcaaaatatttatactccaaaaatatatatacctactatgtacccacaaaaatttaaaaatttatatattgtttttgctatcacctttagaatttcttgtcattggatagttcgtctgtataccattctggtcttcattccccagggcccccgttgtctgatttttctgcttctagaactgttagaggtcacaaaagcaagatggttgtatctatcacaatttttgtctgactttaactgggtatctgttacgatttagtagtcatcttactgacttcttgttggtttccaattgaatcctcacagtagactgttttcattgtaatcagtatcgaattatagcctgttcccttcttcataaatgaaggctttcttcttcaacagttcttagtgacttcacctgtactttatttctctgctttgaatatttcgaagaaaacatattcttgctctttcccaaggttaacactacatacattaccttgaccacaggatgttttcttgcagattgtgacctaattccatcacccttcagcagcccccaccgttttcatggattcagctaaaccttctgtaagatgactctttttccccctaatctttatatctcttttgatatgtagctttagtctcactttttttccttttggattttgccagttagatgtctccctggaattccacttcagcatggctaagactaagcttgtcttctctttcctccccaaagcaaattgtaattaggatagactgaaggtgacagaagataactaagatcttcttcatcctttcggctcttatggaagctgaattccagtagtcattctaaatttgttgtatgtcagcttatggtatcttttcatgtctttacattcagccaaagaggaagttccttgaaggggagaccagagggcgtgctgtgcttcttaatcctctctttcttaaccagtaagaggcattcagtagatatctgatgatactgattaatagaggggaacttttcagattcttttttttttttaaccctagtaagctttagtacaaactaaatgctgagagattatcaagtaagggattgatcatcacaagaagactcaggatgttacatcctgtaggttttatagtttcctatattgtaaaaaatatgagttatagcagcttgtctggatgtcatacaggtataaaaatcagttttataaacttgagtaaattggggcccattttagaaaaaactcttgcaggctgtgaatgccaatatataagtaaagtattaagtataatgttatttaatgtgggcaaacataaagccaggtgtaaattttttaggtttaaaatcttatagaactatacatccaaaagaaaatttcaagttaaacataatacaaagcaatacaatctaaattaacattaatttaatgtgatgaatgatattgccttgctaaaagtgggtcactacttacaatgtgcaaatggtactcatcgttagggtatagattcttttaaactatgacatacgtacactaccatgtggaacgtgatgatgtgttctctgttctaactactgggaagacttccttggcatagcacatgccatggggtcagttggctttgacttcatatagatatgccatttacttggtcagtgtcacttctatgacaagtagtatgttgtgccagtttgattataagtacaaatatgggcaatgaagtaacttggttttaaggttgttactaagctgagtaacagtgtgtggctatacaaatttttataggctatcaggaatgaaaacacaggagattgttgtagattcaagtattttagattcaagtttgaagatgctcatgcagatgtttaactgagttgtatagacctttatgtttctttctttttctctttttttttttttgagacagagtcttgctctgtcacccaagctggagtgcaatggtgtgatctcggcttactgcaacctccgcctcccaggttcaagcaattctcctgcctcagcctcccaagtagctgggattacagatgtgcaccacgacgcccagctgattttttgtattttagtagaggcggggtctcaccatgttgtcaagatggtctcaatctcctgaccttgtgatccacccacctctgcctcccaaagtgctgtgattacaggcgtgagccaccgcgcctgactgacctttatgtttcttaactttatgctatacatcagttgatatttcaaaaatttaaatggtttctatgattattctttgggctaagaaattgggcattaattgtcctcatatgtatggtttttgtggctacttcatgtagattttatttttggtggttatcaaattggaatttttttttttttttttttttttgagacggagtctcattctgtttcccaggttggagtacagtggtgcaatctcagctcactgcagcctcgacctcccaggctcaagcagtcctctcacctcagccttctaagtagctgggactacaggcacgcaccaccacacctggctagttttttgtgtttttagtagagatggggttttaccctgttggccaggctggtcttgaactcctggcctcaagtgatccacctgcctcagcctcccaaagtgctgggattagaggcatgagccaccacacctggctgaaattggaatttcattggtactgcctgtaattttatgttaatttttttttttttttgtcgtcactagcttttatctaaagcccctagagagaaaggccatgataccttgtatacaaggttataagagtatacaagggaaagggagggctgaagggaacagggtgggctggtacaagcctcattagaaataccattgagtctgtgagtaaaacatcattatatgaaaaggagatgtggttttagggtggtccaattacttttgcaccagcctaataaaattacaagtcattatcaatagagacattgtaaaacctttttttttcccaaaagaagtatcaggtatgataattacatgtctgcccaactttcgttatagattaacataacttaattgtatttaaggtacaatttaggagagttgctgaaaaatgaatctttagtattgggatgccttgattctaccctcaatagctataatggattatgtgtctgagtagattaataaaaatcttttgagcatttttcttgaactacttcactgaagattagctttttgagcatccattttaatttctcagtatataaggatcggtttatcacaactgtattgttttccctggccttgttagattatattttcatatcatgtagaaaaataggtgtattcgttctcccttgaagtcctttgtctcccaaaggaaatggttgcaatacagatgtgtcacctcttccacaggtaaagtggaatggagaagtagccagttaaatagtgcatgctcaatttggaacatttagagcatacaggaaagttatttatttggtaaatattttttaagcatttactatgtttcatgcattgtactagttgtagaggatataattgaatacaactacatgtagcccttgactttatggaactagtctagtataaagatttaagattgcctggcatggtggctcacgccactaatcccagcactttgagaggccaaggcaggattgcttgaggccagaagtttaagagtagcttggtcaacataatgagactccatctctaaaataaatagatagatagatagatagatagatagatagatagatagatagaagtagttagacaacacaaagcagtttcactcatcttgtggcaaggagttatgtatttctaatcaaatttggcaactcaagcattttcaacaaaatctacatgttttttcagaataaagtgaccaacacagaatgttacctgtaaaaatcagagcaataattgctatctaaaataattttgaaaattaagtggtactgaaaggctcatatagcaaaaatatggcctcctgtcattgtactttcctacttcccagactcaccattttcaacattttttagtagtttattttgccattttatagcatagtacctgacattttatttattcaacagacatttcttaagtacctaatacatgccattccttgtttgaagggatgctaaggatacagtggtgaacaaggcgttgtggggttgtatagagggtattcattcctaaccttgaaccaaatatttctttctgttggataatgcattaaaaattgcaaacagtttacaaacttttggagcaatggtggccttgatcataaagtagggactgcttctaccgtatacatgcttggtggtgtatttgtgatatctggctaaagtttctacatggaaattgactgactttagttttgagacttctgggaaccagtcaggcaaaatagtgaaactgtgtatcctgtttccaagagttgtcttttaaggttatctgcttcattcatttggcctgacttgctaggcaaatgcctagggtaaatatgatttgattaactataacaacaacagcaacaacaacaactttattttttagagcagtttgaggttcacagcaaaattgagcagaatgtacagagattttccctatacccgcttcccctacgcatgtgcggcctcccctactatcaacatcccccaccagagtggtttgttacaattaatgaacctacattgacacatcattatcactcaaggtccgtagtttacattagagtccactcttggtgttgtgtatgggtttggtcgattttataatgacatttatccaccattatagtgtcatacatagtaattttgctaccctaaaaatccagtgtgctccacctgttcctccttccctcctccctcatccctggcaaccactgaactttttaacatctccatagttttgccttttccagaatgtcatatcattggaatcacacagtatgcagccttttcaaatgggcttctttccgttagtaataggcatttaagtttcatcctcatcttttcatggcttgatagctcatttctttccctccctcttttcttccctgtcttccttccttcctcttctttcctgtttcctctttcttcttccttttttaagagacaaggtgtctcactctgttgcccaggctggagtgcagtggcccaatcatagctcattgcagccttgaattcctgggctcaagtgatcctcctgcgttagcctcctgagtagctgggatcacaggctccagtcattttagtgctgaataatatttcattatctggatgtaccgcctattcattcacctactgaagaatatcttggttgcttctaagttttggcaattatgagtgaagttactataaacattgtatacaagttttatgtggatgtatgttgtcatctcccttgggcagataccaaggagtgccattgttggatcatatggtaaatatatctttagttttgtacagaattctaggttggtatttttttctctctcagtcctttattttatttggagacagtctcgctatgtcgcccaggctgccatacagtggtgccatctgggctcactgaaacctccacctcccaggttcaagcgattcttgtgccttggcctcccaagtagctgggattacaggagtgcgccaccacgcctgctaatttttgtatttttagtagagacagggttttgccatgttgcccaggctggtctcaaactcctgaccttaagtgattcacccacctcaatctcccaaaatcctgggattacaggcctgagctactgtgcctgatctctctcagtactttaaagaaatatttcattccacttttcttttttttcttctttttgagatggagtctcactctgtcgcctgggctggagtgcagtggcgcgatctcagctcactgccacctccgcctcctgggttcaagtgattctcctgcctcagcctcctgaatagctgagattacaggcgcccaccaccatgcccagctaattttttgcatttttagtagagacgggggttccaccatgttggccaggctggtctcgaactcctgacctcgtgattcgcacatctcggcctcccaaattgctgggattacaggtgtgagctaccacgcctggcccactcttcttgcttacatagtttctgaggagatgtcagatgtaatttttatttttgctcttctgtaggcaagttgagttttttccccctctagcttctctcaggatttttttctttatctttgattttcagtagtttgaaaattatatgcctagctgtcagggttttttgcttgtttgtttttgttttctcaggtgtgactccagaaaggttctaaagaggagctttacaatctcttctctggggtttatggagacttcctttacccttctgtgttagccccttaaagcactgcgtcaaccttaaaagggcacaggaaagggtgtctatgccatttttatgccatttatcctgcttggtgttttctgagctttcttcatctgcggtttaatgtctcacattaatttgtagaaattctctgtcattgtttcaaatttttcttcagttcttttctctgtttcttcttctggtgttcccattatgcttttgtggttgtcgtacagttattggatattttgttccaggcttttttttttccagtctttttttccttttgcttctcggttttgtaggtgtctgttgagatactctcaagtgcagatattctttcctcagctttgtctagtttactaataagcccattaaaggcagtcttcatttctgttacagtctttttgatcagtagcatttcttttttattctttcttaaaatttctgtctttctgcttacattgcccatctgttcttgcatggtttctactttgtccattagagttcttaggatatttatcataattatttcaaatttctggtgtaacaattccaacatccctgcaacatccaagtctagtttcgatgcttactgtgtctcttccagctgtgttttttcctatttaatatgtcttataattttttcttgatagccatacatgatgcattaggtaacagaaactgctgtgagtggacctttagtaatgtggtggtaaggtgtgcatggaggggaaacattttcagtctgttagtgaacttttgtcaacttcacatgtgcttctcaagtccatcctgtaagtgggagagtagggctagagaggactgaagttgggtatatattaaatactttctcctacaaagaagcctagaggggacgcattaggggattttttttcccccagtattcactgtgatgacccttattgagctcctggaggtaaaactcacaaaactgtggttctcccccctgcccatattactacatgtccctggagtttatatctttcagacttgtctgcactgagcttccaccaatttgtcaaatacagatcaggtttccctaccacccgtgcagttgaaaacccacatacaacttttgactcctccagagcttaactactcatagcctgctattgactggaagccttgccaataacataaacagttgattaatacatattttatatgttttctgtattatatattgtattcttacaataaagagaaaagaagatgttattaagaaaatcataaggaagataaaatatatttactgttcattaagtggttcccatgggtgctggttcccatggaggttgccccttgtgagtttttgctcagggaagttgtgattctctatatttgcctgttggtctcctaatttgggagtcatcagttttccctgtgacctcacttctcttacagagttaagaacagttgttggtttttcagtttgttcagtgttttacatgttgttagaacacagtggtacttctaagtttcttaacatgctagatcagaaacctgaagtctcacctaatttggctttttatattttttcttcttttttttcttccattgctaccaaagcatttttcatctgtgtctggggtgacattagagcagaatgtgatttctaggtaaacattattgggctccctagcagaaaaatttttgaaagtagtacatgaattctgtataattaaaattttcttttcatcttaataggtataggtaataggcacggcctattttttttttgctcaacagtctaaaatagtaatttaatcacctaatagccttagttatatagttgaaagaagagttggaaatctgattcatgggttggaaatcacctgtcacatatgagttttaggcactggtcactttattttgaaacagctttggggttttttcctttttcaactcataataggctttaacagcttttagttttgtttctgtttttttaacagcatgagttgccaaatttggttatagcttcttggtacaagatgggtaaatttgctttgtgttgtgtaattactttttattttaaatgctacctcttttatgaacactaactttacactaagattaggaaaatgagaattgcatgtctgcaacaaatagctatctgtagtattaaattgtgaaaatgtagactttggattggagctggcatctcttaatatgtaattgtaacatagagtaaataagtattttgtcccttgtagggtcaaacagtacagtgcatgggcagaattagagatgtaggcttttttttttttttttttttttactggcttagagaaccgtttgatcagctaatatggaattaagtccctagggctgcccaggcacaacattaactgctattaaaggaaaatttaaaagagtattagtgaaggttaaatactgaccatggacatctggcaaaattgatgttttttttcccctccaccattgtttatagtttattgttatttatcagagaattaatgtttattttcagaatctattaccataagaaatctgtttgaggacttcgtatgtgccaggaattctactaaataatgatataatgctgaacagaattagataggatcctcacttcgttaagcttacagtctagtggtatagatcaacattaatcaaagaataacacaaatagaaagcagagcagtggttcatgggattgactgtagagaagcatgagggaagttcccaggtgatggaaaatactttatttcttaatcgtggtggttacatgtgtgcatatgtttatgaaaatatattgtacatttaaagtggatacattttatcacatgtaaattatgactctataaagttaattaaaaagaataactcaggtaaggtggtgtgtgcgcctgtagtcccagctatttctgaggcaggaagatcacttgagcccaggagtttgagttcagcatgggcaacatgagacctgtgagactttgtctctaaaaaaatttaaataaataactaagataaatgtaaaattacagctgtagtaagttctacaaaggagagttacatgggctatgacgatgtaagatagcaagaactgacattggcagggaggaaatgatgatgagtagaagtaaataagtgaagtgtggggattgatgtcaaggggacagtataaaagaaataacagcatgcgccaaggccctaaaattggaaagtccttggcaaattaaaggagtttgaaaaaggccattgtgtgcaaagcagaaaataggtactacaaggtaaaagatggagctaagcggtaggtaaggctaaaccttgtcagccattgttaaatattgaattgtatcctaagcacaactcagtggaaagcagttaaagttctttaattgggggaggcaatgaaggggtaataaaattggttatagaaatactgctctggctctagtgttgagaatgaattggagtagccagagtagattcaagaagactttagtaagattattccaacaggccaggacctgttatagggtggtggcaatggagagagatggacagaatggagagtgtatttaggaggtaaaaatgacagaacttggtgatgcactgaatgtgaaatggggaaggtgtctaggaggactactaggtttatggtttgcgtattagggtggatgatagcagtttcatttactgagacagggagccctggcagagtacccagcttttagagtgggtagggggaaggggagagtgcatctggtgttgggcattttgaagtgatttacatacaacaaactgaaggtatctttaacactgagtccagcaggttagcatatttattcagcaagcattgcacctttttttgttgtttttggggtcttcaactcctggcctcgaatcctccctccttcccccgcctctcccagcctccgcctcccaaagtgctgggatttcaggagtgagccaccgcgcctggccagcatcgcgctgtttgtgcagtgtgccctgtgctaggtcttgcagtgggtaccagtagagacataaaagtacaaaagataattggacgtttagtagagtcctgaaagggggcgggataggaagatacctaaccataagaaaaaccagcaagagcggaaaaggagctagtcctccagatcaataagttaatcacttatgtttgtgattccctgcattttgggtgattctctgtcgaggtcctcttaagtccagacttttgatataatctgcagtttgcgccatttggattcctgaagcatctttacaagccacctacattccttatggagctgtggcacaacagcaagcccacgatgtctcaccggattaataaaaatataggcgctcacgcttttgtttaccgatatagtatctcctcctcccctcactccatcaacccccacgcgacacaactttccggaagtaagcaaaatccgttatcaaggtgaaactccggggaccaggctccacagctgccataaactggatggcacgttagaagccggtgggtgtaggtgaggcacgctggcgcccgcgggcccttctccagccgctacccagtgggaatccgcggggctgaagccccgaaaccaggctgagcgtcccagagcgcaacctccctttcccccagcagcgccggcgccgcagaagccgcgtgtccccaggcgcactcccccaaggtgaacccccgccccccacggaggcggctgggtcgcgggtctgggcggggcgctccggacgccctcccgccgctgcgcacccctcccgcgagctgccagctccctcggcctctccacccaaaactggcccaaccgccaatcgtctgcctctcacctcctacagcaggtgacccatggccaatcgccaggggtctctttgccaggagccgccagggccagccaatcggggcgacccctccgccggggaggggacgggaaaggggtggggggtgaagggggtgaagggggtgtcccgggggacgggctgaacctcagtcaggaccgcctgcaccgcagtccggggatcgggtcgaggggagaagaaaaaggggtgctcgggagcagcccccggctacctcccctggaggcacagagggcgggggccttggcgaatggctttcttgctggccacttgcggaggtttggattcaggatttgttcctagtgtccaagattttgataagaaacttacagaagctgatgcttacctacaaatcttgattgaacaattaaagctttttgatgacaagcttcaaaactgcaaagaagatgaacagagaaagaaaattgaaactctcaaagagacaacaaatagcatggtagaatcaattaaacactgcattgtgttgctgcagattgccaaaagtactattaatcccgtagatgcaatatatcaacctagtcctttggaacctgtgatcagcacaatgccttcccagactgtgttacctccagaacctgttcagttgtgtaagtcagagcagcgtccatcttccctaccagttggacctgtgttggctaccttgggacatcatcagactcctacaccaaatagtacaggcagtggccattcaccaccgagtagcagtctcacttctccaagccacgtgaacttgtctccaaatacagtcccagagttctcttactccagcagtgaagatgaattttatgatgctgatgaattccatcaaagtggctcatccccaaagcgcttaatagattcttctggatctgcctcagtcctgacacacagcagctcgggaaatagtctaaaacgcccagataccacagaatcacttaattcttccttgtccaatggaacaagtgatgctgacctgtttgattcacatgatgacagagatgatgatgcggaggcagggtctgtggaggagcacaagagcgttatcatgcatctcttgtcgcaggttagacttggaatggatcttactaaggtagttcttccaacgtttattcttgaaagaagatctcttttagaaatgtatgcagacttttttgcacatccggacctgtttgtgagcattagtgaccagaaggatcccaaggatcgaatggttcaggttgtgaaatggtacctctcagcctttcatgcgggaaggaaaggatcagttgccaaaaagccatacaatcccattttgggcgagatttttcagtgtcattggacattaccaaatgatactgaagagaacacagaactagtttcagaaggaccagttccctgggtttccaaaaacagtgtaacatttggtccagatatgagcattgaattgtatcttcttgttaaaacactcagcataaaaggctgaaatgggtggatgatgggaaacctgctcagccacaaatgttagtcgagc

SEQ ID NO: 735168 - DNA, 16691 bp, Homo sapiens
gtaagggtctttacatggtttccagatagttcattagttgttgctttctttttttgtctgttttctgttttttttttttaaataactgtggtatgatgtaataggaacttataatttctgagttgcttatttttcctttacagttatagtaaagttatactcatttattttctcctgctttctgcagagtaaaatactgatttttgtctagaaacaagacagtgcaagacaatgttgaaagtgaaattctatgttaaaatatgccagatttattttaagaatttaatatctgtagtcagttatcaatacaaccaaattacataattatgcatgataataggtaaatactgagaagttcacctcattttcttgttaaaggatttggctattaccgtatgtgtcagttagtactcttttgtatggtagtgaaagaaaactcaacccaaactgattcatgaagaagaaagtaaatctggttagatgtggtttgaattaggtaattcatgtcatgaggactcagatctcccatctctatttctacgttccacttttgcattggcttcattttcggttaggttctcccttggtggtggtaaggtggttgtagcaatgtcagcctcccatttttggaaccgagtccataggaggctattctttctagaccttaataggagtaacacaattattgctcatcaccctagctttggccatgtgtcaaatcctgaccagtcacaatttcacagtcatagattctaccctggagctgggatgttactggcctcactagaaacacattgctgatagggtagaaggtgtgttcatcctacccaacccgacccgcaccaaagtcagaatagggaaaaacagatgttgggtgacatgcaactaacgtctgccgtactacactgaagatatttttctatgtttattctccagtgaaagagcttatatttgtggtacataggggattttgttttaatttagaaaatttaattgtagaaaacatgttttataaccctttctctgtactttgttctatatcaggaattgacttgattagataaggtgacatagggtatcttaggccctacaagatagtaaaccccccatcacttgaaagtattcagtagaggcttaaaaaacattattaaaggatgtggttattaggggactttaagaaatgaatatgaaattgaagtaggaaatctttaagctactctgtgagttatgccttttaaaagcaatttgtaattcctgtagatttcttttaaatttaggcagtttcataaatgactatagcatcattttagcaaatttgtgatcctgtaagaggaggataagtgttttttgtttgtttgtttgttttttgtttttttgagacagagtctcactttgtaccccagaaagtaaatctagttagatgtggtttgtctcggctcactgcaacctccaccccgtgcgttctagcaattctcctgcctcagccaccacacctggcctaagaggggaggataagtgttttagtgatcatattagactgaatgtggcagatgagatttcccgcccccccattgttggttagactgacattcaacattcaacaagagccacctgcccttgtaggcatttctgccactatacccctacataaacctagagtgctattgcttacttgctttccttcaaatacattttttcatttgtggcctccacattcttgtgtgtgatgtcctttctctgtgaaatgtcttctaccctttttttcaaagcctagtttagaactgacctcttctatgaaccctctgccgactggcctttccttccccagtcccccaagttcaaaatgatctctttcctttgaatactatagtatttgcacaattcactatctccttatcatattcttcttgtttatttgttatcagctgatgttgacatcataagttcaggttcctaactagatccaatattggaatttttcagcttttgctaagaagagagcttgtatgtctttgggaataatgggcagaaaaagataactttgagaagtcttagacttctaatagctttgatatttaaaagtacatgtaatacaagaggtttttttcctacatttaatgcatggagaagataggacatttagaaatatggaattaatgttcatttgactggcaaaagattattttctcagatgtagtgaagtgtggtaaagaacttcactctagagccagaatgtctgtgtttgtatcccagagcccaccacttacatttaaccattaacattcaacttactgtctctgagtttcagtggcctcatctataaaatgaggataataagagtacctacttcatagagttgttttagtggttaaataaactaacgtaaacttgctagaacttgataaactaatattggatgagaactggttgaaataatgcctggctatagtaaaaacttggtaaatgttagttgccattacaatgcaactactgttcctaccattccctctgccagtgcctggtattcagtagcactcagtaaatgttagttaaatgaagaaataactgaaggaatgaatgaacaaatggttgatgtagagattgcttttccattgttgtttattgaatattttgagatgtataacatactgtctgttaggcactgtgggatgggcactcacggagctgtcttccaaaggggtataggagaggagacgcagtgatctcagcaacctacctttaaaacatatcctagtatctactgccatgttaggttctcttcttttgctttttttaaaaaaaaattctcacaaaactccccccacccacttcagtttatagatgaggaagctcctactacataatagtgcttcccagtctaattcttgacctcattgtatttatatgtcctttttttttttgacagagtctcactcattgcagtggcacaatcacagctcactgcaacctctgcctcccctgctcaagtgatcctcccacctcaacctcctgagtagctgggactacaggcatgcaccaccacgcctggctaatttttgtatttttttgtagagatgcggttttgccatgttggccaggctggtctcgaactcctgggctcaagccatctgcccactttggcctctgagagtgctgagattataggcatgagccaccattcccagccatgttttcctttttcattgaactttatctactttagccattaaactccactccattggtcttgtcattactaagagctgaaccacctgcaaaatattaagttaaaaagcgttttctttgacaacagttttcttttcttcatcttcctctatcactttacttctgaacttttattctctcattttgatctgacccctacttctctgtttttcctggccatttagtactttcttgttttgctcatcccatttcccagtggagaccttctggtctgctgctttatcactggttttgttagaagacatacaaatggcaaggaggtatatgaaaaggtgcctaacatcattgatcatcagagaaatgcagaccaaaactacaatgagatatcatttcaccccagttaaaatggctttttttttttttttccaaaagacaggcaataacaaagtactggtgaggatgtggagtaaagggaacccacatacactattagtaggaatgtaaattagtacagccactgtggagaacagtttgaaggttcctcaaaaaactaaaaatagagctaccatataatccagcaatcccactgctaggtatatatccaaaagaaaggcaatcaatatacggaagagatacctgcacacccaggtttattgcagcactattcacaatagccaagatttggaagcaacccaggtgtccaacagatgaatggataaagaaaacatggtatataaacacaatggaatactattcagctgtgaaaaagaatgaaatcctgtcatttgcaatcctgtcttgaatagaactggaggtcatgatgttaagtgaaataagacaggcacaaacttcacatgttctcacttatttgtgggagctaaaaattaaaacaatcgaactcatggagctagagaatagaattatggttaccagaggctggaagggtggttgggcgtataagtgtagggggagtggggatggttaatgggtacaaaaaaatgagaacgaataagatctacttgataacacaacagggtgactatagtcaacagtaattatacatttaaaaataactagaagagtataattagattgtaacacaaaagataaatgcttgaggtgatggatacctatttaccctgatgtgattattacttatttcatgcctatatcaaaatatttatactccaaaaatatatatacctactatgtacccacaaaaatttaaaaatttatatattgtttttgctatcacctttagaatttcttgtcattggatagttcgtctgtataccattctggtcttcattccccagggcccccgttgtctgatttttctgcttctagaactgttagaggtcacaaaagcaagatggttgtatctatcacaatttttgtctgactttaactgggtatctgttacgatttagtagtcatcttactgacttcttgttggtttccaattgaatcctcacagtagactgttttcattgtaatcagtatcgaattatagcctgttcccttcttcataaatgaaggctttcttcttcaacagttcttagtgacttcacctgtactttatttctctgctttgaatatttcgaagaaaacatattcttgctctttcccaaggttaacactacatacattaccttgaccacaggatgttttcttgcagattgtgacctaattccatcacccttcagcagcccccaccgttttcatggattcagctaaaccttctgtaagatgactctttttccccctaatctttatatctcttttgatatgtagctttagtctcactttttttccttttggattttgccagttagatgtctccctggaattccacttcagcatggctaagactaagcttgtcttctctttcctccccaaagcaaattgtaattaggatagactgaaggtgacagaagataactaagatcttcttcatcctttcggctcttatggaagctgaattccagtagtcattctaaatttgttgtatgtcagcttatggtatcttttcatgtctttacattcagccaaagaggaagttccttgaaggggagaccagagggcgtgctgtgcttcttaatcctctctttcttaaccagtaagaggcattcagtagatatctgatgatactgattaatagaggggaacttttcagattcttttttttttttaaccctagtaagctttagtacaaactaaatgctgagagattatcaagtaagggattgatcatcacaagaagactcaggatgttacatcctgtaggttttatagtttcctatattgtaaaaaatatgagttatagcagcttgtctggatgtcatacaggtataaaaatcagttttataaacttgagtaaattggggcccattttagaaaaaactcttgcaggctgtgaatgccaatatataagtaaagtattaagtataatgttatttaatgtgggcaaacataaagccaggtgtaaattttttaggtttaaaatcttatagaactatacatccaaaagaaaatttcaagttaaacataatacaaagcaatacaatctaaattaacattaatttaatgtgatgaatgatattgccttgctaaaagtgggtcactacttacaatgtgcaaatggtactcatcgttagggtatagattcttttaaactatgacatacgtacactaccatgtggaacgtgatgatgtgttctctgttctaactactgggaagacttccttggcatagcacatgccatggggtcagttggctttgacttcatatagatatgccatttacttggtcagtgtcacttctatgacaagtagtatgttgtgccagtttgattataagtacaaatatgggcaatgaagtaacttggttttaaggttgttactaagctgagtaacagtgtgtggctatacaaatttttataggctatcaggaatgaaaacacaggagattgttgtagattcaagtattttagattcaagtttgaagatgctcatgcagatgtttaactgagttgtatagacctttatgtttctttctttttctctttttttttttttgagacagagtcttgctctgtcacccaagctggagtgcaatggtgtgatctcggcttactgcaacctccgcctcccaggttcaagcaattctcctgcctcagcctcccaagtagctgggattacagatgtgcaccacgacgcccagctgattttttgtattttagtagaggcggggtctcaccatgttgtcaagatggtctcaatctcctgaccttgtgatccacccacctctgcctcccaaagtgctgtgattacaggcgtgagccaccgcgcctgactgacctttatgtttcttaactttatgctatacatcagttgatatttcaaaaatttaaatggtttctatgattattctttgggctaagaaattgggcattaattgtcctcatatgtatggtttttgtggctacttcatgtagattttatttttggtggttatcaaattggaatttttttttttttttttttttttgagacggagtctcattctgtttcccaggttggagtacagtggtgcaatctcagctcactgcagcctcgacctcccaggctcaagcagtcctctcacctcagccttctaagtagctgggactacaggcacgcaccaccacacctggctagttttttgtgtttttagtagagatggggttttaccctgttggccaggctggtcttgaactcctggcctcaagtgatccacctgcctcagcctcccaaagtgctgggattagaggcatgagccaccacacctggctgaaattggaatttcattggtactgcctgtaattttatgttaatttttttttttttttgtcgtcactagcttttatctaaagcccctagagagaaaggccatgataccttgtatacaaggttataagagtatacaagggaaagggagggctgaagggaacagggtgggctggtacaagcctcattagaaataccattgagtctgtgagtaaaacatcattatatgaaaaggagatgtggttttagggtggtccaattacttttgcaccagcctaataaaattacaagtcattatcaatagagacattgtaaaacctttttttttcccaaaagaagtatcaggtatgataattacatgtctgcccaactttcgttatagattaacataacttaattgtatttaaggtacaatttaggagagttgctgaaaaatgaatctttagtattgggatgccttgattctaccctcaatagctataatggattatgtgtctgagtagattaataaaaatcttttgagcatttttcttgaactacttcactgaagattagctttttgagcatccattttaatttctcagtatataaggatcggtttatcacaactgtattgttttccctggccttgttagattatattttcatatcatgtagaaaaataggtgtattcgttctcccttgaagtcctttgtctcccaaaggaaatggttgcaatacagatgtgtcacctcttccacaggtaaagtggaatggagaagtagccagttaaatagtgcatgctcaatttggaacatttagagcatacaggaaagttatttatttggtaaatattttttaagcatttactatgtttcatgcattgtactagttgtagaggatataattgaatacaactacatgtagcccttgactttatggaactagtctagtataaagatttaagattgcctggcatggtggctcacgccactaatcccagcactttgagaggccaaggcaggattgcttgaggccagaagtttaagagtagcttggtcaacataatgagactccatctctaaaataaatagatagatagatagatagatagatagatagatagatagatagaagtagttagacaacacaaagcagtttcactcatcttgtggcaaggagttatgtatttctaatcaaatttggcaactcaagcattttcaacaaaatctacatgttttttcagaataaagtgaccaacacagaatgttacctgtaaaaatcagagcaataattgctatctaaaataattttgaaaattaagtggtactgaaaggctcatatagcaaaaatatggcctcctgtcattgtactttcctacttcccagactcaccattttcaacattttttagtagtttattttgccattttatagcatagtacctgacattttatttattcaacagacatttcttaagtacctaatacatgccattccttgtttgaagggatgctaaggatacagtggtgaacaaggcgttgtggggttgtatagagggtattcattcctaaccttgaaccaaatatttctttctgttggataatgcattaaaaattgcaaacagtttacaaacttttggagcaatggtggccttgatcataaagtagggactgcttctaccgtatacatgcttggtggtgtatttgtgatatctggctaaagtttctacatggaaattgactgactttagttttgagacttctgggaaccagtcaggcaaaatagtgaaactgtgtatcctgtttccaagagttgtcttttaaggttatctgcttcattcatttggcctgacttgctaggcaaatgcctagggtaaatatgatttgattaactataacaacaacagcaacaacaacaactttattttttagagcagtttgaggttcacagcaaaattgagcagaatgtacagagattttccctatacccgcttcccctacgcatgtgcggcctcccctactatcaacatcccccaccagagtggtttgttacaattaatgaacctacattgacacatcattatcactcaaggtccgtagtttacattagagtccactcttggtgttgtgtatgggtttggtcgattttataatgacatttatccaccattatagtgtcatacatagtaattttgctaccctaaaaatccagtgtgctccacctgttcctccttccctcctccctcatccctggcaaccactgaactttttaacatctccatagttttgccttttccagaatgtcatatcattggaatcacacagtatgcagccttttcaaatgggcttctttccgttagtaataggcatttaagtttcatcctcatcttttcatggcttgatagctcatttctttccctccctcttttcttccctgtcttccttccttcctcttctttcctgtttcctctttcttcttccttttttaagagacaaggtgtctcactctgttgcccaggctggagtgcagtggcccaatcatagctcattgcagccttgaattcctgggctcaagtgatcctcctgcgttagcctcctgagtagctgggatcacaggctccagtcattttagtgctgaataatatttcattatctggatgtaccgcctattcattcacctactgaagaatatcttggttgcttctaagttttggcaattatgagtgaagttactataaacattgtatacaagttttatgtggatgtatgttgtcatctcccttgggcagataccaaggagtgccattgttggatcatatggtaaatatatctttagttttgtacagaattctaggttggtatttttttctctctcagtcctttattttatttggagacagtctcgctatgtcgcccaggctgccatacagtggtgccatctgggctcactgaaacctccacctcccaggttcaagcgattcttgtgccttggcctcccaagtagctgggattacaggagtgcgccaccacgcctgctaatttttgtatttttagtagagacagggttttgccatgttgcccaggctggtctcaaactcctgaccttaagtgattcacccacctcaatctcccaaaatcctgggattacaggcctgagctactgtgcctgatctctctcagtactttaaagaaatatttcattccacttttcttttttttcttctttttgagatggagtctcactctgtcgcctgggctggagtgcagtggcgcgatctcagctcactgccacctccgcctcctgggttcaagtgattctcctgcctcagcctcctgaatagctgagattacaggcgcccaccaccatgcccagctaattttttgcatttttagtagagacgggggttccaccatgttggccaggctggtctcgaactcctgacctcgtgattcgcacatctcggcctcccaaattgctgggattacaggtgtgagctaccacgcctggcccactcttcttgcttacatagtttctgaggagatgtcagatgtaatttttatttttgctcttctgtaggcaagttgagttttttccccctctagcttctctcaggatttttttctttatctttgattttcagtagtttgaaaattatatgcctagctgtcagggttttttgcttgtttgtttttgttttctcaggtgtgactccagaaaggttctaaagaggagctttacaatctcttctctggggtttatggagacttcctttacccttctgtgttagccccttaaagcactgcgtcaaccttaaaagggcacaggaaagggtgtctatgccatttttatgccatttatcctgcttggtgttttctgagctttcttcatctgcggtttaatgtctcacattaatttgtagaaattctctgtcattgtttcaaatttttcttcagttcttttctctgtttcttcttctggtgttcccattatgcttttgtggttgtcgtacagttattggatattttgttccaggcttttttttttccagtctttttttccttttgcttctcggttttgtaggtgtctgttgagatactctcaagtgcagatattctttcctcagctttgtctagtttactaataagcccattaaaggcagtcttcatttctgttacagtctttttgatcagtagcatttcttttttattctttcttaaaatttctgtctttctgcttacattgcccatctgttcttgcatggtttctactttgtccattagagttcttaggatatttatcataattatttcaaatttctggtgtaacaattccaacatccctgcaacatccaagtctagtttcgatgcttactgtgtctcttccagctgtgttttttcctatttaatatgtcttataattttttcttgatagccatacatgatgcattaggtaacagaaactgctgtgagtggacctttagtaatgtggtggtaaggtgtgcatggaggggaaacattttcagtctgttagtgaacttttgtcaacttcacatgtgcttctcaagtccatcctgtaagtgggagagtagggctagagaggactgaagttgggtatatattaaatactttctcctacaaagaagcctagaggggacgcattaggggattttttttcccccagtattcactgtgatgacccttattgagctcctggaggtaaaactcacaaaactgtggttctcccccctgcccatattactacatgtccctggagtttatatctttcagacttgtctgcactgagcttccaccaatttgtcaaatacagatcaggtttccctaccacccgtgcagttgaaaacccacatacaacttttgactcctccagagcttaactactcatagcctgctattgactggaagccttgccaataacataaacagttgattaatacatattttatatgttttctgtattatatattgtattcttacaataaagagaaaagaagatgttattaagaaaatcataaggaagataaaatatatttactgttcattaagtggttcccatgggtgctggttcccatggaggttgccccttgtgagtttttgctcagggaagttgtgattctctatatttgcctgttggtctcctaatttgggagtcatcagttttccctgtgacctcacttctcttacagagttaagaacagttgttggtttttcagtttgttcagtgttttacatgttgttagaacacagtggtacttctaagtttcttaacatgctagatcagaaacctgaagtctcacctaatttggctttttatattttttcttcttttttttcttccattgctaccaaagcatttttcatctgtgtctggggtgacattagagcagaatgtgatttctaggtaaacattattgggctccctagcagaaaaatttttgaaagtagtacatgaattctgtataattaaaattttcttttcatcttaataggtataggtaataggcacggcctattttttttttgctcaacagtctaaaatagtaatttaatcacctaatagccttagttatatagttgaaagaagagttggaaatctgattcatgggttggaaatcacctgtcacatatgagttttaggcactggtcactttattttgaaacagctttggggttttttcctttttcaactcataataggctttaacagcttttagttttgtttctgtttttttaacagcatgagttgccaaatttggttatagcttcttggtacaagatgggtaaatttgctttgtgttgtgtaattactttttattttaaatgctacctcttttatgaacactaactttacactaagattaggaaaatgagaattgcatgtctgcaacaaatagctatctgtagtattaaattgtgaaaatgtagactttggattggagctggcatctcttaatatgtaattgtaacatagagtaaataagtattttgtcccttgtagggtcaaacagtacagtgcatgggcagaattagagatgtaggcttttttttttttttttttttttactggcttagagaaccgtttgatcagctaatatggaattaagtccctagggctgcccaggcacaacattaactgctattaaaggaaaatttaaaagagtattagtgaaggttaaatactgaccatggacatctggcaaaattgatgttttttttcccctccaccattgtttatagtttattgttatttatcagagaattaatgtttattttcagaatctattaccataagaaatctgtttgaggacttcgtatgtgccaggaattctactaaataatgatataatgctgaacagaattagataggatcctcacttcgttaagcttacagtctagtggtatagatcaacattaatcaaagaataacacaaatagaaagcagagcagtggttcatgggattgactgtagagaagcatgagggaagttcccaggtgatggaaaatactttatttcttaatcgtggtggttacatgtgtgcatatgtttatgaaaatatattgtacatttaaagtggatacattttatcacatgtaaattatgactctataaagttaattaaaaagaataactcaggtaaggtggtgtgtgcgcctgtagtcccagctatttctgaggcaggaagatcacttgagcccaggagtttgagttcagcatgggcaacatgagacctgtgagactttgtctctaaaaaaatttaaataaataactaagataaatgtaaaattacagctgtagtaagttctacaaaggagagttacatgggctatgacgatgtaagatagcaagaactgacattggcagggaggaaatgatgatgagtagaagtaaataagtgaagtgtggggattgatgtcaaggggacagtataaaagaaataacagcatgcgccaaggccctaaaattggaaagtccttggcaaattaaaggagtttgaaaaaggccattgtgtgcaaagcagaaaataggtactacaaggtaaaagatggagctaagcggtaggtaaggctaaaccttgtcagccattgttaaatattgaattgtatcctaagcacaactcagtggaaagcagttaaagttctttaattgggggaggcaatgaaggggtaataaaattggttatagaaatactgctctggctctagtgttgagaatgaattggagtagccagagtagattcaagaagactttagtaagattattccaacaggccaggacctgttatagggtggtggcaatggagagagatggacagaatggagagtgtatttaggaggtaaaaatgacagaacttggtgatgcactgaatgtgaaatggggaaggtgtctaggaggactactaggtttatggtttgcgtattagggtggatgatagcagtttcatttactgagacagggagccctggcagagtacccagcttttagagtgggtagggggaaggggagagtgcatctggtgttgggcattttgaagtgatttacatacaacaaactgaaggtatctttaacactgagtccagcaggttagcatatttattcagcaagcattgcacctttttttgttgtttttggggtcttcaactcctggcctcgaatcctccctccttcccccgcctctcccagcctccgcctcccaaagtgctgggatttcaggagtgagccaccgcgcctggccagcatcgcgctgtttgtgcagtgtgccctgtgctaggtcttgcagtgggtaccagtagagacataaaagtacaaaagataattggacgtttagtagagtcctgaaagggggcgggataggaagatacctaaccataagaaaaaccagcaagagcggaaaaggagctagtcctccagatcaataagttaatcacttatgtttgtgattccctgcattttgggtgattctctgtcgaggtcctcttaagtccagacttttgatataatctgcagtttgcgccatttggattcctgaagcatctttacaagccacctacattccttatggagctgtggcacaacagcaagcccacgatgtctcaccggattaataaaaatataggcgctcacgcttttgtttaccgatatagtatctcctcctcccctcactccatcaacccccacgcgacacaactttccggaagtaagcaaaatccgttatcaaggtgaaactccggggaccaggctccacagctgccataaactggatggcacgttagaagccggtgggtgtaggtgaggcacgctggcgcccgcgggcccttctccagccgctacccagtgggaatccgcggggctgaagccccgaaaccaggctgagcgtcccagagcgcaacctccctttcccccagcagcgccggcgccgcagaagccgcgtgtccccaggcgcactcccccaaggtgaacccccgccccccacggaggcggctgggtcgcgggtctgggcggggcgctccggacgccctcccgccgctgcgcacccctcccgcgagctgccagctccctcggcctctccacccaaaactggcccaaccgccaatcgtctgcctctcacctcctacagcaggtgacccatggccaatcgccaggggtctctttgccaggagccgccagggccagccaatcggggcgacccctccgccggggaggggacgggaaaggggtggggggtgaagggggtgaagggggtgtcccgggggacgggctgaacctcagtcaggaccgcctgcaccgcagtccggggatcgggtcgaggggagaagaaaaaggggtgctcgggagcagcccccggctacctcccctggaggcacagagggcgggggccttggcgaatggctttcttgctggccacttgcggaggtttggattcaggatttgttcctagtgtccaagattttgataagaaacttacagaagctgatgcttacctacaaatcttgattgaacaattaaagctttttgatgacaagcttcaaaactgcaaagaagatgaacagagaaagaaaattgaaactctcaaagagacaacaaatagcatggtagaatcaattaaacactgcattgtgttgctgcagattgccaaaagtactattaatcccgtagatgcaatatatcaacctagtcctttggaacctgtgatcagcacaatgccttcccagactgtgttacctccagaacctgttcagttgtgtaagtcagagcagcgtccatcttccctaccagttggacctgtgttggctaccttgggacatcatcagactcctacaccaaatagtacaggcagtggccattcaccaccgagtagcagtctcacttctccaagccacgtgaacttgtctccaaatacagtcccagagttctcttactccagcagtgaagatgaattttatgatgctgatgaattccatcaaagtggctcatccccaaagcgcttaatagattcttctggatctgcctcagtcctgacacacagcagctcgggaaatagtctaaaacgcccagataccacagaatcacttaattcttccttgtccaatggaacaagtgatgctgacctgtttgattcacatgatgacagagatgatgatgcggaggcagggtctgcttcagtttcgtcgacgcggccgc

SEQ ID NO: 735169 - DNA, 4693 bp, Homo sapiens
attacaagcgtaaaccaccgcgcccgacctcctccccttatttcatccattttataattcacattattgatcgctgataattgcacctattgtaatgatactgataattgcacctgttgtaataatattgatattgataattgcacctattgtattacaatattattattgatatcgataatttcacctactgtaatgatcaataaaggcaggcagaaagaaaacaaaagtaactgaaactaccaggcagcgtccctgcgaacagcaaagagggaagaaacgccttgaggcgtagtaacgccaccaataaggagtcgacgcgacgggtccgcccacaggcaaggaaggccgaccccgcgagtgcaggcgcgagcgctagcccgtgacgtctgagggggttggggggatgctgtgtgggtttcaagaagacgccacgcctccgccgccgccacgcccccgccgcctccaccgccggctgccgcgcccggaggaggtcgggatgttatcacttccgccggggcttctcactgtgtccgggtcagctgctgccgccgacgccgtaccgctgcggccgggggattgggccggggtctccaccgccgaccgaggggagcgggctccgctcggccctgctttttgcgacctggccgtcagccccacgtcgccggcctggaggggcgaagaggacgagggggccaaggcttcctccggggacattggctccctggattatcaagagtttgtagttgacattgaatccaggctgaggatggaaggtgtggaacttaaagaagaatggcaagatgaagattttccgatacctttaccagaagatgatagtattgaagcagatatactagctataactggaccagaggaccagcctggctcactagaagttaatggaaataaagtgagaaagaaactaatggctccagacattagcctgacactggatcctagtgatggctctgtattgtcagatgatttggatgaaagtggggagattgacttagatggcttagacacaccgtcagagaatagtaatgagtttgagtgggaagatgatcttccaaaacccaagactactgaagtaattaggaaaggctcaattactgaatacacagcagcagaggaaaaagaagatggacgacgctggcgtatgttcaggattggagaacaggaccacagggttgatatgaaggcaattgaaccctataaaaaagttatcagccatgggggatattatggggatggattaaatgccattgttgtgtttgctgtctgtttcatgcctgaaagtagtcagcctaactatagatacctgatggacaatctttttaaatatgttattggcactttggagctattagtagcagaaaactacatgatagtttatttaaatggtgcaacaactcgaagaaaaatgcccagtctgggatggctcaggaaatgttatcagcaaattgatagaaggttacggaaaaatctaaaatccctaatcattgtacatccttcttggtttatcagaacacttctggctgttacaagaccatttattagctcgaaattcagccaaaaaattagatacgtgtttaatttggcagaactagcagaacttgtccccatggaatacgttggcataccagaatgcataaaacagtatgaagaagaaaagtttaaaaagaaacaaaaaagagttgatcaagaacttaatggaaaacaagatgaaccgaaaaatgaacagtaagtttggcatctagtccaaacaagactgaagaatgtgctgatggagcagtgctgtttctgcattcataatgcatttattggcccatatttttatgtaacctgttacaaaatagacttgactttttcataatggacttttgtattatacaagggactgttcactgctgtactggtttgcaaatttcttgaatttagctctttaatagctaactgtattattatcgttttatattttatattgctaaatagagaaccacactttatataaagtagtttttgcatttgtttattgaatgatgcatcttcttcggtgaaatatttatatgcataaatggcaaaggaaagaaataatatatatttttatgtcattgagcaatattttttaatgtgtacctgtcttatggaagaaatatgcaggtatataagaccacgattttctaaagtgcatattagaatttttgtttttgtaaatggttaaatacatttcctgggtaacttaggaaattaagtttttcataaggcaacagatggttaaactgattgtcatgaatacccaaagatcatgtatataatcgaagtgtattagtaccatcccaaggtttttttctcatttaacatatttgtttcataattcagcaagtacagatgcaagcgcattgcacactttttcctttctaaacttaaagacaagtcaaaaagccattcttagaactagaggatttaagagggtaggaattagggtttgtatatatgtatatatgggacattttatcttctggcccaaagtcagaactttataaaaatcttgagtttgttcactaatgtgaaataagctatgtgtccagggtattgctcccctgagtgtatatgagtgctgagtagtattgcagagaatgtgatgagttattcactgtcacaactttttctatagaaaacaggggctgctttttaaactctcactatgggcactttaccaaaatacttccatatcaattatttgaactcggtagttgtttgacctagttagatgtggtgtttattcaagtttgtatgaaatcatgtttgacaatactgtaaattaggttaattttgtaagtcttagcatcatcatattgtgctgttttggataacacgtttgttacaagcatttaaactgtttcatttggtagtacctttacattgaaataaattgtgtttgtgcctccaaacaaaaagtttaattaccgacaaaattatttctaaaacaacagattgatctgatattgtgtcatatacttgaaaggctcatacacagctggtaagcataataccttccaaatttgaaggtcatggctactcttcaacccttcctgtaaggtattttacaaaacagtggcctagagtagcaaaattgaagtggatgtgagctaacctttcaagatttagtctatcctagattgaacacacatgtggctgtgaccattctcatgtacttacaaaccttctgttacaaaagggaactttcctatattttttgtcctcctcagtcctaaacttggcatgctaacttaaaaccagttataggagagagatgctggaggattcccaggatgaaacattcctcagcagcctcctgacttaactcagatccagcagctcttggcagatcctgaactaatgtcattacagtgaattgagccaaaacgattattgcttgctcacattttaggaacactttttgttgaagaagcaaactaacaataacaagttaggcattccttctgaatttaccatataaggattatgtataaacaattatattgaatttgtcattagattctatatttgtagacgatttaacgtagtctttcatctgtacatctttatcttgttcaaaatgggctgaggtttttaataggtggttttctaccacattaagtacttggttcttcattttaaaaaatatgaagaataacttcaactcttttttgcattattttgatttttgattttgcagtcattgctcctaactgtagatacatgttgcaaaagtgatgtttttctgaattttttttaaaagtagaagactattctgttaaacattaaaattcagagacaacagtgataacacctgggatataatgaaaatgaggtgctgtgaatcagtaaactaaagggatacctgctttaacctgcaccttaatggaatctggtatagagatgtacccacaataaatgttttataagatttaagatcataatagtaggttagaggaagagcatttattaagtctgttgtttctaatctatagctaagttaacatctcccatattattccattttaatttcccattactgaccaaggtgaaagtatatgtgactgtacttttatctttctgttgggatcatggatctaatttaactggcttaatttgatgcttctgtcactaggctctaagtgccccttttttagtcagaagtttttcatgtgaaataatttgattctgtgttctgcttgatcatactcctaagcaagcaccaagggaagacgttctattcaccccacaatttaagcttaacaatctttaactcagagggagatatgaagaaatatgattctaagtagggtctagcagaggcattggaaagtgataaaagtaggaagtaagagaaagcaaacctttataaagagataaagacatagttgttacctaagatgccactgtatgtgtgccctctctttttttttttttttttttggagacagagactcactctgtcacccattctggagtgcagtggcgcaatcctggctcactgcaacctctgcctcccgggttcaagcatttctcctgcctcagcctcctgagtagctgggattacaggcacacgccacaatgcccggctaatttttgtatttttagtagagacggggtttcgccatgctaggctggtctcgaactc

SEQ ID NO: 735170 - DNA, 3799 bp, Homo sapiens
  misc_feature (3386)..(3386): n is a, c, g, or t
attacaagcgtaaaccaccgcgcccgacctcctccccttatttcatccattttataattcacattattgatcgctgataattgcacctattgtaatgatactgataattgcacctgttgtaataatattgatattgataattgcacctattgtattacaatattattattgatatcgataatttcacctactgtaatgatcaataaaggcaggcagaaagaaaacaaaagtaactgaaactaccaggcagcgtccctgcgaacagcaaagagggaagaaacgccttgaggcgtagtaacgccaccaataaggagtcgacgcgacgggtccgcccacaggcaaggaaggccgaccccgcgagtgcaggcgcgagcgctagcccgtgacgtctgagggggttggggggatgctgtgtgggtttcaagaagacgccacgcctccgccgccgccacgcccccgccgcctccaccgccggctgccgcgcccggaggaggtcgggatgttatcacttccgccggggcttctcactgtgtccgggtcagctgctgccgccgacgccgtaccgctgcggccgggggattgggccggggtctccaccgccgaccgaggggagcgggctccgctcggccctgctttttgcgacctggccgtcagccccacgtcgccggcctggaggggcgaagaggacgagggggccaaggcttcctccggggacattggctccctggattatcaagagtttgtagttgacattgaatccaggctgaggatggaaggtgtggaacttaaagaagaatggcaagatgaagattttccgatacctttaccagaagatgatagtattgaagcagatatactagctataactggaccagaggaccagcctggctcactagaagttaatggaaataaagtgagaaagaaactaatggctccagacattagcctgacactggatcctagtgatggctctgtattgtcagatgatttggatgaaagtggggagattgacttagatggcttagacacaccgtcagagaatagtaatgagtttgagtgggaagatgatcttccaaaacccaagactactgaagtaattaggaaaggctcaattactgaatacacagcagcagaggaaaaagaagatggacgacgctggcgtatgttcaggattggagaacaggaccacagggttgatatgaaggcaattgaaccctataaaaaagttatcagccatgggggatattatggggatggattaaatgccattgttgtgtttgctgtctgtttcatgcctgaaagtagtcagcctaactatagatacctgatggacaatctttttaaatatgttattggcactttggagctattagtagcagaaaactacatgatagtttatttaaatggtgcaacaactcgaagaaaaatgcccagtctgggatggctcaggaaatgttatcagcaaattgatagaaggttacggaaaaatctaaaatccctaatcattgtacatccttcttggtttatcagaacacttctggctgttacaagaccatttattagctcgaaattcagccaaaaaattagatacgtgtttaatttggcagaactagcagaacttgtccccatggaatacgttggcataccagaatgcataaaacagtatgaagaagaaaagtttaaaaagaaacaaaaaagagttgatcaagaacttaatggaaaacaagatgaaccgaaaaatgaacagtaagtttggcatctagtccaaacaagactgaagaatgtgctgatggagcagtgctgtttctgcattcataatgcatttattggcccatatttttatgtaacctgttacaaaatagacttgactttttcataatggacttttgtattatacaagggactgttcactgctgtactggtttgcaaatttcttgaatttagctctttaatagctaactgtattattatcgttttatattttatattgctaaatagagaaccacactttatataaagtagtttttgcatttgtttattgaatgatgcatcttcttcggtgaaatatttatatgcataaatggcaaaggaaagaaataatatatatttttatgtcattgagcaatattttttaatgtgtacctgtcttatggaagaaatatgcaggtatataagaccacgattttctaaagtgcatattagaatttttgtttttgtaaatggttaaatacatttcctgggtaacttaggaaattaagtttttcataaggcaacagatggttaaactgattgtcatgaatacccaaagatcatgtatataatcgaagtgtattagtaccatcccaaggtttttttctcatttaacatatttgtttcataattcagcaagtacagatgcaagcgcattgcacactttttcctttctaaacttaaagacaagtcaaaaagccattcttagaactagaggatttaagagggtaggaattagggtttgtatatatgtatatatgggacattttatcttctggcccaaagtcagaactttataaaaatcttgagtttgttcactaatgtgaaataagctatgtgtccagggtattgctcccctgagtgtatatgagtgctgagtagtattgcagagaatgtgatgagttattcactgtcacaactttttctatagaaaacaggggctgctttttaaactctcactatgggcactttaccaaaatacttccatatcaattatttgaactcggtagttgtttgacctagttagatgtggtgtttattcaagtttgtatgaaatcatgtttgacaatactgtaaattaggttaattttgtaagtcttagcatcatcatattgtgctgttttggataacacgtttgttacaagcatttaaactgtttcatttggtagtacctttacattgaaataaattgtgtttgtgcctccaaacaaaaaaaaaaaaaaaaaaaaaaaaaaaaaaaaaaaaaccgcggggcgctttttttgtggggggcggcgaaaaagagggcgttattgtgaggtgggcgcccgtgtggtccttcgcgtgtgtttcccttggccccatttttttgtgtccagcggtgggtaataacttcgtgcgcgggctccccctattttgtgggaggcgctcgatattaattttgccgatttagcgccccggtgttctcccccctgcttattattagtatcttcccgtcttacctccccccggggcattactacttctccccccgtccctgctagcacggcgcgcattatctctgtgtgtatccccaacgagaacttcttttcagcaataaccccttttcattctctctggcggacgatcaaatcctctgcgttgcgtcgtcggcccanagcacaacacagccccgccggcttttaccggcgcggtgtggtgtttttggtattgccgggacacacactcacgtctgcccaccacctattttatctcgcgaggaggtactctgttgtttcttcgaactcgactcgcgatgtttatccatactctccgtggtctctctcttgttgttaccccgggtatttacgtcgccccaccattttagacacactttctttgtagccccgcgttatatattactatcgagctctggattatctagtggtcccaccagtggtgacttccgcccagtcgcataactcgtttcttcaccggcgtcgccactaacacgatgcctagtgcggaacagcgccagcgctggacaacggggcttctaccttcccccttttcatctactattacgcgtgta

SEQ ID NO: 735171 - DNA, 4467 bp, Homo sapiens
attacaagcgtaaaccaccgcgcccgacctcctccccttatttcatccattttataattcacattattgatcgctgataattgcacctattgtaatgatactgataattgcacctgttgtaataatattgatattgataattgcacctattgtattacaatattattattgatatcgataatttcacctactgtaatgatcaataaaggcaggcagaaagaaaacaaaagtaactgaaactaccaggcagcgtccctgcgaacagcaaagagggaagaaacgccttgaggcgtagtaacgccaccaataaggagtcgacgcgacgggtccgcccacaggcaaggaaggccgaccccgcgagtgcaggcgcgagcgctagcccgtgacgtctgagggggttggggggatgctgtgtgggtttcaagaagacgccacgcctccgccgccgccacgcccccgccgcctccaccgccggctgccgcgcccggaggaggtcgggatgttatcacttccgccggggcttctcactgtgtccgggtcagctgctgccgccgacgccgtaccgctgcggccgggggattgggccggggtctccaccgccgaccgaggggagcgggctccgctcggccctgctttttgcgacctggccgtcagccccacgtcgccggcctggaggggcgaagaggacgagggggccaaggcttcctccggggacattggctccctggattatcaagagtttgtagttgacattgaatccaggctgaggatggaaggtgtggaacttaaagaagaatggcaagatgaagattttccgatacctttaccagaagatgatagtattgaagcagatatactagctataactggaccagaggaccagcctggctcactagaagttaatggaaataaagtgagaaagaaactaatggctccagacattagcctgacactggatcctagtgatggctctgtattgtcagatgatttggatgaaagtggggagattgacttagatggcttagacacaccgtcagagaatagtaatgagtttgagtgggaagatgatcttccaaaacccaagactactgaagtaattaggaaaggctcaattactgaatacacagcagcagaggaaaaagaagatggacgacgctggcgtatgttcaggattggagaacaggaccacagggttgatatgaaggcaattgaaccctataaaaaagttatcagccatgggggatattatggggatggattaaatgccattgttgtgtttgctgtctgtttcatgcctgaaagtagtcagcctaactatagatacctgatggacaatctttttaaatatgttattggcactttggagctattagtagcagaaaactacatgatagtttatttaaatggtgcaacaactcgaagaaaaatgcccagtctgggatggctcaggaaatgttatcagcaaattgatagaaggttacggaaaaatctaaaatccctaatcattgtacatccttcttggtttatcagaacacttctggctgttacaagaccatttattagctcgaaattcagccaaaaaattagatacgtgtttaatttggcagaactagcagaacttgtccccatggaatacgttggcataccagaatgcataaaacagtatgaagaagaaaagtttaaaaagaaacaaaaaagagttgatcaagaacttaatggaaaacaagatgaaccgaaaaatgaacagtaagtttggcatctagtccaaacaagactgaagaatgtgctgatggagcagtgctgtttctgcattcataatgcatttattggcccatatttttatgtaacctgttacaaaatagacttgactttttcataatggacttttgtattatacaagggactgttcactgctgtactggtttgcaaatttcttgaatttagctctttaatagctaactgtattattatcgtttaatttttgtttttgtaaatggttaaatacatttcctgggtaacttaggaaattaagtttttcataaggcaacagatggttaaactgattgtcatgaatacccaaagatcatgtatataatcgaagtgtattagtaccatcccaaggtttttttctcatttaacatatttgtttcataattcagcaagtacagatgcaagcgcattgcacactttttcctttctaaacttaaagacaagtcaaaaagccattcttagaactagaggatttaagagggtaggaattagggtttgtatatatgtatatatgggacattttatcttctggcccaaagtcagaactttataaaaatcttgagtttgttcactaatgtgaaataagctatgtgtccagggtattgctcccctgagtgtatatgagtgctgagtagtattgcagagaatgtgatgagttattcactgtcacaactttttctatagaaaacaggggctgctttttaaactctcactatgggcactttaccaaaatacttccatatcaattatttgaactcggtagttgtttgacctagttagatgtggtgtttattcaagtttgtatgaaatcatgtttgacaatactgtaaattaggttaattttgtaagtcttagcatcatcatattgtgctgttttggataacacgtttgttacaagcatttaaactgtttcatttggtagtacctttacattgaaataaattgtgtttgtgcctccaaacaaaaagtttaattaccgacaaaattatttctaaaacaacagattgatctgatattgtgtcatatacttgaaaggctcatacacagctggtaagcataataccttccaaatttgaaggtcatggctactcttcaacccttcctgtaaggtattttacaaaacagtggcctagagtagcaaaattgaagtggatgtgagctaacctttcaagatttagtctatcctagattgaacacacatgtggctgtgaccattctcatgtacttacaaaccttctgttacaaaagggaactttcctatattttttgtcctcctcagtcctaaacttggcatgctaacttaaaaccagttataggagagagatgctggaggattcccaggatgaaacattcctcagcagcctcctgacttaactcagatccagcagctcttggcagatcctgaactaatgtcattacagtgaattgagccaaaacgattattgcttgctcacattttaggaacactttttgttgaagaagcaaactaacaataacaagttaggcattccttctgaatttaccatataaggattatgtataaacaattatattgaatttgtcattagattctatatttgtagacgatttaacgtagtctttcatctgtacatctttatcttgttcaaaatgggctgaggtttttaataggtggttttctaccacattaagtacttggttcttcattttaaaaaatatgaagaataacttcaactcttttttgcattattttgatttttgattttgcagtcattgctcctaactgtagatacatgttgcaaaagtgatgtttttctgaattttttttaaaagtagaagactattctgttaaacattaaaattcagagacaacagtgataacacctgggatataatgaaaatgaggtgctgtgaatcagtaaactaaagggatacctgctttaacctgcaccttaatggaatctggtatagagatgtacccacaataaatgttttataagatttaagatcataatagtaggttagaggaagagcatttattaagtctgttgtttctaatctatagctaagttaacatctcccatattattccattttaatttcccattactgaccaaggtgaaagtatatgtgactgtacttttatctttctgttgggatcatggatctaatttaactggcttaatttgatgcttctgtcactaggctctaagtgccccttttttagtcagaagtttttcatgtgaaataatttgattctgtgttctgcttgatcatactcctaagcaagcaccaagggaagacgttctattcaccccacaatttaagcttaacaatctttaactcagagggagatatgaagaaatatgattctaagtagggtctagcagaggcattggaaagtgataaaagtaggaagtaagagaaagcaaacctttataaagagataaagacatagttgttacctaagatgccactgtatgtgtgccctctctttttttttttttttttttggagacagagactcactctgtcacccattctggagtgcagtggcgcaatcctggctcactgcaacctctgcctcccgggttcaagcatttctcctgcctcagcctcctgagtagctgggattacaggcacacgccacaatgcccggctaatttttgtatttttagtagagacggggtttcgccatgctaggctggtctcgaactc

SEQ ID NO: 735172 - DNA, 3573 bp, Homo sapiens
  misc_feature (3160)..(3160): n is a, c, g, or t
attacaagcgtaaaccaccgcgcccgacctcctccccttatttcatccattttataattcacattattgatcgctgataattgcacctattgtaatgatactgataattgcacctgttgtaataatattgatattgataattgcacctattgtattacaatattattattgatatcgataatttcacctactgtaatgatcaataaaggcaggcagaaagaaaacaaaagtaactgaaactaccaggcagcgtccctgcgaacagcaaagagggaagaaacgccttgaggcgtagtaacgccaccaataaggagtcgacgcgacgggtccgcccacaggcaaggaaggccgaccccgcgagtgcaggcgcgagcgctagcccgtgacgtctgagggggttggggggatgctgtgtgggtttcaagaagacgccacgcctccgccgccgccacgcccccgccgcctccaccgccggctgccgcgcccggaggaggtcgggatgttatcacttccgccggggcttctcactgtgtccgggtcagctgctgccgccgacgccgtaccgctgcggccgggggattgggccggggtctccaccgccgaccgaggggagcgggctccgctcggccctgctttttgcgacctggccgtcagccccacgtcgccggcctggaggggcgaagaggacgagggggccaaggcttcctccggggacattggctccctggattatcaagagtttgtagttgacattgaatccaggctgaggatggaaggtgtggaacttaaagaagaatggcaagatgaagattttccgatacctttaccagaagatgatagtattgaagcagatatactagctataactggaccagaggaccagcctggctcactagaagttaatggaaataaagtgagaaagaaactaatggctccagacattagcctgacactggatcctagtgatggctctgtattgtcagatgatttggatgaaagtggggagattgacttagatggcttagacacaccgtcagagaatagtaatgagtttgagtgggaagatgatcttccaaaacccaagactactgaagtaattaggaaaggctcaattactgaatacacagcagcagaggaaaaagaagatggacgacgctggcgtatgttcaggattggagaacaggaccacagggttgatatgaaggcaattgaaccctataaaaaagttatcagccatgggggatattatggggatggattaaatgccattgttgtgtttgctgtctgtttcatgcctgaaagtagtcagcctaactatagatacctgatggacaatctttttaaatatgttattggcactttggagctattagtagcagaaaactacatgatagtttatttaaatggtgcaacaactcgaagaaaaatgcccagtctgggatggctcaggaaatgttatcagcaaattgatagaaggttacggaaaaatctaaaatccctaatcattgtacatccttcttggtttatcagaacacttctggctgttacaagaccatttattagctcgaaattcagccaaaaaattagatacgtgtttaatttggcagaactagcagaacttgtccccatggaatacgttggcataccagaatgcataaaacagtatgaagaagaaaagtttaaaaagaaacaaaaaagagttgatcaagaacttaatggaaaacaagatgaaccgaaaaatgaacagtaagtttggcatctagtccaaacaagactgaagaatgtgctgatggagcagtgctgtttctgcattcataatgcatttattggcccatatttttatgtaacctgttacaaaatagacttgactttttcataatggacttttgtattatacaagggactgttcactgctgtactggtttgcaaatttcttgaatttagctctttaatagctaactgtattattatcgtttaatttttgtttttgtaaatggttaaatacatttcctgggtaacttaggaaattaagtttttcataaggcaacagatggttaaactgattgtcatgaatacccaaagatcatgtatataatcgaagtgtattagtaccatcccaaggtttttttctcatttaacatatttgtttcataattcagcaagtacagatgcaagcgcattgcacactttttcctttctaaacttaaagacaagtcaaaaagccattcttagaactagaggatttaagagggtaggaattagggtttgtatatatgtatatatgggacattttatcttctggcccaaagtcagaactttataaaaatcttgagtttgttcactaatgtgaaataagctatgtgtccagggtattgctcccctgagtgtatatgagtgctgagtagtattgcagagaatgtgatgagttattcactgtcacaactttttctatagaaaacaggggctgctttttaaactctcactatgggcactttaccaaaatacttccatatcaattatttgaactcggtagttgtttgacctagttagatgtggtgtttattcaagtttgtatgaaatcatgtttgacaatactgtaaattaggttaattttgtaagtcttagcatcatcatattgtgctgttttggataacacgtttgttacaagcatttaaactgtttcatttggtagtacctttacattgaaataaattgtgtttgtgcctccaaacaaaaaaaaaaaaaaaaaaaaaaaaaaaaaaaaaaaaaccgcggggcgctttttttgtggggggcggcgaaaaagagggcgttattgtgaggtgggcgcccgtgtggtccttcgcgtgtgtttcccttggccccatttttttgtgtccagcggtgggtaataacttcgtgcgcgggctccccctattttgtgggaggcgctcgatattaattttgccgatttagcgccccggtgttctcccccctgcttattattagtatcttcccgtcttacctccccccggggcattactacttctccccccgtccctgctagcacggcgcgcattatctctgtgtgtatccccaacgagaacttcttttcagcaataaccccttttcattctctctggcggacgatcaaatcctctgcgttgcgtcgtcggcccanagcacaacacagccccgccggcttttaccggcgcggtgtggtgtttttggtattgccgggacacacactcacgtctgcccaccacctattttatctcgcgaggaggtactctgttgtttcttcgaactcgactcgcgatgtttatccatactctccgtggtctctctcttgttgttaccccgggtatttacgtcgccccaccattttagacacactttctttgtagccccgcgttatatattactatcgagctctggattatctagtggtcccaccagtggtgacttccgcccagtcgcataactcgtttcttcaccggcgtcgccactaacacgatgcctagtgcggaacagcgccagcgctggacaacggggcttctaccttcccccttttcatctactattacgcgtgta

SEQ ID NO: 735173 - DNA, 4609 bp, Homo sapiens
attacaagcgtaaaccaccgcgcccgacctcctccccttatttcatccattttataattcacattattgatcgctgataattgcacctattgtaatgatactgataattgcacctgttgtaataatattgatattgataattgcacctattgtattacaatattattattgatatcgataatttcacctactgtaatgatcaataaaggcaggcagaaagaaaacaaaagtaactgaaactaccaggcagcgtccctgcgaacagcaaagagggaagaaacgccttgaggcgtagtaacgccaccaataaggagtcgacgcgacgggtccgcccacaggcaaggaaggccgaccccgcgagtgcaggcgcgagcgctagcccgtgacgtctgagggggttggggggatgctgtgtgggtttcaagaagacgccacgcctccgccgccgccacgcccccgccgcctccaccgccggctgccgcgcccggaggaggtcgggatgttatcacttccgccggggcttctcactgtgtccgggtcagctgctgccgccgacgccgtaccgctgcggccgggggattgggccggggtctccaccgccgaccgaggggagcgggctccgctcggccctgctttttgcgacctggccgtcagccccacgtcgccggcctggaggggcgaagaggacgagggggccaaggcttcctccggggacattggctccctggattatcaagagtttgtagttgacattgaatccaggctgaggatggaaggtgtggaacttaaagaagaatggcaagatgaagattttccgatacctttaccagaagatgatagtattgaagcagatatactagctataactggaccagaggaccagcctggctcactagaagttaatggaaataaagtgagaaagaaactaatggctccagacattagcctgacactggatcctagtgatggctctgtattgtcagatgatttggatgaaagtggggagattgacttagatggcttagacacaccgtcagagaatagtaatgagtttgagtgggaagatgatcttccaaaacccaagactactgaagtaattaggaaaggctcaattactgaatacacagcagcagaggaaaaagaagatggacgacgctggcgtatgttcaggattggagaacaggaccacagggttgatatgaaggcaattgaaccctataaaaaagttatcagccatgggggatattatggggatggattaaatgccattgttgtgtttgctgtctgtttcatgcctgaaagtagtcagcctaactatagatacctgatggacaatctttttaaatatgttattggcactttggagctattagtagcagaaaactacatgatagtttatttaaatggtgcaacaactcgaagaaaaatgcccagtctgggatggctcaggaaatgttatcagcaaattgatagaaggttacggaaaaatctaaaatccctaatcattgtacatccttcttggtttatcagaacacttctggctgttacaagaccatttattagctcgaaattcagccaaaaaattagatacgtgtttaatttggcagaactagcagaacttgtccccatggaatacgttggcataccagaatgcataaaacagtatgaagaagaaaagtttaaaaagaaacaaaaaagagttgatcaagaacttaatggaaaacaagatgaaccgaaaaatgaacagtaagtttggcatctagtccaaacaagactgaagaatgtgctgatggagcagtgctgtttctgcattaagggactgttcactgctgtactggtttgcaaatttcttgaatttagctctttaatagctaactgtattattatcgttttatattttatattgctaaatagagaaccacactttatataaagtagtttttgcatttgtttattgaatgatgcatcttcttcggtgaaatatttatatgcataaatggcaaaggaaagaaataatatatatttttatgtcattgagcaatattttttaatgtgtacctgtcttatggaagaaatatgcaggtatataagaccacgattttctaaagtgcatattagaatttttgtttttgtaaatggttaaatacatttcctgggtaacttaggaaattaagtttttcataaggcaacagatggttaaactgattgtcatgaatacccaaagatcatgtatataatcgaagtgtattagtaccatcccaaggtttttttctcatttaacatatttgtttcataattcagcaagtacagatgcaagcgcattgcacactttttcctttctaaacttaaagacaagtcaaaaagccattcttagaactagaggatttaagagggtaggaattagggtttgtatatatgtatatatgggacattttatcttctggcccaaagtcagaactttataaaaatcttgagtttgttcactaatgtgaaataagctatgtgtccagggtattgctcccctgagtgtatatgagtgctgagtagtattgcagagaatgtgatgagttattcactgtcacaactttttctatagaaaacaggggctgctttttaaactctcactatgggcactttaccaaaatacttccatatcaattatttgaactcggtagttgtttgacctagttagatgtggtgtttattcaagtttgtatgaaatcatgtttgacaatactgtaaattaggttaattttgtaagtcttagcatcatcatattgtgctgttttggataacacgtttgttacaagcatttaaactgtttcatttggtagtacctttacattgaaataaattgtgtttgtgcctccaaacaaaaagtttaattaccgacaaaattatttctaaaacaacagattgatctgatattgtgtcatatacttgaaaggctcatacacagctggtaagcataataccttccaaatttgaaggtcatggctactcttcaacccttcctgtaaggtattttacaaaacagtggcctagagtagcaaaattgaagtggatgtgagctaacctttcaagatttagtctatcctagattgaacacacatgtggctgtgaccattctcatgtacttacaaaccttctgttacaaaagggaactttcctatattttttgtcctcctcagtcctaaacttggcatgctaacttaaaaccagttataggagagagatgctggaggattcccaggatgaaacattcctcagcagcctcctgacttaactcagatccagcagctcttggcagatcctgaactaatgtcattacagtgaattgagccaaaacgattattgcttgctcacattttaggaacactttttgttgaagaagcaaactaacaataacaagttaggcattccttctgaatttaccatataaggattatgtataaacaattatattgaatttgtcattagattctatatttgtagacgatttaacgtagtctttcatctgtacatctttatcttgttcaaaatgggctgaggtttttaataggtggttttctaccacattaagtacttggttcttcattttaaaaaatatgaagaataacttcaactcttttttgcattattttgatttttgattttgcagtcattgctcctaactgtagatacatgttgcaaaagtgatgtttttctgaattttttttaaaagtagaagactattctgttaaacattaaaattcagagacaacagtgataacacctgggatataatgaaaatgaggtgctgtgaatcagtaaactaaagggatacctgctttaacctgcaccttaatggaatctggtatagagatgtacccacaataaatgttttataagatttaagatcataatagtaggttagaggaagagcatttattaagtctgttgtttctaatctatagctaagttaacatctcccatattattccattttaatttcccattactgaccaaggtgaaagtatatgtgactgtacttttatctttctgttgggatcatggatctaatttaactggcttaatttgatgcttctgtcactaggctctaagtgccccttttttagtcagaagtttttcatgtgaaataatttgattctgtgttctgcttgatcatactcctaagcaagcaccaagggaagacgttctattcaccccacaatttaagcttaacaatctttaactcagagggagatatgaagaaatatgattctaagtagggtctagcagaggcattggaaagtgataaaagtaggaagtaagagaaagcaaacctttataaagagataaagacatagttgttacctaagatgccactgtatgtgtgccctctctttttttttttttttttttggagacagagactcactctgtcacccattctggagtgcagtggcgcaatcctggctcactgcaacctctgcctcccgggttcaagcatttctcctgcctcagcctcctgagtagctgggattacaggcacacgccacaatgcccggctaatttttgtatttttagtagagacggggtttcgccatgctaggctggtctcgaactc

SEQ ID NO: 735174 - DNA, 3715 bp, Homo sapiens
  misc_feature (3302)..(3302): n is a, c, g, or t
attacaagcgtaaaccaccgcgcccgacctcctccccttatttcatccattttataattcacattattgatcgctgataattgcacctattgtaatgatactgataattgcacctgttgtaataatattgatattgataattgcacctattgtattacaatattattattgatatcgataatttcacctactgtaatgatcaataaaggcaggcagaaagaaaacaaaagtaactgaaactaccaggcagcgtccctgcgaacagcaaagagggaagaaacgccttgaggcgtagtaacgccaccaataaggagtcgacgcgacgggtccgcccacaggcaaggaaggccgaccccgcgagtgcaggcgcgagcgctagcccgtgacgtctgagggggttggggggatgctgtgtgggtttcaagaagacgccacgcctccgccgccgccacgcccccgccgcctccaccgccggctgccgcgcccggaggaggtcgggatgttatcacttccgccggggcttctcactgtgtccgggtcagctgctgccgccgacgccgtaccgctgcggccgggggattgggccggggtctccaccgccgaccgaggggagcgggctccgctcggccctgctttttgcgacctggccgtcagccccacgtcgccggcctggaggggcgaagaggacgagggggccaaggcttcctccggggacattggctccctggattatcaagagtttgtagttgacattgaatccaggctgaggatggaaggtgtggaacttaaagaagaatggcaagatgaagattttccgatacctttaccagaagatgatagtattgaagcagatatactagctataactggaccagaggaccagcctggctcactagaagttaatggaaataaagtgagaaagaaactaatggctccagacattagcctgacactggatcctagtgatggctctgtattgtcagatgatttggatgaaagtggggagattgacttagatggcttagacacaccgtcagagaatagtaatgagtttgagtgggaagatgatcttccaaaacccaagactactgaagtaattaggaaaggctcaattactgaatacacagcagcagaggaaaaagaagatggacgacgctggcgtatgttcaggattggagaacaggaccacagggttgatatgaaggcaattgaaccctataaaaaagttatcagccatgggggatattatggggatggattaaatgccattgttgtgtttgctgtctgtttcatgcctgaaagtagtcagcctaactatagatacctgatggacaatctttttaaatatgttattggcactttggagctattagtagcagaaaactacatgatagtttatttaaatggtgcaacaactcgaagaaaaatgcccagtctgggatggctcaggaaatgttatcagcaaattgatagaaggttacggaaaaatctaaaatccctaatcattgtacatccttcttggtttatcagaacacttctggctgttacaagaccatttattagctcgaaattcagccaaaaaattagatacgtgtttaatttggcagaactagcagaacttgtccccatggaatacgttggcataccagaatgcataaaacagtatgaagaagaaaagtttaaaaagaaacaaaaaagagttgatcaagaacttaatggaaaacaagatgaaccgaaaaatgaacagtaagtttggcatctagtccaaacaagactgaagaatgtgctgatggagcagtgctgtttctgcattaagggactgttcactgctgtactggtttgcaaatttcttgaatttagctctttaatagctaactgtattattatcgttttatattttatattgctaaatagagaaccacactttatataaagtagtttttgcatttgtttattgaatgatgcatcttcttcggtgaaatatttatatgcataaatggcaaaggaaagaaataatatatatttttatgtcattgagcaatattttttaatgtgtacctgtcttatggaagaaatatgcaggtatataagaccacgattttctaaagtgcatattagaatttttgtttttgtaaatggttaaatacatttcctgggtaacttaggaaattaagtttttcataaggcaacagatggttaaactgattgtcatgaatacccaaagatcatgtatataatcgaagtgtattagtaccatcccaaggtttttttctcatttaacatatttgtttcataattcagcaagtacagatgcaagcgcattgcacactttttcctttctaaacttaaagacaagtcaaaaagccattcttagaactagaggatttaagagggtaggaattagggtttgtatatatgtatatatgggacattttatcttctggcccaaagtcagaactttataaaaatcttgagtttgttcactaatgtgaaataagctatgtgtccagggtattgctcccctgagtgtatatgagtgctgagtagtattgcagagaatgtgatgagttattcactgtcacaactttttctatagaaaacaggggctgctttttaaactctcactatgggcactttaccaaaatacttccatatcaattatttgaactcggtagttgtttgacctagttagatgtggtgtttattcaagtttgtatgaaatcatgtttgacaatactgtaaattaggttaattttgtaagtcttagcatcatcatattgtgctgttttggataacacgtttgttacaagcatttaaactgtttcatttggtagtacctttacattgaaataaattgtgtttgtgcctccaaacaaaaaaaaaaaaaaaaaaaaaaaaaaaaaaaaaaaaaccgcggggcgctttttttgtggggggcggcgaaaaagagggcgttattgtgaggtgggcgcccgtgtggtccttcgcgtgtgtttcccttggccccatttttttgtgtccagcggtgggtaataacttcgtgcgcgggctccccctattttgtgggaggcgctcgatattaattttgccgatttagcgccccggtgttctcccccctgcttattattagtatcttcccgtcttacctccccccggggcattactacttctccccccgtccctgctagcacggcgcgcattatctctgtgtgtatccccaacgagaacttcttttcagcaataaccccttttcattctctctggcggacgatcaaatcctctgcgttgcgtcgtcggcccanagcacaacacagccccgccggcttttaccggcgcggtgtggtgtttttggtattgccgggacacacactcacgtctgcccaccacctattttatctcgcgaggaggtactctgttgtttcttcgaactcgactcgcgatgtttatccatactctccgtggtctctctcttgttgttaccccgggtatttacgtcgccccaccattttagacacactttctttgtagccccgcgttatatattactatcgagctctggattatctagtggtcccaccagtggtgacttccgcccagtcgcataactcgtttcttcaccggcgtcgccactaacacgatgcctagtgcggaacagcgccagcgctggacaacggggcttctaccttcccccttttcatctactattacgcgtgta

SEQ ID NO: 735175 - DNA, 4383 bp, Homo sapiens
attacaagcgtaaaccaccgcgcccgacctcctccccttatttcatccattttataattcacattattgatcgctgataattgcacctattgtaatgatactgataattgcacctgttgtaataatattgatattgataattgcacctattgtattacaatattattattgatatcgataatttcacctactgtaatgatcaataaaggcaggcagaaagaaaacaaaagtaactgaaactaccaggcagcgtccctgcgaacagcaaagagggaagaaacgccttgaggcgtagtaacgccaccaataaggagtcgacgcgacgggtccgcccacaggcaaggaaggccgaccccgcgagtgcaggcgcgagcgctagcccgtgacgtctgagggggttggggggatgctgtgtgggtttcaagaagacgccacgcctccgccgccgccacgcccccgccgcctccaccgccggctgccgcgcccggaggaggtcgggatgttatcacttccgccggggcttctcactgtgtccgggtcagctgctgccgccgacgccgtaccgctgcggccgggggattgggccggggtctccaccgccgaccgaggggagcgggctccgctcggccctgctttttgcgacctggccgtcagccccacgtcgccggcctggaggggcgaagaggacgagggggccaaggcttcctccggggacattggctccctggattatcaagagtttgtagttgacattgaatccaggctgaggatggaaggtgtggaacttaaagaagaatggcaagatgaagattttccgatacctttaccagaagatgatagtattgaagcagatatactagctataactggaccagaggaccagcctggctcactagaagttaatggaaataaagtgagaaagaaactaatggctccagacattagcctgacactggatcctagtgatggctctgtattgtcagatgatttggatgaaagtggggagattgacttagatggcttagacacaccgtcagagaatagtaatgagtttgagtgggaagatgatcttccaaaacccaagactactgaagtaattaggaaaggctcaattactgaatacacagcagcagaggaaaaagaagatggacgacgctggcgtatgttcaggattggagaacaggaccacagggttgatatgaaggcaattgaaccctataaaaaagttatcagccatgggggatattatggggatggattaaatgccattgttgtgtttgctgtctgtttcatgcctgaaagtagtcagcctaactatagatacctgatggacaatctttttaaatatgttattggcactttggagctattagtagcagaaaactacatgatagtttatttaaatggtgcaacaactcgaagaaaaatgcccagtctgggatggctcaggaaatgttatcagcaaattgatagaaggttacggaaaaatctaaaatccctaatcattgtacatccttcttggtttatcagaacacttctggctgttacaagaccatttattagctcgaaattcagccaaaaaattagatacgtgtttaatttggcagaactagcagaacttgtccccatggaatacgttggcataccagaatgcataaaacagtatgaagaagaaaagtttaaaaagaaacaaaaaagagttgatcaagaacttaatggaaaacaagatgaaccgaaaaatgaacagtaagtttggcatctagtccaaacaagactgaagaatgtgctgatggagcagtgctgtttctgcattaagggactgttcactgctgtactggtttgcaaatttcttgaatttagctctttaatagctaactgtattattatcgtttaatttttgtttttgtaaatggttaaatacatttcctgggtaacttaggaaattaagtttttcataaggcaacagatggttaaactgattgtcatgaatacccaaagatcatgtatataatcgaagtgtattagtaccatcccaaggtttttttctcatttaacatatttgtttcataattcagcaagtacagatgcaagcgcattgcacactttttcctttctaaacttaaagacaagtcaaaaagccattcttagaactagaggatttaagagggtaggaattagggtttgtatatatgtatatatgggacattttatcttctggcccaaagtcagaactttataaaaatcttgagtttgttcactaatgtgaaataagctatgtgtccagggtattgctcccctgagtgtatatgagtgctgagtagtattgcagagaatgtgatgagttattcactgtcacaactttttctatagaaaacaggggctgctttttaaactctcactatgggcactttaccaaaatacttccatatcaattatttgaactcggtagttgtttgacctagttagatgtggtgtttattcaagtttgtatgaaatcatgtttgacaatactgtaaattaggttaattttgtaagtcttagcatcatcatattgtgctgttttggataacacgtttgttacaagcatttaaactgtttcatttggtagtacctttacattgaaataaattgtgtttgtgcctccaaacaaaaagtttaattaccgacaaaattatttctaaaacaacagattgatctgatattgtgtcatatacttgaaaggctcatacacagctggtaagcataataccttccaaatttgaaggtcatggctactcttcaacccttcctgtaaggtattttacaaaacagtggcctagagtagcaaaattgaagtggatgtgagctaacctttcaagatttagtctatcctagattgaacacacatgtggctgtgaccattctcatgtacttacaaaccttctgttacaaaagggaactttcctatattttttgtcctcctcagtcctaaacttggcatgctaacttaaaaccagttataggagagagatgctggaggattcccaggatgaaacattcctcagcagcctcctgacttaactcagatccagcagctcttggcagatcctgaactaatgtcattacagtgaattgagccaaaacgattattgcttgctcacattttaggaacactttttgttgaagaagcaaactaacaataacaagttaggcattccttctgaatttaccatataaggattatgtataaacaattatattgaatttgtcattagattctatatttgtagacgatttaacgtagtctttcatctgtacatctttatcttgttcaaaatgggctgaggtttttaataggtggttttctaccacattaagtacttggttcttcattttaaaaaatatgaagaataacttcaactcttttttgcattattttgatttttgattttgcagtcattgctcctaactgtagatacatgttgcaaaagtgatgtttttctgaattttttttaaaagtagaagactattctgttaaacattaaaattcagagacaacagtgataacacctgggatataatgaaaatgaggtgctgtgaatcagtaaactaaagggatacctgctttaacctgcaccttaatggaatctggtatagagatgtacccacaataaatgttttataagatttaagatcataatagtaggttagaggaagagcatttattaagtctgttgtttctaatctatagctaagttaacatctcccatattattccattttaatttcccattactgaccaaggtgaaagtatatgtgactgtacttttatctttctgttgggatcatggatctaatttaactggcttaatttgatgcttctgtcactaggctctaagtgccccttttttagtcagaagtttttcatgtgaaataatttgattctgtgttctgcttgatcatactcctaagcaagcaccaagggaagacgttctattcaccccacaatttaagcttaacaatctttaactcagagggagatatgaagaaatatgattctaagtagggtctagcagaggcattggaaagtgataaaagtaggaagtaagagaaagcaaacctttataaagagataaagacatagttgttacctaagatgccactgtatgtgtgccctctctttttttttttttttttttggagacagagactcactctgtcacccattctggagtgcagtggcgcaatcctggctcactgcaacctctgcctcccgggttcaagcatttctcctgcctcagcctcctgagtagctgggattacaggcacacgccacaatgcccggctaatttttgtatttttagtagagacggggtttcgccatgctaggctggtctcgaactc

SEQ ID NO: 735176 - DNA, 3489 bp, Homo sapiens
  misc_feature (3076)..(3076): n is a, c, g, or t
attacaagcgtaaaccaccgcgcccgacctcctccccttatttcatccattttataattcacattattgatcgctgataattgcacctattgtaatgatactgataattgcacctgttgtaataatattgatattgataattgcacctattgtattacaatattattattgatatcgataatttcacctactgtaatgatcaataaaggcaggcagaaagaaaacaaaagtaactgaaactaccaggcagcgtccctgcgaacagcaaagagggaagaaacgccttgaggcgtagtaacgccaccaataaggagtcgacgcgacgggtccgcccacaggcaaggaaggccgaccccgcgagtgcaggcgcgagcgctagcccgtgacgtctgagggggttggggggatgctgtgtgggtttcaagaagacgccacgcctccgccgccgccacgcccccgccgcctccaccgccggctgccgcgcccggaggaggtcgggatgttatcacttccgccggggcttctcactgtgtccgggtcagctgctgccgccgacgccgtaccgctgcggccgggggattgggccggggtctccaccgccgaccgaggggagcgggctccgctcggccctgctttttgcgacctggccgtcagccccacgtcgccggcctggaggggcgaagaggacgagggggccaaggcttcctccggggacattggctccctggattatcaagagtttgtagttgacattgaatccaggctgaggatggaaggtgtggaacttaaagaagaatggcaagatgaagattttccgatacctttaccagaagatgatagtattgaagcagatatactagctataactggaccagaggaccagcctggctcactagaagttaatggaaataaagtgagaaagaaactaatggctccagacattagcctgacactggatcctagtgatggctctgtattgtcagatgatttggatgaaagtggggagattgacttagatggcttagacacaccgtcagagaatagtaatgagtttgagtgggaagatgatcttccaaaacccaagactactgaagtaattaggaaaggctcaattactgaatacacagcagcagaggaaaaagaagatggacgacgctggcgtatgttcaggattggagaacaggaccacagggttgatatgaaggcaattgaaccctataaaaaagttatcagccatgggggatattatggggatggattaaatgccattgttgtgtttgctgtctgtttcatgcctgaaagtagtcagcctaactatagatacctgatggacaatctttttaaatatgttattggcactttggagctattagtagcagaaaactacatgatagtttatttaaatggtgcaacaactcgaagaaaaatgcccagtctgggatggctcaggaaatgttatcagcaaattgatagaaggttacggaaaaatctaaaatccctaatcattgtacatccttcttggtttatcagaacacttctggctgttacaagaccatttattagctcgaaattcagccaaaaaattagatacgtgtttaatttggcagaactagcagaacttgtccccatggaatacgttggcataccagaatgcataaaacagtatgaagaagaaaagtttaaaaagaaacaaaaaagagttgatcaagaacttaatggaaaacaagatgaaccgaaaaatgaacagtaagtttggcatctagtccaaacaagactgaagaatgtgctgatggagcagtgctgtttctgcattaagggactgttcactgctgtactggtttgcaaatttcttgaatttagctctttaatagctaactgtattattatcgtttaatttttgtttttgtaaatggttaaatacatttcctgggtaacttaggaaattaagtttttcataaggcaacagatggttaaactgattgtcatgaatacccaaagatcatgtatataatcgaagtgtattagtaccatcccaaggtttttttctcatttaacatatttgtttcataattcagcaagtacagatgcaagcgcattgcacactttttcctttctaaacttaaagacaagtcaaaaagccattcttagaactagaggatttaagagggtaggaattagggtttgtatatatgtatatatgggacattttatcttctggcccaaagtcagaactttataaaaatcttgagtttgttcactaatgtgaaataagctatgtgtccagggtattgctcccctgagtgtatatgagtgctgagtagtattgcagagaatgtgatgagttattcactgtcacaactttttctatagaaaacaggggctgctttttaaactctcactatgggcactttaccaaaatacttccatatcaattatttgaactcggtagttgtttgacctagttagatgtggtgtttattcaagtttgtatgaaatcatgtttgacaatactgtaaattaggttaattttgtaagtcttagcatcatcatattgtgctgttttggataacacgtttgttacaagcatttaaactgtttcatttggtagtacctttacattgaaataaattgtgtttgtgcctccaaacaaaaaaaaaaaaaaaaaaaaaaaaaaaaaaaaaaaaaccgcggggcgctttttttgtggggggcggcgaaaaagagggcgttattgtgaggtgggcgcccgtgtggtccttcgcgtgtgtttcccttggccccatttttttgtgtccagcggtgggtaataacttcgtgcgcgggctccccctattttgtgggaggcgctcgatattaattttgccgatttagcgccccggtgttctcccccctgcttattattagtatcttcccgtcttacctccccccggggcattactacttctccccccgtccctgctagcacggcgcgcattatctctgtgtgtatccccaacgagaacttcttttcagcaataaccccttttcattctctctggcggacgatcaaatcctctgcgttgcgtcgtcggcccanagcacaacacagccccgccggcttttaccggcgcggtgtggtgtttttggtattgccgggacacacactcacgtctgcccaccacctattttatctcgcgaggaggtactctgttgtttcttcgaactcgactcgcgatgtttatccatactctccgtggtctctctcttgttgttaccccgggtatttacgtcgccccaccattttagacacactttctttgtagccccgcgttatatattactatcgagctctggattatctagtggtcccaccagtggtgacttccgcccagtcgcataactcgtttcttcaccggcgtcgccactaacacgatgcctagtgcggaacagcgccagcgctggacaacggggcttctaccttcccccttttcatctactattacgcgtgta

SEQ ID NO: 735177 - DNA, 4639 bp, Homo sapiens
attacaagcgtaaaccaccgcgcccgacctcctccccttatttcatccattttataattcacattattgatcgctgataattgcacctattgtaatgatactgataattgcacctgttgtaataatattgatattgataattgcacctattgtattacaatattattattgatatcgataatttcacctactgtaatgatcaataaaggcaggcagaaagaaaacaaaagtaactgaaactaccaggcagcgtccctgcgaacagcaaagagggaagaaacgccttgaggcgtagtaacgccaccaataaggagtcgacgcgacgggtccgcccacaggcaaggaaggccgaccccgcgagtgcaggcgcgagcgctagcccgtgacgtctgagggggttggggggatgctgtgtgggtttcaagaagacgccacgcctccgccgccgccacgcccccgccgcctccaccgccggctgccgcgcccggaggaggtcgggatgttatcacttccgccggggcttctcactgtgtccgggtcagctgctgccgccgacgccgtaccgctgcggccgggggattgggccggggtctccaccgccgaccgaggggagcgggctccgctcggccctgctttttgcgacctggccgtcagccccacgtcgccggcctggaggggcgaagaggacgagggggccaaggcttcctccggggacattggctccctggattatcaagagtttgtagttgacattgaatccaggctgaggatggaaggtgtggaacttaaagaagaatggcaagatgaagattttccgatacctttaccagaagatgatagtattgaagcagatatactagctataactggaccagaggaccagcctggctcactagaagttaatggaaataaagtgagaaagaaactaatggctccagacattagcctgacactggatcctagtgatggctctgtattgtcagatgatttggatgaaagtggggagattgacttagatggcttagacacaccgtcagagaatagtaatgagtttgagtgggaagatgatcttccaaaacccaagactactgaagtaattaggaaaggctcaattactgaatacacagcagcagaggaaaaagaagatggacgacgctggcgtatgttcaggattggagaacaggaccacagggttgatatgaaggcaattgaaccctataagtttgctgtctgtttcatgcctgaaagtagtcagcctaactatagatacctgatggacaatctttttaaatatgttattggcactttggagctattagtagcagaaaactacatgatagtttatttaaatggtgcaacaactcgaagaaaaatgcccagtctgggatggctcaggaaatgttatcagcaaattgatagaaggttacggaaaaatctaaaatccctaatcattgtacatccttcttggtttatcagaacacttctggctgttacaagaccatttattagctcgaaattcagccaaaaaattagatacgtgtttaatttggcagaactagcagaacttgtccccatggaatacgttggcataccagaatgcataaaacagtatgaagaagaaaagtttaaaaagaaacaaaaaagagttgatcaagaacttaatggaaaacaagatgaaccgaaaaatgaacagtaagtttggcatctagtccaaacaagactgaagaatgtgctgatggagcagtgctgtttctgcattcataatgcatttattggcccatatttttatgtaacctgttacaaaatagacttgactttttcataatggacttttgtattatacaagggactgttcactgctgtactggtttgcaaatttcttgaatttagctctttaatagctaactgtattattatcgttttatattttatattgctaaatagagaaccacactttatataaagtagtttttgcatttgtttattgaatgatgcatcttcttcggtgaaatatttatatgcataaatggcaaaggaaagaaataatatatatttttatgtcattgagcaatattttttaatgtgtacctgtcttatggaagaaatatgcaggtatataagaccacgattttctaaagtgcatattagaatttttgtttttgtaaatggttaaatacatttcctgggtaacttaggaaattaagtttttcataaggcaacagatggttaaactgattgtcatgaatacccaaagatcatgtatataatcgaagtgtattagtaccatcccaaggtttttttctcatttaacatatttgtttcataattcagcaagtacagatgcaagcgcattgcacactttttcctttctaaacttaaagacaagtcaaaaagccattcttagaactagaggatttaagagggtaggaattagggtttgtatatatgtatatatgggacattttatcttctggcccaaagtcagaactttataaaaatcttgagtttgttcactaatgtgaaataagctatgtgtccagggtattgctcccctgagtgtatatgagtgctgagtagtattgcagagaatgtgatgagttattcactgtcacaactttttctatagaaaacaggggctgctttttaaactctcactatgggcactttaccaaaatacttccatatcaattatttgaactcggtagttgtttgacctagttagatgtggtgtttattcaagtttgtatgaaatcatgtttgacaatactgtaaattaggttaattttgtaagtcttagcatcatcatattgtgctgttttggataacacgtttgttacaagcatttaaactgtttcatttggtagtacctttacattgaaataaattgtgtttgtgcctccaaacaaaaagtttaattaccgacaaaattatttctaaaacaacagattgatctgatattgtgtcatatacttgaaaggctcatacacagctggtaagcataataccttccaaatttgaaggtcatggctactcttcaacccttcctgtaaggtattttacaaaacagtggcctagagtagcaaaattgaagtggatgtgagctaacctttcaagatttagtctatcctagattgaacacacatgtggctgtgaccattctcatgtacttacaaaccttctgttacaaaagggaactttcctatattttttgtcctcctcagtcctaaacttggcatgctaacttaaaaccagttataggagagagatgctggaggattcccaggatgaaacattcctcagcagcctcctgacttaactcagatccagcagctcttggcagatcctgaactaatgtcattacagtgaattgagccaaaacgattattgcttgctcacattttaggaacactttttgttgaagaagcaaactaacaataacaagttaggcattccttctgaatttaccatataaggattatgtataaacaattatattgaatttgtcattagattctatatttgtagacgatttaacgtagtctttcatctgtacatctttatcttgttcaaaatgggctgaggtttttaataggtggttttctaccacattaagtacttggttcttcattttaaaaaatatgaagaataacttcaactcttttttgcattattttgatttttgattttgcagtcattgctcctaactgtagatacatgttgcaaaagtgatgtttttctgaattttttttaaaagtagaagactattctgttaaacattaaaattcagagacaacagtgataacacctgggatataatgaaaatgaggtgctgtgaatcagtaaactaaagggatacctgctttaacctgcaccttaatggaatctggtatagagatgtacccacaataaatgttttataagatttaagatcataatagtaggttagaggaagagcatttattaagtctgttgtttctaatctatagctaagttaacatctcccatattattccattttaatttcccattactgaccaaggtgaaagtatatgtgactgtacttttatctttctgttgggatcatggatctaatttaactggcttaatttgatgcttctgtcactaggctctaagtgccccttttttagtcagaagtttttcatgtgaaataatttgattctgtgttctgcttgatcatactcctaagcaagcaccaagggaagacgttctattcaccccacaatttaagcttaacaatctttaactcagagggagatatgaagaaatatgattctaagtagggtctagcagaggcattggaaagtgataaaagtaggaagtaagagaaagcaaacctttataaagagataaagacatagttgttacctaagatgccactgtatgtgtgccctctctttttttttttttttttttggagacagagactcactctgtcacccattctggagtgcagtggcgcaatcctggctcactgcaacctctgcctcccgggttcaagcatttctcctgcctcagcctcctgagtagctgggattacaggcacacgccacaatgcccggctaatttttgtatttttagtagagacggggtttcgccatgctaggctggtctcgaactc

SEQ ID NO: 735178 - DNA, 3745 bp, Homo sapiens
  misc_feature (3332)..(3332): n is a, c, g, or t
attacaagcgtaaaccaccgcgcccgacctcctccccttatttcatccattttataattcacattattgatcgctgataattgcacctattgtaatgatactgataattgcacctgttgtaataatattgatattgataattgcacctattgtattacaatattattattgatatcgataatttcacctactgtaatgatcaataaaggcaggcagaaagaaaacaaaagtaactgaaactaccaggcagcgtccctgcgaacagcaaagagggaagaaacgccttgaggcgtagtaacgccaccaataaggagtcgacgcgacgggtccgcccacaggcaaggaaggccgaccccgcgagtgcaggcgcgagcgctagcccgtgacgtctgagggggttggggggatgctgtgtgggtttcaagaagacgccacgcctccgccgccgccacgcccccgccgcctccaccgccggctgccgcgcccggaggaggtcgggatgttatcacttccgccggggcttctcactgtgtccgggtcagctgctgccgccgacgccgtaccgctgcggccgggggattgggccggggtctccaccgccgaccgaggggagcgggctccgctcggccctgctttttgcgacctggccgtcagccccacgtcgccggcctggaggggcgaagaggacgagggggccaaggcttcctccggggacattggctccctggattatcaagagtttgtagttgacattgaatccaggctgaggatggaaggtgtggaacttaaagaagaatggcaagatgaagattttccgatacctttaccagaagatgatagtattgaagcagatatactagctataactggaccagaggaccagcctggctcactagaagttaatggaaataaagtgagaaagaaactaatggctccagacattagcctgacactggatcctagtgatggctctgtattgtcagatgatttggatgaaagtggggagattgacttagatggcttagacacaccgtcagagaatagtaatgagtttgagtgggaagatgatcttccaaaacccaagactactgaagtaattaggaaaggctcaattactgaatacacagcagcagaggaaaaagaagatggacgacgctggcgtatgttcaggattggagaacaggaccacagggttgatatgaaggcaattgaaccctataagtttgctgtctgtttcatgcctgaaagtagtcagcctaactatagatacctgatggacaatctttttaaatatgttattggcactttggagctattagtagcagaaaactacatgatagtttatttaaatggtgcaacaactcgaagaaaaatgcccagtctgggatggctcaggaaatgttatcagcaaattgatagaaggttacggaaaaatctaaaatccctaatcattgtacatccttcttggtttatcagaacacttctggctgttacaagaccatttattagctcgaaattcagccaaaaaattagatacgtgtttaatttggcagaactagcagaacttgtccccatggaatacgttggcataccagaatgcataaaacagtatgaagaagaaaagtttaaaaagaaacaaaaaagagttgatcaagaacttaatggaaaacaagatgaaccgaaaaatgaacagtaagtttggcatctagtccaaacaagactgaagaatgtgctgatggagcagtgctgtttctgcattcataatgcatttattggcccatatttttatgtaacctgttacaaaatagacttgactttttcataatggacttttgtattatacaagggactgttcactgctgtactggtttgcaaatttcttgaatttagctctttaatagctaactgtattattatcgttttatattttatattgctaaatagagaaccacactttatataaagtagtttttgcatttgtttattgaatgatgcatcttcttcggtgaaatatttatatgcataaatggcaaaggaaagaaataatatatatttttatgtcattgagcaatattttttaatgtgtacctgtcttatggaagaaatatgcaggtatataagaccacgattttctaaagtgcatattagaatttttgtttttgtaaatggttaaatacatttcctgggtaacttaggaaattaagtttttcataaggcaacagatggttaaactgattgtcatgaatacccaaagatcatgtatataatcgaagtgtattagtaccatcccaaggtttttttctcatttaacatatttgtttcataattcagcaagtacagatgcaagcgcattgcacactttttcctttctaaacttaaagacaagtcaaaaagccattcttagaactagaggatttaagagggtaggaattagggtttgtatatatgtatatatgggacattttatcttctggcccaaagtcagaactttataaaaatcttgagtttgttcactaatgtgaaataagctatgtgtccagggtattgctcccctgagtgtatatgagtgctgagtagtattgcagagaatgtgatgagttattcactgtcacaactttttctatagaaaacaggggctgctttttaaactctcactatgggcactttaccaaaatacttccatatcaattatttgaactcggtagttgtttgacctagttagatgtggtgtttattcaagtttgtatgaaatcatgtttgacaatactgtaaattaggttaattttgtaagtcttagcatcatcatattgtgctgttttggataacacgtttgttacaagcatttaaactgtttcatttggtagtacctttacattgaaataaattgtgtttgtgcctccaaacaaaaaaaaaaaaaaaaaaaaaaaaaaaaaaaaaaaaaccgcggggcgctttttttgtggggggcggcgaaaaagagggcgttattgtgaggtgggcgcccgtgtggtccttcgcgtgtgtttcccttggccccatttttttgtgtccagcggtgggtaataacttcgtgcgcgggctccccctattttgtgggaggcgctcgatattaattttgccgatttagcgccccggtgttctcccccctgcttattattagtatcttcccgtcttacctccccccggggcattactacttctccccccgtccctgctagcacggcgcgcattatctctgtgtgtatccccaacgagaacttcttttcagcaataaccccttttcattctctctggcggacgatcaaatcctctgcgttgcgtcgtcggcccanagcacaacacagccccgccggcttttaccggcgcggtgtggtgtttttggtattgccgggacacacactcacgtctgcccaccacctattttatctcgcgaggaggtactctgttgtttcttcgaactcgactcgcgatgtttatccatactctccgtggtctctctcttgttgttaccccgggtatttacgtcgccccaccattttagacacactttctttgtagccccgcgttatatattactatcgagctctggattatctagtggtcccaccagtggtgacttccgcccagtcgcataactcgtttcttcaccggcgtcgccactaacacgatgcctagtgcggaacagcgccagcgctggacaacggggcttctaccttcccccttttcatctactattacgcgtgta

SEQ ID NO: 735179 - DNA, 4413 bp, Homo sapiens
attacaagcgtaaaccaccgcgcccgacctcctccccttatttcatccattttataattcacattattgatcgctgataattgcacctattgtaatgatactgataattgcacctgttgtaataatattgatattgataattgcacctattgtattacaatattattattgatatcgataatttcacctactgtaatgatcaataaaggcaggcagaaagaaaacaaaagtaactgaaactaccaggcagcgtccctgcgaacagcaaagagggaagaaacgccttgaggcgtagtaacgccaccaataaggagtcgacgcgacgggtccgcccacaggcaaggaaggccgaccccgcgagtgcaggcgcgagcgctagcccgtgacgtctgagggggttggggggatgctgtgtgggtttcaagaagacgccacgcctccgccgccgccacgcccccgccgcctccaccgccggctgccgcgcccggaggaggtcgggatgttatcacttccgccggggcttctcactgtgtccgggtcagctgctgccgccgacgccgtaccgctgcggccgggggattgggccggggtctccaccgccgaccgaggggagcgggctccgctcggccctgctttttgcgacctggccgtcagccccacgtcgccggcctggaggggcgaagaggacgagggggccaaggcttcctccggggacattggctccctggattatcaagagtttgtagttgacattgaatccaggctgaggatggaaggtgtggaacttaaagaagaatggcaagatgaagattttccgatacctttaccagaagatgatagtattgaagcagatatactagctataactggaccagaggaccagcctggctcactagaagttaatggaaataaagtgagaaagaaactaatggctccagacattagcctgacactggatcctagtgatggctctgtattgtcagatgatttggatgaaagtggggagattgacttagatggcttagacacaccgtcagagaatagtaatgagtttgagtgggaagatgatcttccaaaacccaagactactgaagtaattaggaaaggctcaattactgaatacacagcagcagaggaaaaagaagatggacgacgctggcgtatgttcaggattggagaacaggaccacagggttgatatgaaggcaattgaaccctataagtttgctgtctgtttcatgcctgaaagtagtcagcctaactatagatacctgatggacaatctttttaaatatgttattggcactttggagctattagtagcagaaaactacatgatagtttatttaaatggtgcaacaactcgaagaaaaatgcccagtctgggatggctcaggaaatgttatcagcaaattgatagaaggttacggaaaaatctaaaatccctaatcattgtacatccttcttggtttatcagaacacttctggctgttacaagaccatttattagctcgaaattcagccaaaaaattagatacgtgtttaatttggcagaactagcagaacttgtccccatggaatacgttggcataccagaatgcataaaacagtatgaagaagaaaagtttaaaaagaaacaaaaaagagttgatcaagaacttaatggaaaacaagatgaaccgaaaaatgaacagtaagtttggcatctagtccaaacaagactgaagaatgtgctgatggagcagtgctgtttctgcattcataatgcatttattggcccatatttttatgtaacctgttacaaaatagacttgactttttcataatggacttttgtattatacaagggactgttcactgctgtactggtttgcaaatttcttgaatttagctctttaatagctaactgtattattatcgtttaatttttgtttttgtaaatggttaaatacatttcctgggtaacttaggaaattaagtttttcataaggcaacagatggttaaactgattgtcatgaatacccaaagatcatgtatataatcgaagtgtattagtaccatcccaaggtttttttctcatttaacatatttgtttcataattcagcaagtacagatgcaagcgcattgcacactttttcctttctaaacttaaagacaagtcaaaaagccattcttagaactagaggatttaagagggtaggaattagggtttgtatatatgtatatatgggacattttatcttctggcccaaagtcagaactttataaaaatcttgagtttgttcactaatgtgaaataagctatgtgtccagggtattgctcccctgagtgtatatgagtgctgagtagtattgcagagaatgtgatgagttattcactgtcacaactttttctatagaaaacaggggctgctttttaaactctcactatgggcactttaccaaaatacttccatatcaattatttgaactcggtagttgtttgacctagttagatgtggtgtttattcaagtttgtatgaaatcatgtttgacaatactgtaaattaggttaattttgtaagtcttagcatcatcatattgtgctgttttggataacacgtttgttacaagcatttaaactgtttcatttggtagtacctttacattgaaataaattgtgtttgtgcctccaaacaaaaagtttaattaccgacaaaattatttctaaaacaacagattgatctgatattgtgtcatatacttgaaaggctcatacacagctggtaagcataataccttccaaatttgaaggtcatggctactcttcaacccttcctgtaaggtattttacaaaacagtggcctagagtagcaaaattgaagtggatgtgagctaacctttcaagatttagtctatcctagattgaacacacatgtggctgtgaccattctcatgtacttacaaaccttctgttacaaaagggaactttcctatattttttgtcctcctcagtcctaaacttggcatgctaacttaaaaccagttataggagagagatgctggaggattcccaggatgaaacattcctcagcagcctcctgacttaactcagatccagcagctcttggcagatcctgaactaatgtcattacagtgaattgagccaaaacgattattgcttgctcacattttaggaacactttttgttgaagaagcaaactaacaataacaagttaggcattccttctgaatttaccatataaggattatgtataaacaattatattgaatttgtcattagattctatatttgtagacgatttaacgtagtctttcatctgtacatctttatcttgttcaaaatgggctgaggtttttaataggtggttttctaccacattaagtacttggttcttcattttaaaaaatatgaagaataacttcaactcttttttgcattattttgatttttgattttgcagtcattgctcctaactgtagatacatgttgcaaaagtgatgtttttctgaattttttttaaaagtagaagactattctgttaaacattaaaattcagagacaacagtgataacacctgggatataatgaaaatgaggtgctgtgaatcagtaaactaaagggatacctgctttaacctgcaccttaatggaatctggtatagagatgtacccacaataaatgttttataagatttaagatcataatagtaggttagaggaagagcatttattaagtctgttgtttctaatctatagctaagttaacatctcccatattattccattttaatttcccattactgaccaaggtgaaagtatatgtgactgtacttttatctttctgttgggatcatggatctaatttaactggcttaatttgatgcttctgtcactaggctctaagtgccccttttttagtcagaagtttttcatgtgaaataatttgattctgtgttctgcttgatcatactcctaagcaagcaccaagggaagacgttctattcaccccacaatttaagcttaacaatctttaactcagagggagatatgaagaaatatgattctaagtagggtctagcagaggcattggaaagtgataaaagtaggaagtaagagaaagcaaacctttataaagagataaagacatagttgttacctaagatgccactgtatgtgtgccctctctttttttttttttttttttggagacagagactcactctgtcacccattctggagtgcagtggcgcaatcctggctcactgcaacctctgcctcccgggttcaagcatttctcctgcctcagcctcctgagtagctgggattacaggcacacgccacaatgcccggctaatttttgtatttttagtagagacggggtttcgccatgctaggctggtctcgaactc

SEQ ID NO: 735180 - DNA, 3519 bp, Homo sapiens
  misc_feature (3106)..(3106): n is a, c, g, or t
attacaagcgtaaaccaccgcgcccgacctcctccccttatttcatccattttataattcacattattgatcgctgataattgcacctattgtaatgatactgataattgcacctgttgtaataatattgatattgataattgcacctattgtattacaatattattattgatatcgataatttcacctactgtaatgatcaataaaggcaggcagaaagaaaacaaaagtaactgaaactaccaggcagcgtccctgcgaacagcaaagagggaagaaacgccttgaggcgtagtaacgccaccaataaggagtcgacgcgacgggtccgcccacaggcaaggaaggccgaccccgcgagtgcaggcgcgagcgctagcccgtgacgtctgagggggttggggggatgctgtgtgggtttcaagaagacgccacgcctccgccgccgccacgcccccgccgcctccaccgccggctgccgcgcccggaggaggtcgggatgttatcacttccgccggggcttctcactgtgtccgggtcagctgctgccgccgacgccgtaccgctgcggccgggggattgggccggggtctccaccgccgaccgaggggagcgggctccgctcggccctgctttttgcgacctggccgtcagccccacgtcgccggcctggaggggcgaagaggacgagggggccaaggcttcctccggggacattggctccctggattatcaagagtttgtagttgacattgaatccaggctgaggatggaaggtgtggaacttaaagaagaatggcaagatgaagattttccgatacctttaccagaagatgatagtattgaagcagatatactagctataactggaccagaggaccagcctggctcactagaagttaatggaaataaagtgagaaagaaactaatggctccagacattagcctgacactggatcctagtgatggctctgtattgtcagatgatttggatgaaagtggggagattgacttagatggcttagacacaccgtcagagaatagtaatgagtttgagtgggaagatgatcttccaaaacccaagactactgaagtaattaggaaaggctcaattactgaatacacagcagcagaggaaaaagaagatggacgacgctggcgtatgttcaggattggagaacaggaccacagggttgatatgaaggcaattgaaccctataagtttgctgtctgtttcatgcctgaaagtagtcagcctaactatagatacctgatggacaatctttttaaatatgttattggcactttggagctattagtagcagaaaactacatgatagtttatttaaatggtgcaacaactcgaagaaaaatgcccagtctgggatggctcaggaaatgttatcagcaaattgatagaaggttacggaaaaatctaaaatccctaatcattgtacatccttcttggtttatcagaacacttctggctgttacaagaccatttattagctcgaaattcagccaaaaaattagatacgtgtttaatttggcagaactagcagaacttgtccccatggaatacgttggcataccagaatgcataaaacagtatgaagaagaaaagtttaaaaagaaacaaaaaagagttgatcaagaacttaatggaaaacaagatgaaccgaaaaatgaacagtaagtttggcatctagtccaaacaagactgaagaatgtgctgatggagcagtgctgtttctgcattcataatgcatttattggcccatatttttatgtaacctgttacaaaatagacttgactttttcataatggacttttgtattatacaagggactgttcactgctgtactggtttgcaaatttcttgaatttagctctttaatagctaactgtattattatcgtttaatttttgtttttgtaaatggttaaatacatttcctgggtaacttaggaaattaagtttttcataaggcaacagatggttaaactgattgtcatgaatacccaaagatcatgtatataatcgaagtgtattagtaccatcccaaggtttttttctcatttaacatatttgtttcataattcagcaagtacagatgcaagcgcattgcacactttttcctttctaaacttaaagacaagtcaaaaagccattcttagaactagaggatttaagagggtaggaattagggtttgtatatatgtatatatgggacattttatcttctggcccaaagtcagaactttataaaaatcttgagtttgttcactaatgtgaaataagctatgtgtccagggtattgctcccctgagtgtatatgagtgctgagtagtattgcagagaatgtgatgagttattcactgtcacaactttttctatagaaaacaggggctgctttttaaactctcactatgggcactttaccaaaatacttccatatcaattatttgaactcggtagttgtttgacctagttagatgtggtgtttattcaagtttgtatgaaatcatgtttgacaatactgtaaattaggttaattttgtaagtcttagcatcatcatattgtgctgttttggataacacgtttgttacaagcatttaaactgtttcatttggtagtacctttacattgaaataaattgtgtttgtgcctccaaacaaaaaaaaaaaaaaaaaaaaaaaaaaaaaaaaaaaaaccgcggggcgctttttttgtggggggcggcgaaaaagagggcgttattgtgaggtgggcgcccgtgtggtccttcgcgtgtgtttcccttggccccatttttttgtgtccagcggtgggtaataacttcgtgcgcgggctccccctattttgtgggaggcgctcgatattaattttgccgatttagcgccccggtgttctcccccctgcttattattagtatcttcccgtcttacctccccccggggcattactacttctccccccgtccctgctagcacggcgcgcattatctctgtgtgtatccccaacgagaacttcttttcagcaataaccccttttcattctctctggcggacgatcaaatcctctgcgttgcgtcgtcggcccanagcacaacacagccccgccggcttttaccggcgcggtgtggtgtttttggtattgccgggacacacactcacgtctgcccaccacctattttatctcgcgaggaggtactctgttgtttcttcgaactcgactcgcgatgtttatccatactctccgtggtctctctcttgttgttaccccgggtatttacgtcgccccaccattttagacacactttctttgtagccccgcgttatatattactatcgagctctggattatctagtggtcccaccagtggtgacttccgcccagtcgcataactcgtttcttcaccggcgtcgccactaacacgatgcctagtgcggaacagcgccagcgctggacaacggggcttctaccttcccccttttcatctactattacgcgtgta

SEQ ID NO: 735181 - DNA, 4555 bp, Homo sapiens
attacaagcgtaaaccaccgcgcccgacctcctccccttatttcatccattttataattcacattattgatcgctgataattgcacctattgtaatgatactgataattgcacctgttgtaataatattgatattgataattgcacctattgtattacaatattattattgatatcgataatttcacctactgtaatgatcaataaaggcaggcagaaagaaaacaaaagtaactgaaactaccaggcagcgtccctgcgaacagcaaagagggaagaaacgccttgaggcgtagtaacgccaccaataaggagtcgacgcgacgggtccgcccacaggcaaggaaggccgaccccgcgagtgcaggcgcgagcgctagcccgtgacgtctgagggggttggggggatgctgtgtgggtttcaagaagacgccacgcctccgccgccgccacgcccccgccgcctccaccgccggctgccgcgcccggaggaggtcgggatgttatcacttccgccggggcttctcactgtgtccgggtcagctgctgccgccgacgccgtaccgctgcggccgggggattgggccggggtctccaccgccgaccgaggggagcgggctccgctcggccctgctttttgcgacctggccgtcagccccacgtcgccggcctggaggggcgaagaggacgagggggccaaggcttcctccggggacattggctccctggattatcaagagtttgtagttgacattgaatccaggctgaggatggaaggtgtggaacttaaagaagaatggcaagatgaagattttccgatacctttaccagaagatgatagtattgaagcagatatactagctataactggaccagaggaccagcctggctcactagaagttaatggaaataaagtgagaaagaaactaatggctccagacattagcctgacactggatcctagtgatggctctgtattgtcagatgatttggatgaaagtggggagattgacttagatggcttagacacaccgtcagagaatagtaatgagtttgagtgggaagatgatcttccaaaacccaagactactgaagtaattaggaaaggctcaattactgaatacacagcagcagaggaaaaagaagatggacgacgctggcgtatgttcaggattggagaacaggaccacagggttgatatgaaggcaattgaaccctataagtttgctgtctgtttcatgcctgaaagtagtcagcctaactatagatacctgatggacaatctttttaaatatgttattggcactttggagctattagtagcagaaaactacatgatagtttatttaaatggtgcaacaactcgaagaaaaatgcccagtctgggatggctcaggaaatgttatcagcaaattgatagaaggttacggaaaaatctaaaatccctaatcattgtacatccttcttggtttatcagaacacttctggctgttacaagaccatttattagctcgaaattcagccaaaaaattagatacgtgtttaatttggcagaactagcagaacttgtccccatggaatacgttggcataccagaatgcataaaacagtatgaagaagaaaagtttaaaaagaaacaaaaaagagttgatcaagaacttaatggaaaacaagatgaaccgaaaaatgaacagtaagtttggcatctagtccaaacaagactgaagaatgtgctgatggagcagtgctgtttctgcattaagggactgttcactgctgtactggtttgcaaatttcttgaatttagctctttaatagctaactgtattattatcgttttatattttatattgctaaatagagaaccacactttatataaagtagtttttgcatttgtttattgaatgatgcatcttcttcggtgaaatatttatatgcataaatggcaaaggaaagaaataatatatatttttatgtcattgagcaatattttttaatgtgtacctgtcttatggaagaaatatgcaggtatataagaccacgattttctaaagtgcatattagaatttttgtttttgtaaatggttaaatacatttcctgggtaacttaggaaattaagtttttcataaggcaacagatggttaaactgattgtcatgaatacccaaagatcatgtatataatcgaagtgtattagtaccatcccaaggtttttttctcatttaacatatttgtttcataattcagcaagtacagatgcaagcgcattgcacactttttcctttctaaacttaaagacaagtcaaaaagccattcttagaactagaggatttaagagggtaggaattagggtttgtatatatgtatatatgggacattttatcttctggcccaaagtcagaactttataaaaatcttgagtttgttcactaatgtgaaataagctatgtgtccagggtattgctcccctgagtgtatatgagtgctgagtagtattgcagagaatgtgatgagttattcactgtcacaactttttctatagaaaacaggggctgctttttaaactctcactatgggcactttaccaaaatacttccatatcaattatttgaactcggtagttgtttgacctagttagatgtggtgtttattcaagtttgtatgaaatcatgtttgacaatactgtaaattaggttaattttgtaagtcttagcatcatcatattgtgctgttttggataacacgtttgttacaagcatttaaactgtttcatttggtagtacctttacattgaaataaattgtgtttgtgcctccaaacaaaaagtttaattaccgacaaaattatttctaaaacaacagattgatctgatattgtgtcatatacttgaaaggctcatacacagctggtaagcataataccttccaaatttgaaggtcatggctactcttcaacccttcctgtaaggtattttacaaaacagtggcctagagtagcaaaattgaagtggatgtgagctaacctttcaagatttagtctatcctagattgaacacacatgtggctgtgaccattctcatgtacttacaaaccttctgttacaaaagggaactttcctatattttttgtcctcctcagtcctaaacttggcatgctaacttaaaaccagttataggagagagatgctggaggattcccaggatgaaacattcctcagcagcctcctgacttaactcagatccagcagctcttggcagatcctgaactaatgtcattacagtgaattgagccaaaacgattattgcttgctcacattttaggaacactttttgttgaagaagcaaactaacaataacaagttaggcattccttctgaatttaccatataaggattatgtataaacaattatattgaatttgtcattagattctatatttgtagacgatttaacgtagtctttcatctgtacatctttatcttgttcaaaatgggctgaggtttttaataggtggttttctaccacattaagtacttggttcttcattttaaaaaatatgaagaataacttcaactcttttttgcattattttgatttttgattttgcagtcattgctcctaactgtagatacatgttgcaaaagtgatgtttttctgaattttttttaaaagtagaagactattctgttaaacattaaaattcagagacaacagtgataacacctgggatataatgaaaatgaggtgctgtgaatcagtaaactaaagggatacctgctttaacctgcaccttaatggaatctggtatagagatgtacccacaataaatgttttataagatttaagatcataatagtaggttagaggaagagcatttattaagtctgttgtttctaatctatagctaagttaacatctcccatattattccattttaatttcccattactgaccaaggtgaaagtatatgtgactgtacttttatctttctgttgggatcatggatctaatttaactggcttaatttgatgcttctgtcactaggctctaagtgccccttttttagtcagaagtttttcatgtgaaataatttgattctgtgttctgcttgatcatactcctaagcaagcaccaagggaagacgttctattcaccccacaatttaagcttaacaatctttaactcagagggagatatgaagaaatatgattctaagtagggtctagcagaggcattggaaagtgataaaagtaggaagtaagagaaagcaaacctttataaagagataaagacatagttgttacctaagatgccactgtatgtgtgccctctctttttttttttttttttttggagacagagactcactctgtcacccattctggagtgcagtggcgcaatcctggctcactgcaacctctgcctcccgggttcaagcatttctcctgcctcagcctcctgagtagctgggattacaggcacacgccacaatgcccggctaatttttgtatttttagtagagacggggtttcgccatgctaggctggtctcgaactc

SEQ ID NO: 735182 - DNA, 3661 bp, Homo sapiens
  misc_feature (3248)..(3248): n is a, c, g, or t
attacaagcgtaaaccaccgcgcccgacctcctccccttatttcatccattttataattcacattattgatcgctgataattgcacctattgtaatgatactgataattgcacctgttgtaataatattgatattgataattgcacctattgtattacaatattattattgatatcgataatttcacctactgtaatgatcaataaaggcaggcagaaagaaaacaaaagtaactgaaactaccaggcagcgtccctgcgaacagcaaagagggaagaaacgccttgaggcgtagtaacgccaccaataaggagtcgacgcgacgggtccgcccacaggcaaggaaggccgaccccgcgagtgcaggcgcgagcgctagcccgtgacgtctgagggggttggggggatgctgtgtgggtttcaagaagacgccacgcctccgccgccgccacgcccccgccgcctccaccgccggctgccgcgcccggaggaggtcgggatgttatcacttccgccggggcttctcactgtgtccgggtcagctgctgccgccgacgccgtaccgctgcggccgggggattgggccggggtctccaccgccgaccgaggggagcgggctccgctcggccctgctttttgcgacctggccgtcagccccacgtcgccggcctggaggggcgaagaggacgagggggccaaggcttcctccggggacattggctccctggattatcaagagtttgtagttgacattgaatccaggctgaggatggaaggtgtggaacttaaagaagaatggcaagatgaagattttccgatacctttaccagaagatgatagtattgaagcagatatactagctataactggaccagaggaccagcctggctcactagaagttaatggaaataaagtgagaaagaaactaatggctccagacattagcctgacactggatcctagtgatggctctgtattgtcagatgatttggatgaaagtggggagattgacttagatggcttagacacaccgtcagagaatagtaatgagtttgagtgggaagatgatcttccaaaacccaagactactgaagtaattaggaaaggctcaattactgaatacacagcagcagaggaaaaagaagatggacgacgctggcgtatgttcaggattggagaacaggaccacagggttgatatgaaggcaattgaaccctataagtttgctgtctgtttcatgcctgaaagtagtcagcctaactatagatacctgatggacaatctttttaaatatgttattggcactttggagctattagtagcagaaaactacatgatagtttatttaaatggtgcaacaactcgaagaaaaatgcccagtctgggatggctcaggaaatgttatcagcaaattgatagaaggttacggaaaaatctaaaatccctaatcattgtacatccttcttggtttatcagaacacttctggctgttacaagaccatttattagctcgaaattcagccaaaaaattagatacgtgtttaatttggcagaactagcagaacttgtccccatggaatacgttggcataccagaatgcataaaacagtatgaagaagaaaagtttaaaaagaaacaaaaaagagttgatcaagaacttaatggaaaacaagatgaaccgaaaaatgaacagtaagtttggcatctagtccaaacaagactgaagaatgtgctgatggagcagtgctgtttctgcattaagggactgttcactgctgtactggtttgcaaatttcttgaatttagctctttaatagctaactgtattattatcgttttatattttatattgctaaatagagaaccacactttatataaagtagtttttgcatttgtttattgaatgatgcatcttcttcggtgaaatatttatatgcataaatggcaaaggaaagaaataatatatatttttatgtcattgagcaatattttttaatgtgtacctgtcttatggaagaaatatgcaggtatataagaccacgattttctaaagtgcatattagaatttttgtttttgtaaatggttaaatacatttcctgggtaacttaggaaattaagtttttcataaggcaacagatggttaaactgattgtcatgaatacccaaagatcatgtatataatcgaagtgtattagtaccatcccaaggtttttttctcatttaacatatttgtttcataattcagcaagtacagatgcaagcgcattgcacactttttcctttctaaacttaaagacaagtcaaaaagccattcttagaactagaggatttaagagggtaggaattagggtttgtatatatgtatatatgggacattttatcttctggcccaaagtcagaactttataaaaatcttgagtttgttcactaatgtgaaataagctatgtgtccagggtattgctcccctgagtgtatatgagtgctgagtagtattgcagagaatgtgatgagttattcactgtcacaactttttctatagaaaacaggggctgctttttaaactctcactatgggcactttaccaaaatacttccatatcaattatttgaactcggtagttgtttgacctagttagatgtggtgtttattcaagtttgtatgaaatcatgtttgacaatactgtaaattaggttaattttgtaagtcttagcatcatcatattgtgctgttttggataacacgtttgttacaagcatttaaactgtttcatttggtagtacctttacattgaaataaattgtgtttgtgcctccaaacaaaaaaaaaaaaaaaaaaaaaaaaaaaaaaaaaaaaaccgcggggcgctttttttgtggggggcggcgaaaaagagggcgttattgtgaggtgggcgcccgtgtggtccttcgcgtgtgtttcccttggccccatttttttgtgtccagcggtgggtaataacttcgtgcgcgggctccccctattttgtgggaggcgctcgatattaattttgccgatttagcgccccggtgttctcccccctgcttattattagtatcttcccgtcttacctccccccggggcattactacttctccccccgtccctgctagcacggcgcgcattatctctgtgtgtatccccaacgagaacttcttttcagcaataaccccttttcattctctctggcggacgatcaaatcctctgcgttgcgtcgtcggcccanagcacaacacagccccgccggcttttaccggcgcggtgtggtgtttttggtattgccgggacacacactcacgtctgcccaccacctattttatctcgcgaggaggtactctgttgtttcttcgaactcgactcgcgatgtttatccatactctccgtggtctctctcttgttgttaccccgggtatttacgtcgccccaccattttagacacactttctttgtagccccgcgttatatattactatcgagctctggattatctagtggtcccaccagtggtgacttccgcccagtcgcataactcgtttcttcaccggcgtcgccactaacacgatgcctagtgcggaacagcgccagcgctggacaacggggcttctaccttcccccttttcatctactattacgcgtgta

SEQ ID NO: 735183 - DNA, 4329 bp, Homo sapiens
attacaagcgtaaaccaccgcgcccgacctcctccccttatttcatccattttataattcacattattgatcgctgataattgcacctattgtaatgatactgataattgcacctgttgtaataatattgatattgataattgcacctattgtattacaatattattattgatatcgataatttcacctactgtaatgatcaataaaggcaggcagaaagaaaacaaaagtaactgaaactaccaggcagcgtccctgcgaacagcaaagagggaagaaacgccttgaggcgtagtaacgccaccaataaggagtcgacgcgacgggtccgcccacaggcaaggaaggccgaccccgcgagtgcaggcgcgagcgctagcccgtgacgtctgagggggttggggggatgctgtgtgggtttcaagaagacgccacgcctccgccgccgccacgcccccgccgcctccaccgccggctgccgcgcccggaggaggtcgggatgttatcacttccgccggggcttctcactgtgtccgggtcagctgctgccgccgacgccgtaccgctgcggccgggggattgggccggggtctccaccgccgaccgaggggagcgggctccgctcggccctgctttttgcgacctggccgtcagccccacgtcgccggcctggaggggcgaagaggacgagggggccaaggcttcctccggggacattggctccctggattatcaagagtttgtagttgacattgaatccaggctgaggatggaaggtgtggaacttaaagaagaatggcaagatgaagattttccgatacctttaccagaagatgatagtattgaagcagatatactagctataactggaccagaggaccagcctggctcactagaagttaatggaaataaagtgagaaagaaactaatggctccagacattagcctgacactggatcctagtgatggctctgtattgtcagatgatttggatgaaagtggggagattgacttagatggcttagacacaccgtcagagaatagtaatgagtttgagtgggaagatgatcttccaaaacccaagactactgaagtaattaggaaaggctcaattactgaatacacagcagcagaggaaaaagaagatggacgacgctggcgtatgttcaggattggagaacaggaccacagggttgatatgaaggcaattgaaccctataagtttgctgtctgtttcatgcctgaaagtagtcagcctaactatagatacctgatggacaatctttttaaatatgttattggcactttggagctattagtagcagaaaactacatgatagtttatttaaatggtgcaacaactcgaagaaaaatgcccagtctgggatggctcaggaaatgttatcagcaaattgatagaaggttacggaaaaatctaaaatccctaatcattgtacatccttcttggtttatcagaacacttctggctgttacaagaccatttattagctcgaaattcagccaaaaaattagatacgtgtttaatttggcagaactagcagaacttgtccccatggaatacgttggcataccagaatgcataaaacagtatgaagaagaaaagtttaaaaagaaacaaaaaagagttgatcaagaacttaatggaaaacaagatgaaccgaaaaatgaacagtaagtttggcatctagtccaaacaagactgaagaatgtgctgatggagcagtgctgtttctgcattaagggactgttcactgctgtactggtttgcaaatttcttgaatttagctctttaatagctaactgtattattatcgtttaatttttgtttttgtaaatggttaaatacatttcctgggtaacttaggaaattaagtttttcataaggcaacagatggttaaactgattgtcatgaatacccaaagatcatgtatataatcgaagtgtattagtaccatcccaaggtttttttctcatttaacatatttgtttcataattcagcaagtacagatgcaagcgcattgcacactttttcctttctaaacttaaagacaagtcaaaaagccattcttagaactagaggatttaagagggtaggaattagggtttgtatatatgtatatatgggacattttatcttctggcccaaagtcagaactttataaaaatcttgagtttgttcactaatgtgaaataagctatgtgtccagggtattgctcccctgagtgtatatgagtgctgagtagtattgcagagaatgtgatgagttattcactgtcacaactttttctatagaaaacaggggctgctttttaaactctcactatgggcactttaccaaaatacttccatatcaattatttgaactcggtagttgtttgacctagttagatgtggtgtttattcaagtttgtatgaaatcatgtttgacaatactgtaaattaggttaattttgtaagtcttagcatcatcatattgtgctgttttggataacacgtttgttacaagcatttaaactgtttcatttggtagtacctttacattgaaataaattgtgtttgtgcctccaaacaaaaagtttaattaccgacaaaattatttctaaaacaacagattgatctgatattgtgtcatatacttgaaaggctcatacacagctggtaagcataataccttccaaatttgaaggtcatggctactcttcaacccttcctgtaaggtattttacaaaacagtggcctagagtagcaaaattgaagtggatgtgagctaacctttcaagatttagtctatcctagattgaacacacatgtggctgtgaccattctcatgtacttacaaaccttctgttacaaaagggaactttcctatattttttgtcctcctcagtcctaaacttggcatgctaacttaaaaccagttataggagagagatgctggaggattcccaggatgaaacattcctcagcagcctcctgacttaactcagatccagcagctcttggcagatcctgaactaatgtcattacagtgaattgagccaaaacgattattgcttgctcacattttaggaacactttttgttgaagaagcaaactaacaataacaagttaggcattccttctgaatttaccatataaggattatgtataaacaattatattgaatttgtcattagattctatatttgtagacgatttaacgtagtctttcatctgtacatctttatcttgttcaaaatgggctgaggtttttaataggtggttttctaccacattaagtacttggttcttcattttaaaaaatatgaagaataacttcaactcttttttgcattattttgatttttgattttgcagtcattgctcctaactgtagatacatgttgcaaaagtgatgtttttctgaattttttttaaaagtagaagactattctgttaaacattaaaattcagagacaacagtgataacacctgggatataatgaaaatgaggtgctgtgaatcagtaaactaaagggatacctgctttaacctgcaccttaatggaatctggtatagagatgtacccacaataaatgttttataagatttaagatcataatagtaggttagaggaagagcatttattaagtctgttgtttctaatctatagctaagttaacatctcccatattattccattttaatttcccattactgaccaaggtgaaagtatatgtgactgtacttttatctttctgttgggatcatggatctaatttaactggcttaatttgatgcttctgtcactaggctctaagtgccccttttttagtcagaagtttttcatgtgaaataatttgattctgtgttctgcttgatcatactcctaagcaagcaccaagggaagacgttctattcaccccacaatttaagcttaacaatctttaactcagagggagatatgaagaaatatgattctaagtagggtctagcagaggcattggaaagtgataaaagtaggaagtaagagaaagcaaacctttataaagagataaagacatagttgttacctaagatgccactgtatgtgtgccctctctttttttttttttttttttggagacagagactcactctgtcacccattctggagtgcagtggcgcaatcctggctcactgcaacctctgcctcccgggttcaagcatttctcctgcctcagcctcctgagtagctgggattacaggcacacgccacaatgcccggctaatttttgtatttttagtagagacggggtttcgccatgctaggctggtctcgaactc

SEQ ID NO: 735184 - DNA, 3435 bp, Homo sapiens
  misc_feature (3022)..(3022): n is a, c, g, or t
attacaagcgtaaaccaccgcgcccgacctcctccccttatttcatccattttataattcacattattgatcgctgataattgcacctattgtaatgatactgataattgcacctgttgtaataatattgatattgataattgcacctattgtattacaatattattattgatatcgataatttcacctactgtaatgatcaataaaggcaggcagaaagaaaacaaaagtaactgaaactaccaggcagcgtccctgcgaacagcaaagagggaagaaacgccttgaggcgtagtaacgccaccaataaggagtcgacgcgacgggtccgcccacaggcaaggaaggccgaccccgcgagtgcaggcgcgagcgctagcccgtgacgtctgagggggttggggggatgctgtgtgggtttcaagaagacgccacgcctccgccgccgccacgcccccgccgcctccaccgccggctgccgcgcccggaggaggtcgggatgttatcacttccgccggggcttctcactgtgtccgggtcagctgctgccgccgacgccgtaccgctgcggccgggggattgggccggggtctccaccgccgaccgaggggagcgggctccgctcggccctgctttttgcgacctggccgtcagccccacgtcgccggcctggaggggcgaagaggacgagggggccaaggcttcctccggggacattggctccctggattatcaagagtttgtagttgacattgaatccaggctgaggatggaaggtgtggaacttaaagaagaatggcaagatgaagattttccgatacctttaccagaagatgatagtattgaagcagatatactagctataactggaccagaggaccagcctggctcactagaagttaatggaaataaagtgagaaagaaactaatggctccagacattagcctgacactggatcctagtgatggctctgtattgtcagatgatttggatgaaagtggggagattgacttagatggcttagacacaccgtcagagaatagtaatgagtttgagtgggaagatgatcttccaaaacccaagactactgaagtaattaggaaaggctcaattactgaatacacagcagcagaggaaaaagaagatggacgacgctggcgtatgttcaggattggagaacaggaccacagggttgatatgaaggcaattgaaccctataagtttgctgtctgtttcatgcctgaaagtagtcagcctaactatagatacctgatggacaatctttttaaatatgttattggcactttggagctattagtagcagaaaactacatgatagtttatttaaatggtgcaacaactcgaagaaaaatgcccagtctgggatggctcaggaaatgttatcagcaaattgatagaaggttacggaaaaatctaaaatccctaatcattgtacatccttcttggtttatcagaacacttctggctgttacaagaccatttattagctcgaaattcagccaaaaaattagatacgtgtttaatttggcagaactagcagaacttgtccccatggaatacgttggcataccagaatgcataaaacagtatgaagaagaaaagtttaaaaagaaacaaaaaagagttgatcaagaacttaatggaaaacaagatgaaccgaaaaatgaacagtaagtttggcatctagtccaaacaagactgaagaatgtgctgatggagcagtgctgtttctgcattaagggactgttcactgctgtactggtttgcaaatttcttgaatttagctctttaatagctaactgtattattatcgtttaatttttgtttttgtaaatggttaaatacatttcctgggtaacttaggaaattaagtttttcataaggcaacagatggttaaactgattgtcatgaatacccaaagatcatgtatataatcgaagtgtattagtaccatcccaaggtttttttctcatttaacatatttgtttcataattcagcaagtacagatgcaagcgcattgcacactttttcctttctaaacttaaagacaagtcaaaaagccattcttagaactagaggatttaagagggtaggaattagggtttgtatatatgtatatatgggacattttatcttctggcccaaagtcagaactttataaaaatcttgagtttgttcactaatgtgaaataagctatgtgtccagggtattgctcccctgagtgtatatgagtgctgagtagtattgcagagaatgtgatgagttattcactgtcacaactttttctatagaaaacaggggctgctttttaaactctcactatgggcactttaccaaaatacttccatatcaattatttgaactcggtagttgtttgacctagttagatgtggtgtttattcaagtttgtatgaaatcatgtttgacaatactgtaaattaggttaattttgtaagtcttagcatcatcatattgtgctgttttggataacacgtttgttacaagcatttaaactgtttcatttggtagtacctttacattgaaataaattgtgtttgtgcctccaaacaaaaaaaaaaaaaaaaaaaaaaaaaaaaaaaaaaaaaccgcggggcgctttttttgtggggggcggcgaaaaagagggcgttattgtgaggtgggcgcccgtgtggtccttcgcgtgtgtttcccttggccccatttttttgtgtccagcggtgggtaataacttcgtgcgcgggctccccctattttgtgggaggcgctcgatattaattttgccgatttagcgccccggtgttctcccccctgcttattattagtatcttcccgtcttacctccccccggggcattactacttctccccccgtccctgctagcacggcgcgcattatctctgtgtgtatccccaacgagaacttcttttcagcaataaccccttttcattctctctggcggacgatcaaatcctctgcgttgcgtcgtcggcccanagcacaacacagccccgccggcttttaccggcgcggtgtggtgtttttggtattgccgggacacacactcacgtctgcccaccacctattttatctcgcgaggaggtactctgttgtttcttcgaactcgactcgcgatgtttatccatactctccgtggtctctctcttgttgttaccccgggtatttacgtcgccccaccattttagacacactttctttgtagccccgcgttatatattactatcgagctctggattatctagtggtcccaccagtggtgacttccgcccagtcgcataactcgtttcttcaccggcgtcgccactaacacgatgcctagtgcggaacagcgccagcgctggacaacggggcttctaccttcccccttttcatctactattacgcgtgta

SEQ ID NO: 735185 - DNA, 5439 bp, Homo sapiens
attacaagcgtaaaccaccgcgcccgacctcctccccttatttcatccattttataattcacattattgatcgctgataattgcacctattgtaatgatactgataattgcacctgttgtaataatattgatattgataattgcacctattgtattacaatattattattgatatcgataatttcacctactgtaatgatcaataaaggcaggcagaaagaaaacaaaagtaactgaaactaccaggcagcgtccctgcgaacagcaaagagggaagaaacgccttgaggcgtagtaacgccaccaataaggagtcgacgcgacgggtccgcccacaggcaaggaaggccgaccccgcgagtgcaggcgcgagcgctagcccgtgacgtctgagggggttggggggatgctgtgtgggtttcaagaagacgccacgcctccgccgccgccacgcccccgccgcctccaccgccggctgccgcgcccggaggaggtcgggatgttatcacttccgccggggcttctcactgtgtccgggtcagctgctgccgccgacgccgtaccgctgcggccgggggattgggccggggtctccaccgccgaccgaggggagcgggctccgctcggccctgctttttgcgacctggccgtcagccccacgtcgccggcctggaggggcgaagaggacgagggggccaaggcttcctccggggacattggctccctggattatcaagagtttgtagttgacattgaatccaggctgaggatggaaggtgtggaacttaaagaagaatggcaagatgaagattttccgatacctttaccagaagatgatagtattgaagcagatatactagctataactggaccagaggaccagcctggctcactagaagttaatggaaataaagtgagaaagaaactaatggctccagacattagcctgacactggatcctagtgatggctctgtattgtcagatgatttggatgaaagtggggagattgacttagatggcttagacacaccgtcagagaatagtaatgagtttgagtgggaagtcatttcctggaaggatattttccgttaacagctttgtcttggaaacaactaacatgcagtaggtttccccctccccccatcttttggtaaggactataatactgaaattttgaaaattattactacattgaaaatcagctaaactgcaatctcaaaacataaattacacttaatcattggtgcttatgctttggctaatgctaatttaaatagacttctgcatgtatacttcaaagtattataaatacatttctgctttataaactgatcaaatgagaagtgatcattgagtagttaaccacttcctatctggtattacagttaatttatgtgctcaacaacaacaaaattggctcccagatagctacttgaagtaacctatagtcataactgccagggagaatattgtcacaagttgaatctggaaaggcattgtaaggccagtgtactaagattttgatgactctacaaattatattttctgaacttgtggatacacgtttcactatgattaggtggtttttgctaaattgggcaataaaagttaaagaaccatgatttccaaagacataaaacagcctcatgttaagaataagccttttcctcctttatggaagagagattgaaaattgtgcagatggtataatgaaaattctctgtaaaatctaggtagtaaagtggttaacgtataatttgatttttgttgtgtaacaatttgtgattcaaaaactttgtattttgacagatgatcttccaaaacccaagactactgaagtaattaggaaaggctcaattactgaatacacagcagcagaggaaaaagaagatggacgacgctggcgtatgttcaggattggagaacaggaccacagggttgatatgaaggcaattgaaccctataaaaaagttatcagccatgggggatattatggggatggattaaatgccattgttgtgtttgctgtctgtttcatgcctgaaagtagtcagcctaactatagatacctgatggacaatctttttaaatatgttattggcactttggagctattagtagcagaaaactacatgatagtttatttaaatggtgcaacaactcgaagaaaaatgcccagtctgggatggctcaggaaatgttatcagcaaattgatagaaggttacggaaaaatctaaaatccctaatcattgtacatccttcttggtttatcagaacacttctggctgttacaagaccatttattagctcgaaattcagccaaaaaattagatacgtgtttaatttggcagaactagcagaacttgtccccatggaatacgttggcataccagaatgcataaaacagtatgaagaagaaaagtttaaaaagaaacaaaaaagagttgatcaagaacttaatggaaaacaagatgaaccgaaaaatgaacagtaagtttggcatctagtccaaacaagactgaagaatgtgctgatggagcagtgctgtttctgcattcataatgcatttattggcccatatttttatgtaacctgttacaaaatagacttgactttttcataatggacttttgtattatacaagggactgttcactgctgtactggtttgcaaatttcttgaatttagctctttaatagctaactgtattattatcgttttatattttatattgctaaatagagaaccacactttatataaagtagtttttgcatttgtttattgaatgatgcatcttcttcggtgaaatatttatatgcataaatggcaaaggaaagaaataatatatatttttatgtcattgagcaatattttttaatgtgtacctgtcttatggaagaaatatgcaggtatataagaccacgattttctaaagtgcatattagaatttttgtttttgtaaatggttaaatacatttcctgggtaacttaggaaattaagtttttcataaggcaacagatggttaaactgattgtcatgaatacccaaagatcatgtatataatcgaagtgtattagtaccatcccaaggtttttttctcatttaacatatttgtttcataattcagcaagtacagatgcaagcgcattgcacactttttcctttctaaacttaaagacaagtcaaaaagccattcttagaactagaggatttaagagggtaggaattagggtttgtatatatgtatatatgggacattttatcttctggcccaaagtcagaactttataaaaatcttgagtttgttcactaatgtgaaataagctatgtgtccagggtattgctcccctgagtgtatatgagtgctgagtagtattgcagagaatgtgatgagttattcactgtcacaactttttctatagaaaacaggggctgctttttaaactctcactatgggcactttaccaaaatacttccatatcaattatttgaactcggtagttgtttgacctagttagatgtggtgtttattcaagtttgtatgaaatcatgtttgacaatactgtaaattaggttaattttgtaagtcttagcatcatcatattgtgctgttttggataacacgtttgttacaagcatttaaactgtttcatttggtagtacctttacattgaaataaattgtgtttgtgcctccaaacaaaaagtttaattaccgacaaaattatttctaaaacaacagattgatctgatattgtgtcatatacttgaaaggctcatacacagctggtaagcataataccttccaaatttgaaggtcatggctactcttcaacccttcctgtaaggtattttacaaaacagtggcctagagtagcaaaattgaagtggatgtgagctaacctttcaagatttagtctatcctagattgaacacacatgtggctgtgaccattctcatgtacttacaaaccttctgttacaaaagggaactttcctatattttttgtcctcctcagtcctaaacttggcatgctaacttaaaaccagttataggagagagatgctggaggattcccaggatgaaacattcctcagcagcctcctgacttaactcagatccagcagctcttggcagatcctgaactaatgtcattacagtgaattgagccaaaacgattattgcttgctcacattttaggaacactttttgttgaagaagcaaactaacaataacaagttaggcattccttctgaatttaccatataaggattatgtataaacaattatattgaatttgtcattagattctatatttgtagacgatttaacgtagtctttcatctgtacatctttatcttgttcaaaatgggctgaggtttttaataggtggttttctaccacattaagtacttggttcttcattttaaaaaatatgaagaataacttcaactcttttttgcattattttgatttttgattttgcagtcattgctcctaactgtagatacatgttgcaaaagtgatgtttttctgaattttttttaaaagtagaagactattctgttaaacattaaaattcagagacaacagtgataacacctgggatataatgaaaatgaggtgctgtgaatcagtaaactaaagggatacctgctttaacctgcaccttaatggaatctggtatagagatgtacccacaataaatgttttataagatttaagatcataatagtaggttagaggaagagcatttattaagtctgttgtttctaatctatagctaagttaacatctcccatattattccattttaatttcccattactgaccaaggtgaaagtatatgtgactgtacttttatctttctgttgggatcatggatctaatttaactggcttaatttgatgcttctgtcactaggctctaagtgccccttttttagtcagaagtttttcatgtgaaataatttgattctgtgttctgcttgatcatactcctaagcaagcaccaagggaagacgttctattcaccccacaatttaagcttaacaatctttaactcagagggagatatgaagaaatatgattctaagtagggtctagcagaggcattggaaagtgataaaagtaggaagtaagagaaagcaaacctttataaagagataaagacatagttgttacctaagatgccactgtatgtgtgccctctctttttttttttttttttttggagacagagactcactctgtcacccattctggagtgcagtggcgcaatcctggctcactgcaacctctgcctcccgggttcaagcatttctcctgcctcagcctcctgagtagctgggattacaggcacacgccacaatgcccggctaatttttgtatttttagtagagacggggtttcgccatgctaggctggtctcgaactc

SEQ ID NO: 735186 - DNA, 4545 bp, Homo sapiens
  misc_feature (4132)..(4132): n is a, c, g, or t
attacaagcgtaaaccaccgcgcccgacctcctccccttatttcatccattttataattcacattattgatcgctgataattgcacctattgtaatgatactgataattgcacctgttgtaataatattgatattgataattgcacctattgtattacaatattattattgatatcgataatttcacctactgtaatgatcaataaaggcaggcagaaagaaaacaaaagtaactgaaactaccaggcagcgtccctgcgaacagcaaagagggaagaaacgccttgaggcgtagtaacgccaccaataaggagtcgacgcgacgggtccgcccacaggcaaggaaggccgaccccgcgagtgcaggcgcgagcgctagcccgtgacgtctgagggggttggggggatgctgtgtgggtttcaagaagacgccacgcctccgccgccgccacgcccccgccgcctccaccgccggctgccgcgcccggaggaggtcgggatgttatcacttccgccggggcttctcactgtgtccgggtcagctgctgccgccgacgccgtaccgctgcggccgggggattgggccggggtctccaccgccgaccgaggggagcgggctccgctcggccctgctttttgcgacctggccgtcagccccacgtcgccggcctggaggggcgaagaggacgagggggccaaggcttcctccggggacattggctccctggattatcaagagtttgtagttgacattgaatccaggctgaggatggaaggtgtggaacttaaagaagaatggcaagatgaagattttccgatacctttaccagaagatgatagtattgaagcagatatactagctataactggaccagaggaccagcctggctcactagaagttaatggaaataaagtgagaaagaaactaatggctccagacattagcctgacactggatcctagtgatggctctgtattgtcagatgatttggatgaaagtggggagattgacttagatggcttagacacaccgtcagagaatagtaatgagtttgagtgggaagtcatttcctggaaggatattttccgttaacagctttgtcttggaaacaactaacatgcagtaggtttccccctccccccatcttttggtaaggactataatactgaaattttgaaaattattactacattgaaaatcagctaaactgcaatctcaaaacataaattacacttaatcattggtgcttatgctttggctaatgctaatttaaatagacttctgcatgtatacttcaaagtattataaatacatttctgctttataaactgatcaaatgagaagtgatcattgagtagttaaccacttcctatctggtattacagttaatttatgtgctcaacaacaacaaaattggctcccagatagctacttgaagtaacctatagtcataactgccagggagaatattgtcacaagttgaatctggaaaggcattgtaaggccagtgtactaagattttgatgactctacaaattatattttctgaacttgtggatacacgtttcactatgattaggtggtttttgctaaattgggcaataaaagttaaagaaccatgatttccaaagacataaaacagcctcatgttaagaataagccttttcctcctttatggaagagagattgaaaattgtgcagatggtataatgaaaattctctgtaaaatctaggtagtaaagtggttaacgtataatttgatttttgttgtgtaacaatttgtgattcaaaaactttgtattttgacagatgatcttccaaaacccaagactactgaagtaattaggaaaggctcaattactgaatacacagcagcagaggaaaaagaagatggacgacgctggcgtatgttcaggattggagaacaggaccacagggttgatatgaaggcaattgaaccctataaaaaagttatcagccatgggggatattatggggatggattaaatgccattgttgtgtttgctgtctgtttcatgcctgaaagtagtcagcctaactatagatacctgatggacaatctttttaaatatgttattggcactttggagctattagtagcagaaaactacatgatagtttatttaaatggtgcaacaactcgaagaaaaatgcccagtctgggatggctcaggaaatgttatcagcaaattgatagaaggttacggaaaaatctaaaatccctaatcattgtacatccttcttggtttatcagaacacttctggctgttacaagaccatttattagctcgaaattcagccaaaaaattagatacgtgtttaatttggcagaactagcagaacttgtccccatggaatacgttggcataccagaatgcataaaacagtatgaagaagaaaagtttaaaaagaaacaaaaaagagttgatcaagaacttaatggaaaacaagatgaaccgaaaaatgaacagtaagtttggcatctagtccaaacaagactgaagaatgtgctgatggagcagtgctgtttctgcattcataatgcatttattggcccatatttttatgtaacctgttacaaaatagacttgactttttcataatggacttttgtattatacaagggactgttcactgctgtactggtttgcaaatttcttgaatttagctctttaatagctaactgtattattatcgttttatattttatattgctaaatagagaaccacactttatataaagtagtttttgcatttgtttattgaatgatgcatcttcttcggtgaaatatttatatgcataaatggcaaaggaaagaaataatatatatttttatgtcattgagcaatattttttaatgtgtacctgtcttatggaagaaatatgcaggtatataagaccacgattttctaaagtgcatattagaatttttgtttttgtaaatggttaaatacatttcctgggtaacttaggaaattaagtttttcataaggcaacagatggttaaactgattgtcatgaatacccaaagatcatgtatataatcgaagtgtattagtaccatcccaaggtttttttctcatttaacatatttgtttcataattcagcaagtacagatgcaagcgcattgcacactttttcctttctaaacttaaagacaagtcaaaaagccattcttagaactagaggatttaagagggtaggaattagggtttgtatatatgtatatatgggacattttatcttctggcccaaagtcagaactttataaaaatcttgagtttgttcactaatgtgaaataagctatgtgtccagggtattgctcccctgagtgtatatgagtgctgagtagtattgcagagaatgtgatgagttattcactgtcacaactttttctatagaaaacaggggctgctttttaaactctcactatgggcactttaccaaaatacttccatatcaattatttgaactcggtagttgtttgacctagttagatgtggtgtttattcaagtttgtatgaaatcatgtttgacaatactgtaaattaggttaattttgtaagtcttagcatcatcatattgtgctgttttggataacacgtttgttacaagcatttaaactgtttcatttggtagtacctttacattgaaataaattgtgtttgtgcctccaaacaaaaaaaaaaaaaaaaaaaaaaaaaaaaaaaaaaaaaccgcggggcgctttttttgtggggggcggcgaaaaagagggcgttattgtgaggtgggcgcccgtgtggtccttcgcgtgtgtttcccttggccccatttttttgtgtccagcggtgggtaataacttcgtgcgcgggctccccctattttgtgggaggcgctcgatattaattttgccgatttagcgccccggtgttctcccccctgcttattattagtatcttcccgtcttacctccccccggggcattactacttctccccccgtccctgctagcacggcgcgcattatctctgtgtgtatccccaacgagaacttcttttcagcaataaccccttttcattctctctggcggacgatcaaatcctctgcgttgcgtcgtcggcccanagcacaacacagccccgccggcttttaccggcgcggtgtggtgtttttggtattgccgggacacacactcacgtctgcccaccacctattttatctcgcgaggaggtactctgttgtttcttcgaactcgactcgcgatgtttatccatactctccgtggtctctctcttgttgttaccccgggtatttacgtcgccccaccattttagacacactttctttgtagccccgcgttatatattactatcgagctctggattatctagtggtcccaccagtggtgacttccgcccagtcgcataactcgtttcttcaccggcgtcgccactaacacgatgcctagtgcggaacagcgccagcgctggacaacggggcttctaccttcccccttttcatctactattacgcgtgta

SEQ ID NO: 735187 - DNA, 5213 bp, Homo sapiens
attacaagcgtaaaccaccgcgcccgacctcctccccttatttcatccattttataattcacattattgatcgctgataattgcacctattgtaatgatactgataattgcacctgttgtaataatattgatattgataattgcacctattgtattacaatattattattgatatcgataatttcacctactgtaatgatcaataaaggcaggcagaaagaaaacaaaagtaactgaaactaccaggcagcgtccctgcgaacagcaaagagggaagaaacgccttgaggcgtagtaacgccaccaataaggagtcgacgcgacgggtccgcccacaggcaaggaaggccgaccccgcgagtgcaggcgcgagcgctagcccgtgacgtctgagggggttggggggatgctgtgtgggtttcaagaagacgccacgcctccgccgccgccacgcccccgccgcctccaccgccggctgccgcgcccggaggaggtcgggatgttatcacttccgccggggcttctcactgtgtccgggtcagctgctgccgccgacgccgtaccgctgcggccgggggattgggccggggtctccaccgccgaccgaggggagcgggctccgctcggccctgctttttgcgacctggccgtcagccccacgtcgccggcctggaggggcgaagaggacgagggggccaaggcttcctccggggacattggctccctggattatcaagagtttgtagttgacattgaatccaggctgaggatggaaggtgtggaacttaaagaagaatggcaagatgaagattttccgatacctttaccagaagatgatagtattgaagcagatatactagctataactggaccagaggaccagcctggctcactagaagttaatggaaataaagtgagaaagaaactaatggctccagacattagcctgacactggatcctagtgatggctctgtattgtcagatgatttggatgaaagtggggagattgacttagatggcttagacacaccgtcagagaatagtaatgagtttgagtgggaagtcatttcctggaaggatattttccgttaacagctttgtcttggaaacaactaacatgcagtaggtttccccctccccccatcttttggtaaggactataatactgaaattttgaaaattattactacattgaaaatcagctaaactgcaatctcaaaacataaattacacttaatcattggtgcttatgctttggctaatgctaatttaaatagacttctgcatgtatacttcaaagtattataaatacatttctgctttataaactgatcaaatgagaagtgatcattgagtagttaaccacttcctatctggtattacagttaatttatgtgctcaacaacaacaaaattggctcccagatagctacttgaagtaacctatagtcataactgccagggagaatattgtcacaagttgaatctggaaaggcattgtaaggccagtgtactaagattttgatgactctacaaattatattttctgaacttgtggatacacgtttcactatgattaggtggtttttgctaaattgggcaataaaagttaaagaaccatgatttccaaagacataaaacagcctcatgttaagaataagccttttcctcctttatggaagagagattgaaaattgtgcagatggtataatgaaaattctctgtaaaatctaggtagtaaagtggttaacgtataatttgatttttgttgtgtaacaatttgtgattcaaaaactttgtattttgacagatgatcttccaaaacccaagactactgaagtaattaggaaaggctcaattactgaatacacagcagcagaggaaaaagaagatggacgacgctggcgtatgttcaggattggagaacaggaccacagggttgatatgaaggcaattgaaccctataaaaaagttatcagccatgggggatattatggggatggattaaatgccattgttgtgtttgctgtctgtttcatgcctgaaagtagtcagcctaactatagatacctgatggacaatctttttaaatatgttattggcactttggagctattagtagcagaaaactacatgatagtttatttaaatggtgcaacaactcgaagaaaaatgcccagtctgggatggctcaggaaatgttatcagcaaattgatagaaggttacggaaaaatctaaaatccctaatcattgtacatccttcttggtttatcagaacacttctggctgttacaagaccatttattagctcgaaattcagccaaaaaattagatacgtgtttaatttggcagaactagcagaacttgtccccatggaatacgttggcataccagaatgcataaaacagtatgaagaagaaaagtttaaaaagaaacaaaaaagagttgatcaagaacttaatggaaaacaagatgaaccgaaaaatgaacagtaagtttggcatctagtccaaacaagactgaagaatgtgctgatggagcagtgctgtttctgcattcataatgcatttattggcccatatttttatgtaacctgttacaaaatagacttgactttttcataatggacttttgtattatacaagggactgttcactgctgtactggtttgcaaatttcttgaatttagctctttaatagctaactgtattattatcgtttaatttttgtttttgtaaatggttaaatacatttcctgggtaacttaggaaattaagtttttcataaggcaacagatggttaaactgattgtcatgaatacccaaagatcatgtatataatcgaagtgtattagtaccatcccaaggtttttttctcatttaacatatttgtttcataattcagcaagtacagatgcaagcgcattgcacactttttcctttctaaacttaaagacaagtcaaaaagccattcttagaactagaggatttaagagggtaggaattagggtttgtatatatgtatatatgggacattttatcttctggcccaaagtcagaactttataaaaatcttgagtttgttcactaatgtgaaataagctatgtgtccagggtattgctcccctgagtgtatatgagtgctgagtagtattgcagagaatgtgatgagttattcactgtcacaactttttctatagaaaacaggggctgctttttaaactctcactatgggcactttaccaaaatacttccatatcaattatttgaactcggtagttgtttgacctagttagatgtggtgtttattcaagtttgtatgaaatcatgtttgacaatactgtaaattaggttaattttgtaagtcttagcatcatcatattgtgctgttttggataacacgtttgttacaagcatttaaactgtttcatttggtagtacctttacattgaaataaattgtgtttgtgcctccaaacaaaaagtttaattaccgacaaaattatttctaaaacaacagattgatctgatattgtgtcatatacttgaaaggctcatacacagctggtaagcataataccttccaaatttgaaggtcatggctactcttcaacccttcctgtaaggtattttacaaaacagtggcctagagtagcaaaattgaagtggatgtgagctaacctttcaagatttagtctatcctagattgaacacacatgtggctgtgaccattctcatgtacttacaaaccttctgttacaaaagggaactttcctatattttttgtcctcctcagtcctaaacttggcatgctaacttaaaaccagttataggagagagatgctggaggattcccaggatgaaacattcctcagcagcctcctgacttaactcagatccagcagctcttggcagatcctgaactaatgtcattacagtgaattgagccaaaacgattattgcttgctcacattttaggaacactttttgttgaagaagcaaactaacaataacaagttaggcattccttctgaatttaccatataaggattatgtataaacaattatattgaatttgtcattagattctatatttgtagacgatttaacgtagtctttcatctgtacatctttatcttgttcaaaatgggctgaggtttttaataggtggttttctaccacattaagtacttggttcttcattttaaaaaatatgaagaataacttcaactcttttttgcattattttgatttttgattttgcagtcattgctcctaactgtagatacatgttgcaaaagtgatgtttttctgaattttttttaaaagtagaagactattctgttaaacattaaaattcagagacaacagtgataacacctgggatataatgaaaatgaggtgctgtgaatcagtaaactaaagggatacctgctttaacctgcaccttaatggaatctggtatagagatgtacccacaataaatgttttataagatttaagatcataatagtaggttagaggaagagcatttattaagtctgttgtttctaatctatagctaagttaacatctcccatattattccattttaatttcccattactgaccaaggtgaaagtatatgtgactgtacttttatctttctgttgggatcatggatctaatttaactggcttaatttgatgcttctgtcactaggctctaagtgccccttttttagtcagaagtttttcatgtgaaataatttgattctgtgttctgcttgatcatactcctaagcaagcaccaagggaagacgttctattcaccccacaatttaagcttaacaatctttaactcagagggagatatgaagaaatatgattctaagtagggtctagcagaggcattggaaagtgataaaagtaggaagtaagagaaagcaaacctttataaagagataaagacatagttgttacctaagatgccactgtatgtgtgccctctctttttttttttttttttttggagacagagactcactctgtcacccattctggagtgcagtggcgcaatcctggctcactgcaacctctgcctcccgggttcaagcatttctcctgcctcagcctcctgagtagctgggattacaggcacacgccacaatgcccggctaatttttgtatttttagtagagacggggtttcgccatgctaggctggtctcgaactc

SEQ ID NO: 735188 - DNA, 4319 bp, Homo sapiens
  misc_feature (3906)..(3906): n is a, c, g, or t
attacaagcgtaaaccaccgcgcccgacctcctccccttatttcatccattttataattcacattattgatcgctgataattgcacctattgtaatgatactgataattgcacctgttgtaataatattgatattgataattgcacctattgtattacaatattattattgatatcgataatttcacctactgtaatgatcaataaaggcaggcagaaagaaaacaaaagtaactgaaactaccaggcagcgtccctgcgaacagcaaagagggaagaaacgccttgaggcgtagtaacgccaccaataaggagtcgacgcgacgggtccgcccacaggcaaggaaggccgaccccgcgagtgcaggcgcgagcgctagcccgtgacgtctgagggggttggggggatgctgtgtgggtttcaagaagacgccacgcctccgccgccgccacgcccccgccgcctccaccgccggctgccgcgcccggaggaggtcgggatgttatcacttccgccggggcttctcactgtgtccgggtcagctgctgccgccgacgccgtaccgctgcggccgggggattgggccggggtctccaccgccgaccgaggggagcgggctccgctcggccctgctttttgcgacctggccgtcagccccacgtcgccggcctggaggggcgaagaggacgagggggccaaggcttcctccggggacattggctccctggattatcaagagtttgtagttgacattgaatccaggctgaggatggaaggtgtggaacttaaagaagaatggcaagatgaagattttccgatacctttaccagaagatgatagtattgaagcagatatactagctataactggaccagaggaccagcctggctcactagaagttaatggaaataaagtgagaaagaaactaatggctccagacattagcctgacactggatcctagtgatggctctgtattgtcagatgatttggatgaaagtggggagattgacttagatggcttagacacaccgtcagagaatagtaatgagtttgagtgggaagtcatttcctggaaggatattttccgttaacagctttgtcttggaaacaactaacatgcagtaggtttccccctccccccatcttttggtaaggactataatactgaaattttgaaaattattactacattgaaaatcagctaaactgcaatctcaaaacataaattacacttaatcattggtgcttatgctttggctaatgctaatttaaatagacttctgcatgtatacttcaaagtattataaatacatttctgctttataaactgatcaaatgagaagtgatcattgagtagttaaccacttcctatctggtattacagttaatttatgtgctcaacaacaacaaaattggctcccagatagctacttgaagtaacctatagtcataactgccagggagaatattgtcacaagttgaatctggaaaggcattgtaaggccagtgtactaagattttgatgactctacaaattatattttctgaacttgtggatacacgtttcactatgattaggtggtttttgctaaattgggcaataaaagttaaagaaccatgatttccaaagacataaaacagcctcatgttaagaataagccttttcctcctttatggaagagagattgaaaattgtgcagatggtataatgaaaattctctgtaaaatctaggtagtaaagtggttaacgtataatttgatttttgttgtgtaacaatttgtgattcaaaaactttgtattttgacagatgatcttccaaaacccaagactactgaagtaattaggaaaggctcaattactgaatacacagcagcagaggaaaaagaagatggacgacgctggcgtatgttcaggattggagaacaggaccacagggttgatatgaaggcaattgaaccctataaaaaagttatcagccatgggggatattatggggatggattaaatgccattgttgtgtttgctgtctgtttcatgcctgaaagtagtcagcctaactatagatacctgatggacaatctttttaaatatgttattggcactttggagctattagtagcagaaaactacatgatagtttatttaaatggtgcaacaactcgaagaaaaatgcccagtctgggatggctcaggaaatgttatcagcaaattgatagaaggttacggaaaaatctaaaatccctaatcattgtacatccttcttggtttatcagaacacttctggctgttacaagaccatttattagctcgaaattcagccaaaaaattagatacgtgtttaatttggcagaactagcagaacttgtccccatggaatacgttggcataccagaatgcataaaacagtatgaagaagaaaagtttaaaaagaaacaaaaaagagttgatcaagaacttaatggaaaacaagatgaaccgaaaaatgaacagtaagtttggcatctagtccaaacaagactgaagaatgtgctgatggagcagtgctgtttctgcattcataatgcatttattggcccatatttttatgtaacctgttacaaaatagacttgactttttcataatggacttttgtattatacaagggactgttcactgctgtactggtttgcaaatttcttgaatttagctctttaatagctaactgtattattatcgtttaatttttgtttttgtaaatggttaaatacatttcctgggtaacttaggaaattaagtttttcataaggcaacagatggttaaactgattgtcatgaatacccaaagatcatgtatataatcgaagtgtattagtaccatcccaaggtttttttctcatttaacatatttgtttcataattcagcaagtacagatgcaagcgcattgcacactttttcctttctaaacttaaagacaagtcaaaaagccattcttagaactagaggatttaagagggtaggaattagggtttgtatatatgtatatatgggacattttatcttctggcccaaagtcagaactttataaaaatcttgagtttgttcactaatgtgaaataagctatgtgtccagggtattgctcccctgagtgtatatgagtgctgagtagtattgcagagaatgtgatgagttattcactgtcacaactttttctatagaaaacaggggctgctttttaaactctcactatgggcactttaccaaaatacttccatatcaattatttgaactcggtagttgtttgacctagttagatgtggtgtttattcaagtttgtatgaaatcatgtttgacaatactgtaaattaggttaattttgtaagtcttagcatcatcatattgtgctgttttggataacacgtttgttacaagcatttaaactgtttcatttggtagtacctttacattgaaataaattgtgtttgtgcctccaaacaaaaaaaaaaaaaaaaaaaaaaaaaaaaaaaaaaaaaccgcggggcgctttttttgtggggggcggcgaaaaagagggcgttattgtgaggtgggcgcccgtgtggtccttcgcgtgtgtttcccttggccccatttttttgtgtccagcggtgggtaataacttcgtgcgcgggctccccctattttgtgggaggcgctcgatattaattttgccgatttagcgccccggtgttctcccccctgcttattattagtatcttcccgtcttacctccccccggggcattactacttctccccccgtccctgctagcacggcgcgcattatctctgtgtgtatccccaacgagaacttcttttcagcaataaccccttttcattctctctggcggacgatcaaatcctctgcgttgcgtcgtcggcccanagcacaacacagccccgccggcttttaccggcgcggtgtggtgtttttggtattgccgggacacacactcacgtctgcccaccacctattttatctcgcgaggaggtactctgttgtttcttcgaactcgactcgcgatgtttatccatactctccgtggtctctctcttgttgttaccccgggtatttacgtcgccccaccattttagacacactttctttgtagccccgcgttatatattactatcgagctctggattatctagtggtcccaccagtggtgacttccgcccagtcgcataactcgtttcttcaccggcgtcgccactaacacgatgcctagtgcggaacagcgccagcgctggacaacggggcttctaccttcccccttttcatctactattacgcgtgta

SEQ ID NO: 735189 - DNA, 5355 bp, Homo sapiens
attacaagcgtaaaccaccgcgcccgacctcctccccttatttcatccattttataattcacattattgatcgctgataattgcacctattgtaatgatactgataattgcacctgttgtaataatattgatattgataattgcacctattgtattacaatattattattgatatcgataatttcacctactgtaatgatcaataaaggcaggcagaaagaaaacaaaagtaactgaaactaccaggcagcgtccctgcgaacagcaaagagggaagaaacgccttgaggcgtagtaacgccaccaataaggagtcgacgcgacgggtccgcccacaggcaaggaaggccgaccccgcgagtgcaggcgcgagcgctagcccgtgacgtctgagggggttggggggatgctgtgtgggtttcaagaagacgccacgcctccgccgccgccacgcccccgccgcctccaccgccggctgccgcgcccggaggaggtcgggatgttatcacttccgccggggcttctcactgtgtccgggtcagctgctgccgccgacgccgtaccgctgcggccgggggattgggccggggtctccaccgccgaccgaggggagcgggctccgctcggccctgctttttgcgacctggccgtcagccccacgtcgccggcctggaggggcgaagaggacgagggggccaaggcttcctccggggacattggctccctggattatcaagagtttgtagttgacattgaatccaggctgaggatggaaggtgtggaacttaaagaagaatggcaagatgaagattttccgatacctttaccagaagatgatagtattgaagcagatatactagctataactggaccagaggaccagcctggctcactagaagttaatggaaataaagtgagaaagaaactaatggctccagacattagcctgacactggatcctagtgatggctctgtattgtcagatgatttggatgaaagtggggagattgacttagatggcttagacacaccgtcagagaatagtaatgagtttgagtgggaagtcatttcctggaaggatattttccgttaacagctttgtcttggaaacaactaacatgcagtaggtttccccctccccccatcttttggtaaggactataatactgaaattttgaaaattattactacattgaaaatcagctaaactgcaatctcaaaacataaattacacttaatcattggtgcttatgctttggctaatgctaatttaaatagacttctgcatgtatacttcaaagtattataaatacatttctgctttataaactgatcaaatgagaagtgatcattgagtagttaaccacttcctatctggtattacagttaatttatgtgctcaacaacaacaaaattggctcccagatagctacttgaagtaacctatagtcataactgccagggagaatattgtcacaagttgaatctggaaaggcattgtaaggccagtgtactaagattttgatgactctacaaattatattttctgaacttgtggatacacgtttcactatgattaggtggtttttgctaaattgggcaataaaagttaaagaaccatgatttccaaagacataaaacagcctcatgttaagaataagccttttcctcctttatggaagagagattgaaaattgtgcagatggtataatgaaaattctctgtaaaatctaggtagtaaagtggttaacgtataatttgatttttgttgtgtaacaatttgtgattcaaaaactttgtattttgacagatgatcttccaaaacccaagactactgaagtaattaggaaaggctcaattactgaatacacagcagcagaggaaaaagaagatggacgacgctggcgtatgttcaggattggagaacaggaccacagggttgatatgaaggcaattgaaccctataaaaaagttatcagccatgggggatattatggggatggattaaatgccattgttgtgtttgctgtctgtttcatgcctgaaagtagtcagcctaactatagatacctgatggacaatctttttaaatatgttattggcactttggagctattagtagcagaaaactacatgatagtttatttaaatggtgcaacaactcgaagaaaaatgcccagtctgggatggctcaggaaatgttatcagcaaattgatagaaggttacggaaaaatctaaaatccctaatcattgtacatccttcttggtttatcagaacacttctggctgttacaagaccatttattagctcgaaattcagccaaaaaattagatacgtgtttaatttggcagaactagcagaacttgtccccatggaatacgttggcataccagaatgcataaaacagtatgaagaagaaaagtttaaaaagaaacaaaaaagagttgatcaagaacttaatggaaaacaagatgaaccgaaaaatgaacagtaagtttggcatctagtccaaacaagactgaagaatgtgctgatggagcagtgctgtttctgcattaagggactgttcactgctgtactggtttgcaaatttcttgaatttagctctttaatagctaactgtattattatcgttttatattttatattgctaaatagagaaccacactttatataaagtagtttttgcatttgtttattgaatgatgcatcttcttcggtgaaatatttatatgcataaatggcaaaggaaagaaataatatatatttttatgtcattgagcaatattttttaatgtgtacctgtcttatggaagaaatatgcaggtatataagaccacgattttctaaagtgcatattagaatttttgtttttgtaaatggttaaatacatttcctgggtaacttaggaaattaagtttttcataaggcaacagatggttaaactgattgtcatgaatacccaaagatcatgtatataatcgaagtgtattagtaccatcccaaggtttttttctcatttaacatatttgtttcataattcagcaagtacagatgcaagcgcattgcacactttttcctttctaaacttaaagacaagtcaaaaagccattcttagaactagaggatttaagagggtaggaattagggtttgtatatatgtatatatgggacattttatcttctggcccaaagtcagaactttataaaaatcttgagtttgttcactaatgtgaaataagctatgtgtccagggtattgctcccctgagtgtatatgagtgctgagtagtattgcagagaatgtgatgagttattcactgtcacaactttttctatagaaaacaggggctgctttttaaactctcactatgggcactttaccaaaatacttccatatcaattatttgaactcggtagttgtttgacctagttagatgtggtgtttattcaagtttgtatgaaatcatgtttgacaatactgtaaattaggttaattttgtaagtcttagcatcatcatattgtgctgttttggataacacgtttgttacaagcatttaaactgtttcatttggtagtacctttacattgaaataaattgtgtttgtgcctccaaacaaaaagtttaattaccgacaaaattatttctaaaacaacagattgatctgatattgtgtcatatacttgaaaggctcatacacagctggtaagcataataccttccaaatttgaaggtcatggctactcttcaacccttcctgtaaggtattttacaaaacagtggcctagagtagcaaaattgaagtggatgtgagctaacctttcaagatttagtctatcctagattgaacacacatgtggctgtgaccattctcatgtacttacaaaccttctgttacaaaagggaactttcctatattttttgtcctcctcagtcctaaacttggcatgctaacttaaaaccagttataggagagagatgctggaggattcccaggatgaaacattcctcagcagcctcctgacttaactcagatccagcagctcttggcagatcctgaactaatgtcattacagtgaattgagccaaaacgattattgcttgctcacattttaggaacactttttgttgaagaagcaaactaacaataacaagttaggcattccttctgaatttaccatataaggattatgtataaacaattatattgaatttgtcattagattctatatttgtagacgatttaacgtagtctttcatctgtacatctttatcttgttcaaaatgggctgaggtttttaataggtggttttctaccacattaagtacttggttcttcattttaaaaaatatgaagaataacttcaactcttttttgcattattttgatttttgattttgcagtcattgctcctaactgtagatacatgttgcaaaagtgatgtttttctgaattttttttaaaagtagaagactattctgttaaacattaaaattcagagacaacagtgataacacctgggatataatgaaaatgaggtgctgtgaatcagtaaactaaagggatacctgctttaacctgcaccttaatggaatctggtatagagatgtacccacaataaatgttttataagatttaagatcataatagtaggttagaggaagagcatttattaagtctgttgtttctaatctatagctaagttaacatctcccatattattccattttaatttcccattactgaccaaggtgaaagtatatgtgactgtacttttatctttctgttgggatcatggatctaatttaactggcttaatttgatgcttctgtcactaggctctaagtgccccttttttagtcagaagtttttcatgtgaaataatttgattctgtgttctgcttgatcatactcctaagcaagcaccaagggaagacgttctattcaccccacaatttaagcttaacaatctttaactcagagggagatatgaagaaatatgattctaagtagggtctagcagaggcattggaaagtgataaaagtaggaagtaagagaaagcaaacctttataaagagataaagacatagttgttacctaagatgccactgtatgtgtgccctctctttttttttttttttttttggagacagagactcactctgtcacccattctggagtgcagtggcgcaatcctggctcactgcaacctctgcctcccgggttcaagcatttctcctgcctcagcctcctgagtagctgggattacaggcacacgccacaatgcccggctaatttttgtatttttagtagagacggggtttcgccatgctaggctggtctcgaactc

SEQ ID NO: 735190 - DNA, 4461 bp, Homo sapiens
  misc_feature (4048)..(4048): n is a, c, g, or t
attacaagcgtaaaccaccgcgcccgacctcctccccttatttcatccattttataattcacattattgatcgctgataattgcacctattgtaatgatactgataattgcacctgttgtaataatattgatattgataattgcacctattgtattacaatattattattgatatcgataatttcacctactgtaatgatcaataaaggcaggcagaaagaaaacaaaagtaactgaaactaccaggcagcgtccctgcgaacagcaaagagggaagaaacgccttgaggcgtagtaacgccaccaataaggagtcgacgcgacgggtccgcccacaggcaaggaaggccgaccccgcgagtgcaggcgcgagcgctagcccgtgacgtctgagggggttggggggatgctgtgtgggtttcaagaagacgccacgcctccgccgccgccacgcccccgccgcctccaccgccggctgccgcgcccggaggaggtcgggatgttatcacttccgccggggcttctcactgtgtccgggtcagctgctgccgccgacgccgtaccgctgcggccgggggattgggccggggtctccaccgccgaccgaggggagcgggctccgctcggccctgctttttgcgacctggccgtcagccccacgtcgccggcctggaggggcgaagaggacgagggggccaaggcttcctccggggacattggctccctggattatcaagagtttgtagttgacattgaatccaggctgaggatggaaggtgtggaacttaaagaagaatggcaagatgaagattttccgatacctttaccagaagatgatagtattgaagcagatatactagctataactggaccagaggaccagcctggctcactagaagttaatggaaataaagtgagaaagaaactaatggctccagacattagcctgacactggatcctagtgatggctctgtattgtcagatgatttggatgaaagtggggagattgacttagatggcttagacacaccgtcagagaatagtaatgagtttgagtgggaagtcatttcctggaaggatattttccgttaacagctttgtcttggaaacaactaacatgcagtaggtttccccctccccccatcttttggtaaggactataatactgaaattttgaaaattattactacattgaaaatcagctaaactgcaatctcaaaacataaattacacttaatcattggtgcttatgctttggctaatgctaatttaaatagacttctgcatgtatacttcaaagtattataaatacatttctgctttataaactgatcaaatgagaagtgatcattgagtagttaaccacttcctatctggtattacagttaatttatgtgctcaacaacaacaaaattggctcccagatagctacttgaagtaacctatagtcataactgccagggagaatattgtcacaagttgaatctggaaaggcattgtaaggccagtgtactaagattttgatgactctacaaattatattttctgaacttgtggatacacgtttcactatgattaggtggtttttgctaaattgggcaataaaagttaaagaaccatgatttccaaagacataaaacagcctcatgttaagaataagccttttcctcctttatggaagagagattgaaaattgtgcagatggtataatgaaaattctctgtaaaatctaggtagtaaagtggttaacgtataatttgatttttgttgtgtaacaatttgtgattcaaaaactttgtattttgacagatgatcttccaaaacccaagactactgaagtaattaggaaaggctcaattactgaatacacagcagcagaggaaaaagaagatggacgacgctggcgtatgttcaggattggagaacaggaccacagggttgatatgaaggcaattgaaccctataaaaaagttatcagccatgggggatattatggggatggattaaatgccattgttgtgtttgctgtctgtttcatgcctgaaagtagtcagcctaactatagatacctgatggacaatctttttaaatatgttattggcactttggagctattagtagcagaaaactacatgatagtttatttaaatggtgcaacaactcgaagaaaaatgcccagtctgggatggctcaggaaatgttatcagcaaattgatagaaggttacggaaaaatctaaaatccctaatcattgtacatccttcttggtttatcagaacacttctggctgttacaagaccatttattagctcgaaattcagccaaaaaattagatacgtgtttaatttggcagaactagcagaacttgtccccatggaatacgttggcataccagaatgcataaaacagtatgaagaagaaaagtttaaaaagaaacaaaaaagagttgatcaagaacttaatggaaaacaagatgaaccgaaaaatgaacagtaagtttggcatctagtccaaacaagactgaagaatgtgctgatggagcagtgctgtttctgcattaagggactgttcactgctgtactggtttgcaaatttcttgaatttagctctttaatagctaactgtattattatcgttttatattttatattgctaaatagagaaccacactttatataaagtagtttttgcatttgtttattgaatgatgcatcttcttcggtgaaatatttatatgcataaatggcaaaggaaagaaataatatatatttttatgtcattgagcaatattttttaatgtgtacctgtcttatggaagaaatatgcaggtatataagaccacgattttctaaagtgcatattagaatttttgtttttgtaaatggttaaatacatttcctgggtaacttaggaaattaagtttttcataaggcaacagatggttaaactgattgtcatgaatacccaaagatcatgtatataatcgaagtgtattagtaccatcccaaggtttttttctcatttaacatatttgtttcataattcagcaagtacagatgcaagcgcattgcacactttttcctttctaaacttaaagacaagtcaaaaagccattcttagaactagaggatttaagagggtaggaattagggtttgtatatatgtatatatgggacattttatcttctggcccaaagtcagaactttataaaaatcttgagtttgttcactaatgtgaaataagctatgtgtccagggtattgctcccctgagtgtatatgagtgctgagtagtattgcagagaatgtgatgagttattcactgtcacaactttttctatagaaaacaggggctgctttttaaactctcactatgggcactttaccaaaatacttccatatcaattatttgaactcggtagttgtttgacctagttagatgtggtgtttattcaagtttgtatgaaatcatgtttgacaatactgtaaattaggttaattttgtaagtcttagcatcatcatattgtgctgttttggataacacgtttgttacaagcatttaaactgtttcatttggtagtacctttacattgaaataaattgtgtttgtgcctccaaacaaaaaaaaaaaaaaaaaaaaaaaaaaaaaaaaaaaaaccgcggggcgctttttttgtggggggcggcgaaaaagagggcgttattgtgaggtgggcgcccgtgtggtccttcgcgtgtgtttcccttggccccatttttttgtgtccagcggtgggtaataacttcgtgcgcgggctccccctattttgtgggaggcgctcgatattaattttgccgatttagcgccccggtgttctcccccctgcttattattagtatcttcccgtcttacctccccccggggcattactacttctccccccgtccctgctagcacggcgcgcattatctctgtgtgtatccccaacgagaacttcttttcagcaataaccccttttcattctctctggcggacgatcaaatcctctgcgttgcgtcgtcggcccanagcacaacacagccccgccggcttttaccggcgcggtgtggtgtttttggtattgccgggacacacactcacgtctgcccaccacctattttatctcgcgaggaggtactctgttgtttcttcgaactcgactcgcgatgtttatccatactctccgtggtctctctcttgttgttaccccgggtatttacgtcgccccaccattttagacacactttctttgtagccccgcgttatatattactatcgagctctggattatctagtggtcccaccagtggtgacttccgcccagtcgcataactcgtttcttcaccggcgtcgccactaacacgatgcctagtgcggaacagcgccagcgctggacaacggggcttctaccttcccccttttcatctactattacgcgtgta

SEQ ID NO: 735191 - DNA, 5129 bp, Homo sapiens
attacaagcgtaaaccaccgcgcccgacctcctccccttatttcatccattttataattcacattattgatcgctgataattgcacctattgtaatgatactgataattgcacctgttgtaataatattgatattgataattgcacctattgtattacaatattattattgatatcgataatttcacctactgtaatgatcaataaaggcaggcagaaagaaaacaaaagtaactgaaactaccaggcagcgtccctgcgaacagcaaagagggaagaaacgccttgaggcgtagtaacgccaccaataaggagtcgacgcgacgggtccgcccacaggcaaggaaggccgaccccgcgagtgcaggcgcgagcgctagcccgtgacgtctgagggggttggggggatgctgtgtgggtttcaagaagacgccacgcctccgccgccgccacgcccccgccgcctccaccgccggctgccgcgcccggaggaggtcgggatgttatcacttccgccggggcttctcactgtgtccgggtcagctgctgccgccgacgccgtaccgctgcggccgggggattgggccggggtctccaccgccgaccgaggggagcgggctccgctcggccctgctttttgcgacctggccgtcagccccacgtcgccggcctggaggggcgaagaggacgagggggccaaggcttcctccggggacattggctccctggattatcaagagtttgtagttgacattgaatccaggctgaggatggaaggtgtggaacttaaagaagaatggcaagatgaagattttccgatacctttaccagaagatgatagtattgaagcagatatactagctataactggaccagaggaccagcctggctcactagaagttaatggaaataaagtgagaaagaaactaatggctccagacattagcctgacactggatcctagtgatggctctgtattgtcagatgatttggatgaaagtggggagattgacttagatggcttagacacaccgtcagagaatagtaatgagtttgagtgggaagtcatttcctggaaggatattttccgttaacagctttgtcttggaaacaactaacatgcagtaggtttccccctccccccatcttttggtaaggactataatactgaaattttgaaaattattactacattgaaaatcagctaaactgcaatctcaaaacataaattacacttaatcattggtgcttatgctttggctaatgctaatttaaatagacttctgcatgtatacttcaaagtattataaatacatttctgctttataaactgatcaaatgagaagtgatcattgagtagttaaccacttcctatctggtattacagttaatttatgtgctcaacaacaacaaaattggctcccagatagctacttgaagtaacctatagtcataactgccagggagaatattgtcacaagttgaatctggaaaggcattgtaaggccagtgtactaagattttgatgactctacaaattatattttctgaacttgtggatacacgtttcactatgattaggtggtttttgctaaattgggcaataaaagttaaagaaccatgatttccaaagacataaaacagcctcatgttaagaataagccttttcctcctttatggaagagagattgaaaattgtgcagatggtataatgaaaattctctgtaaaatctaggtagtaaagtggttaacgtataatttgatttttgttgtgtaacaatttgtgattcaaaaactttgtattttgacagatgatcttccaaaacccaagactactgaagtaattaggaaaggctcaattactgaatacacagcagcagaggaaaaagaagatggacgacgctggcgtatgttcaggattggagaacaggaccacagggttgatatgaaggcaattgaaccctataaaaaagttatcagccatgggggatattatggggatggattaaatgccattgttgtgtttgctgtctgtttcatgcctgaaagtagtcagcctaactatagatacctgatggacaatctttttaaatatgttattggcactttggagctattagtagcagaaaactacatgatagtttatttaaatggtgcaacaactcgaagaaaaatgcccagtctgggatggctcaggaaatgttatcagcaaattgatagaaggttacggaaaaatctaaaatccctaatcattgtacatccttcttggtttatcagaacacttctggctgttacaagaccatttattagctcgaaattcagccaaaaaattagatacgtgtttaatttggcagaactagcagaacttgtccccatggaatacgttggcataccagaatgcataaaacagtatgaagaagaaaagtttaaaaagaaacaaaaaagagttgatcaagaacttaatggaaaacaagatgaaccgaaaaatgaacagtaagtttggcatctagtccaaacaagactgaagaatgtgctgatggagcagtgctgtttctgcattaagggactgttcactgctgtactggtttgcaaatttcttgaatttagctctttaatagctaactgtattattatcgtttaatttttgtttttgtaaatggttaaatacatttcctgggtaacttaggaaattaagtttttcataaggcaacagatggttaaactgattgtcatgaatacccaaagatcatgtatataatcgaagtgtattagtaccatcccaaggtttttttctcatttaacatatttgtttcataattcagcaagtacagatgcaagcgcattgcacactttttcctttctaaacttaaagacaagtcaaaaagccattcttagaactagaggatttaagagggtaggaattagggtttgtatatatgtatatatgggacattttatcttctggcccaaagtcagaactttataaaaatcttgagtttgttcactaatgtgaaataagctatgtgtccagggtattgctcccctgagtgtatatgagtgctgagtagtattgcagagaatgtgatgagttattcactgtcacaactttttctatagaaaacaggggctgctttttaaactctcactatgggcactttaccaaaatacttccatatcaattatttgaactcggtagttgtttgacctagttagatgtggtgtttattcaagtttgtatgaaatcatgtttgacaatactgtaaattaggttaattttgtaagtcttagcatcatcatattgtgctgttttggataacacgtttgttacaagcatttaaactgtttcatttggtagtacctttacattgaaataaattgtgtttgtgcctccaaacaaaaagtttaattaccgacaaaattatttctaaaacaacagattgatctgatattgtgtcatatacttgaaaggctcatacacagctggtaagcataataccttccaaatttgaaggtcatggctactcttcaacccttcctgtaaggtattttacaaaacagtggcctagagtagcaaaattgaagtggatgtgagctaacctttcaagatttagtctatcctagattgaacacacatgtggctgtgaccattctcatgtacttacaaaccttctgttacaaaagggaactttcctatattttttgtcctcctcagtcctaaacttggcatgctaacttaaaaccagttataggagagagatgctggaggattcccaggatgaaacattcctcagcagcctcctgacttaactcagatccagcagctcttggcagatcctgaactaatgtcattacagtgaattgagccaaaacgattattgcttgctcacattttaggaacactttttgttgaagaagcaaactaacaataacaagttaggcattccttctgaatttaccatataaggattatgtataaacaattatattgaatttgtcattagattctatatttgtagacgatttaacgtagtctttcatctgtacatctttatcttgttcaaaatgggctgaggtttttaataggtggttttctaccacattaagtacttggttcttcattttaaaaaatatgaagaataacttcaactcttttttgcattattttgatttttgattttgcagtcattgctcctaactgtagatacatgttgcaaaagtgatgtttttctgaattttttttaaaagtagaagactattctgttaaacattaaaattcagagacaacagtgataacacctgggatataatgaaaatgaggtgctgtgaatcagtaaactaaagggatacctgctttaacctgcaccttaatggaatctggtatagagatgtacccacaataaatgttttataagatttaagatcataatagtaggttagaggaagagcatttattaagtctgttgtttctaatctatagctaagttaacatctcccatattattccattttaatttcccattactgaccaaggtgaaagtatatgtgactgtacttttatctttctgttgggatcatggatctaatttaactggcttaatttgatgcttctgtcactaggctctaagtgccccttttttagtcagaagtttttcatgtgaaataatttgattctgtgttctgcttgatcatactcctaagcaagcaccaagggaagacgttctattcaccccacaatttaagcttaacaatctttaactcagagggagatatgaagaaatatgattctaagtagggtctagcagaggcattggaaagtgataaaagtaggaagtaagagaaagcaaacctttataaagagataaagacatagttgttacctaagatgccactgtatgtgtgccctctctttttttttttttttttttggagacagagactcactctgtcacccattctggagtgcagtggcgcaatcctggctcactgcaacctctgcctcccgggttcaagcatttctcctgcctcagcctcctgagtagctgggattacaggcacacgccacaatgcccggctaatttttgtatttttagtagagacggggtttcgccatgctaggctggtctcgaactc

SEQ ID NO: 735192 - DNA, 4235 bp, Homo sapiens
  misc_feature (3822)..(3822): n is a, c, g, or t
attacaagcgtaaaccaccgcgcccgacctcctccccttatttcatccattttataattcacattattgatcgctgataattgcacctattgtaatgatactgataattgcacctgttgtaataatattgatattgataattgcacctattgtattacaatattattattgatatcgataatttcacctactgtaatgatcaataaaggcaggcagaaagaaaacaaaagtaactgaaactaccaggcagcgtccctgcgaacagcaaagagggaagaaacgccttgaggcgtagtaacgccaccaataaggagtcgacgcgacgggtccgcccacaggcaaggaaggccgaccccgcgagtgcaggcgcgagcgctagcccgtgacgtctgagggggttggggggatgctgtgtgggtttcaagaagacgccacgcctccgccgccgccacgcccccgccgcctccaccgccggctgccgcgcccggaggaggtcgggatgttatcacttccgccggggcttctcactgtgtccgggtcagctgctgccgccgacgccgtaccgctgcggccgggggattgggccggggtctccaccgccgaccgaggggagcgggctccgctcggccctgctttttgcgacctggccgtcagccccacgtcgccggcctggaggggcgaagaggacgagggggccaaggcttcctccggggacattggctccctggattatcaagagtttgtagttgacattgaatccaggctgaggatggaaggtgtggaacttaaagaagaatggcaagatgaagattttccgatacctttaccagaagatgatagtattgaagcagatatactagctataactggaccagaggaccagcctggctcactagaagttaatggaaataaagtgagaaagaaactaatggctccagacattagcctgacactggatcctagtgatggctctgtattgtcagatgatttggatgaaagtggggagattgacttagatggcttagacacaccgtcagagaatagtaatgagtttgagtgggaagtcatttcctggaaggatattttccgttaacagctttgtcttggaaacaactaacatgcagtaggtttccccctccccccatcttttggtaaggactataatactgaaattttgaaaattattactacattgaaaatcagctaaactgcaatctcaaaacataaattacacttaatcattggtgcttatgctttggctaatgctaatttaaatagacttctgcatgtatacttcaaagtattataaatacatttctgctttataaactgatcaaatgagaagtgatcattgagtagttaaccacttcctatctggtattacagttaatttatgtgctcaacaacaacaaaattggctcccagatagctacttgaagtaacctatagtcataactgccagggagaatattgtcacaagttgaatctggaaaggcattgtaaggccagtgtactaagattttgatgactctacaaattatattttctgaacttgtggatacacgtttcactatgattaggtggtttttgctaaattgggcaataaaagttaaagaaccatgatttccaaagacataaaacagcctcatgttaagaataagccttttcctcctttatggaagagagattgaaaattgtgcagatggtataatgaaaattctctgtaaaatctaggtagtaaagtggttaacgtataatttgatttttgttgtgtaacaatttgtgattcaaaaactttgtattttgacagatgatcttccaaaacccaagactactgaagtaattaggaaaggctcaattactgaatacacagcagcagaggaaaaagaagatggacgacgctggcgtatgttcaggattggagaacaggaccacagggttgatatgaaggcaattgaaccctataaaaaagttatcagccatgggggatattatggggatggattaaatgccattgttgtgtttgctgtctgtttcatgcctgaaagtagtcagcctaactatagatacctgatggacaatctttttaaatatgttattggcactttggagctattagtagcagaaaactacatgatagtttatttaaatggtgcaacaactcgaagaaaaatgcccagtctgggatggctcaggaaatgttatcagcaaattgatagaaggttacggaaaaatctaaaatccctaatcattgtacatccttcttggtttatcagaacacttctggctgttacaagaccatttattagctcgaaattcagccaaaaaattagatacgtgtttaatttggcagaactagcagaacttgtccccatggaatacgttggcataccagaatgcataaaacagtatgaagaagaaaagtttaaaaagaaacaaaaaagagttgatcaagaacttaatggaaaacaagatgaaccgaaaaatgaacagtaagtttggcatctagtccaaacaagactgaagaatgtgctgatggagcagtgctgtttctgcattaagggactgttcactgctgtactggtttgcaaatttcttgaatttagctctttaatagctaactgtattattatcgtttaatttttgtttttgtaaatggttaaatacatttcctgggtaacttaggaaattaagtttttcataaggcaacagatggttaaactgattgtcatgaatacccaaagatcatgtatataatcgaagtgtattagtaccatcccaaggtttttttctcatttaacatatttgtttcataattcagcaagtacagatgcaagcgcattgcacactttttcctttctaaacttaaagacaagtcaaaaagccattcttagaactagaggatttaagagggtaggaattagggtttgtatatatgtatatatgggacattttatcttctggcccaaagtcagaactttataaaaatcttgagtttgttcactaatgtgaaataagctatgtgtccagggtattgctcccctgagtgtatatgagtgctgagtagtattgcagagaatgtgatgagttattcactgtcacaactttttctatagaaaacaggggctgctttttaaactctcactatgggcactttaccaaaatacttccatatcaattatttgaactcggtagttgtttgacctagttagatgtggtgtttattcaagtttgtatgaaatcatgtttgacaatactgtaaattaggttaattttgtaagtcttagcatcatcatattgtgctgttttggataacacgtttgttacaagcatttaaactgtttcatttggtagtacctttacattgaaataaattgtgtttgtgcctccaaacaaaaaaaaaaaaaaaaaaaaaaaaaaaaaaaaaaaaaccgcggggcgctttttttgtggggggcggcgaaaaagagggcgttattgtgaggtgggcgcccgtgtggtccttcgcgtgtgtttcccttggccccatttttttgtgtccagcggtgggtaataacttcgtgcgcgggctccccctattttgtgggaggcgctcgatattaattttgccgatttagcgccccggtgttctcccccctgcttattattagtatcttcccgtcttacctccccccggggcattactacttctccccccgtccctgctagcacggcgcgcattatctctgtgtgtatccccaacgagaacttcttttcagcaataaccccttttcattctctctggcggacgatcaaatcctctgcgttgcgtcgtcggcccanagcacaacacagccccgccggcttttaccggcgcggtgtggtgtttttggtattgccgggacacacactcacgtctgcccaccacctattttatctcgcgaggaggtactctgttgtttcttcgaactcgactcgcgatgtttatccatactctccgtggtctctctcttgttgttaccccgggtatttacgtcgccccaccattttagacacactttctttgtagccccgcgttatatattactatcgagctctggattatctagtggtcccaccagtggtgacttccgcccagtcgcataactcgtttcttcaccggcgtcgccactaacacgatgcctagtgcggaacagcgccagcgctggacaacggggcttctaccttcccccttttcatctactattacgcgtgta

SEQ ID NO: 735193 - DNA, 5385 bp, Homo sapiens
attacaagcgtaaaccaccgcgcccgacctcctccccttatttcatccattttataattcacattattgatcgctgataattgcacctattgtaatgatactgataattgcacctgttgtaataatattgatattgataattgcacctattgtattacaatattattattgatatcgataatttcacctactgtaatgatcaataaaggcaggcagaaagaaaacaaaagtaactgaaactaccaggcagcgtccctgcgaacagcaaagagggaagaaacgccttgaggcgtagtaacgccaccaataaggagtcgacgcgacgggtccgcccacaggcaaggaaggccgaccccgcgagtgcaggcgcgagcgctagcccgtgacgtctgagggggttggggggatgctgtgtgggtttcaagaagacgccacgcctccgccgccgccacgcccccgccgcctccaccgccggctgccgcgcccggaggaggtcgggatgttatcacttccgccggggcttctcactgtgtccgggtcagctgctgccgccgacgccgtaccgctgcggccgggggattgggccggggtctccaccgccgaccgaggggagcgggctccgctcggccctgctttttgcgacctggccgtcagccccacgtcgccggcctggaggggcgaagaggacgagggggccaaggcttcctccggggacattggctccctggattatcaagagtttgtagttgacattgaatccaggctgaggatggaaggtgtggaacttaaagaagaatggcaagatgaagattttccgatacctttaccagaagatgatagtattgaagcagatatactagctataactggaccagaggaccagcctggctcactagaagttaatggaaataaagtgagaaagaaactaatggctccagacattagcctgacactggatcctagtgatggctctgtattgtcagatgatttggatgaaagtggggagattgacttagatggcttagacacaccgtcagagaatagtaatgagtttgagtgggaagtcatttcctggaaggatattttccgttaacagctttgtcttggaaacaactaacatgcagtaggtttccccctccccccatcttttggtaaggactataatactgaaattttgaaaattattactacattgaaaatcagctaaactgcaatctcaaaacataaattacacttaatcattggtgcttatgctttggctaatgctaatttaaatagacttctgcatgtatacttcaaagtattataaatacatttctgctttataaactgatcaaatgagaagtgatcattgagtagttaaccacttcctatctggtattacagttaatttatgtgctcaacaacaacaaaattggctcccagatagctacttgaagtaacctatagtcataactgccagggagaatattgtcacaagttgaatctggaaaggcattgtaaggccagtgtactaagattttgatgactctacaaattatattttctgaacttgtggatacacgtttcactatgattaggtggtttttgctaaattgggcaataaaagttaaagaaccatgatttccaaagacataaaacagcctcatgttaagaataagccttttcctcctttatggaagagagattgaaaattgtgcagatggtataatgaaaattctctgtaaaatctaggtagtaaagtggttaacgtataatttgatttttgttgtgtaacaatttgtgattcaaaaactttgtattttgacagatgatcttccaaaacccaagactactgaagtaattaggaaaggctcaattactgaatacacagcagcagaggaaaaagaagatggacgacgctggcgtatgttcaggattggagaacaggaccacagggttgatatgaaggcaattgaaccctataagtttgctgtctgtttcatgcctgaaagtagtcagcctaactatagatacctgatggacaatctttttaaatatgttattggcactttggagctattagtagcagaaaactacatgatagtttatttaaatggtgcaacaactcgaagaaaaatgcccagtctgggatggctcaggaaatgttatcagcaaattgatagaaggttacggaaaaatctaaaatccctaatcattgtacatccttcttggtttatcagaacacttctggctgttacaagaccatttattagctcgaaattcagccaaaaaattagatacgtgtttaatttggcagaactagcagaacttgtccccatggaatacgttggcataccagaatgcataaaacagtatgaagaagaaaagtttaaaaagaaacaaaaaagagttgatcaagaacttaatggaaaacaagatgaaccgaaaaatgaacagtaagtttggcatctagtccaaacaagactgaagaatgtgctgatggagcagtgctgtttctgcattcataatgcatttattggcccatatttttatgtaacctgttacaaaatagacttgactttttcataatggacttttgtattatacaagggactgttcactgctgtactggtttgcaaatttcttgaatttagctctttaatagctaactgtattattatcgttttatattttatattgctaaatagagaaccacactttatataaagtagtttttgcatttgtttattgaatgatgcatcttcttcggtgaaatatttatatgcataaatggcaaaggaaagaaataatatatatttttatgtcattgagcaatattttttaatgtgtacctgtcttatggaagaaatatgcaggtatataagaccacgattttctaaagtgcatattagaatttttgtttttgtaaatggttaaatacatttcctgggtaacttaggaaattaagtttttcataaggcaacagatggttaaactgattgtcatgaatacccaaagatcatgtatataatcgaagtgtattagtaccatcccaaggtttttttctcatttaacatatttgtttcataattcagcaagtacagatgcaagcgcattgcacactttttcctttctaaacttaaagacaagtcaaaaagccattcttagaactagaggatttaagagggtaggaattagggtttgtatatatgtatatatgggacattttatcttctggcccaaagtcagaactttataaaaatcttgagtttgttcactaatgtgaaataagctatgtgtccagggtattgctcccctgagtgtatatgagtgctgagtagtattgcagagaatgtgatgagttattcactgtcacaactttttctatagaaaacaggggctgctttttaaactctcactatgggcactttaccaaaatacttccatatcaattatttgaactcggtagttgtttgacctagttagatgtggtgtttattcaagtttgtatgaaatcatgtttgacaatactgtaaattaggttaattttgtaagtcttagcatcatcatattgtgctgttttggataacacgtttgttacaagcatttaaactgtttcatttggtagtacctttacattgaaataaattgtgtttgtgcctccaaacaaaaagtttaattaccgacaaaattatttctaaaacaacagattgatctgatattgtgtcatatacttgaaaggctcatacacagctggtaagcataataccttccaaatttgaaggtcatggctactcttcaacccttcctgtaaggtattttacaaaacagtggcctagagtagcaaaattgaagtggatgtgagctaacctttcaagatttagtctatcctagattgaacacacatgtggctgtgaccattctcatgtacttacaaaccttctgttacaaaagggaactttcctatattttttgtcctcctcagtcctaaacttggcatgctaacttaaaaccagttataggagagagatgctggaggattcccaggatgaaacattcctcagcagcctcctgacttaactcagatccagcagctcttggcagatcctgaactaatgtcattacagtgaattgagccaaaacgattattgcttgctcacattttaggaacactttttgttgaagaagcaaactaacaataacaagttaggcattccttctgaatttaccatataaggattatgtataaacaattatattgaatttgtcattagattctatatttgtagacgatttaacgtagtctttcatctgtacatctttatcttgttcaaaatgggctgaggtttttaataggtggttttctaccacattaagtacttggttcttcattttaaaaaatatgaagaataacttcaactcttttttgcattattttgatttttgattttgcagtcattgctcctaactgtagatacatgttgcaaaagtgatgtttttctgaattttttttaaaagtagaagactattctgttaaacattaaaattcagagacaacagtgataacacctgggatataatgaaaatgaggtgctgtgaatcagtaaactaaagggatacctgctttaacctgcaccttaatggaatctggtatagagatgtacccacaataaatgttttataagatttaagatcataatagtaggttagaggaagagcatttattaagtctgttgtttctaatctatagctaagttaacatctcccatattattccattttaatttcccattactgaccaaggtgaaagtatatgtgactgtacttttatctttctgttgggatcatggatctaatttaactggcttaatttgatgcttctgtcactaggctctaagtgccccttttttagtcagaagtttttcatgtgaaataatttgattctgtgttctgcttgatcatactcctaagcaagcaccaagggaagacgttctattcaccccacaatttaagcttaacaatctttaactcagagggagatatgaagaaatatgattctaagtagggtctagcagaggcattggaaagtgataaaagtaggaagtaagagaaagcaaacctttataaagagataaagacatagttgttacctaagatgccactgtatgtgtgccctctctttttttttttttttttttggagacagagactcactctgtcacccattctggagtgcagtggcgcaatcctggctcactgcaacctctgcctcccgggttcaagcatttctcctgcctcagcctcctgagtagctgggattacaggcacacgccacaatgcccggctaatttttgtatttttagtagagacggggtttcgccatgctaggctggtctcgaactc

SEQ ID NO: 735194 - DNA, 4491 bp, Homo sapiens
  misc_feature (4078)..(4078): n is a, c, g, or t
attacaagcgtaaaccaccgcgcccgacctcctccccttatttcatccattttataattcacattattgatcgctgataattgcacctattgtaatgatactgataattgcacctgttgtaataatattgatattgataattgcacctattgtattacaatattattattgatatcgataatttcacctactgtaatgatcaataaaggcaggcagaaagaaaacaaaagtaactgaaactaccaggcagcgtccctgcgaacagcaaagagggaagaaacgccttgaggcgtagtaacgccaccaataaggagtcgacgcgacgggtccgcccacaggcaaggaaggccgaccccgcgagtgcaggcgcgagcgctagcccgtgacgtctgagggggttggggggatgctgtgtgggtttcaagaagacgccacgcctccgccgccgccacgcccccgccgcctccaccgccggctgccgcgcccggaggaggtcgggatgttatcacttccgccggggcttctcactgtgtccgggtcagctgctgccgccgacgccgtaccgctgcggccgggggattgggccggggtctccaccgccgaccgaggggagcgggctccgctcggccctgctttttgcgacctggccgtcagccccacgtcgccggcctggaggggcgaagaggacgagggggccaaggcttcctccggggacattggctccctggattatcaagagtttgtagttgacattgaatccaggctgaggatggaaggtgtggaacttaaagaagaatggcaagatgaagattttccgatacctttaccagaagatgatagtattgaagcagatatactagctataactggaccagaggaccagcctggctcactagaagttaatggaaataaagtgagaaagaaactaatggctccagacattagcctgacactggatcctagtgatggctctgtattgtcagatgatttggatgaaagtggggagattgacttagatggcttagacacaccgtcagagaatagtaatgagtttgagtgggaagtcatttcctggaaggatattttccgttaacagctttgtcttggaaacaactaacatgcagtaggtttccccctccccccatcttttggtaaggactataatactgaaattttgaaaattattactacattgaaaatcagctaaactgcaatctcaaaacataaattacacttaatcattggtgcttatgctttggctaatgctaatttaaatagacttctgcatgtatacttcaaagtattataaatacatttctgctttataaactgatcaaatgagaagtgatcattgagtagttaaccacttcctatctggtattacagttaatttatgtgctcaacaacaacaaaattggctcccagatagctacttgaagtaacctatagtcataactgccagggagaatattgtcacaagttgaatctggaaaggcattgtaaggccagtgtactaagattttgatgactctacaaattatattttctgaacttgtggatacacgtttcactatgattaggtggtttttgctaaattgggcaataaaagttaaagaaccatgatttccaaagacataaaacagcctcatgttaagaataagccttttcctcctttatggaagagagattgaaaattgtgcagatggtataatgaaaattctctgtaaaatctaggtagtaaagtggttaacgtataatttgatttttgttgtgtaacaatttgtgattcaaaaactttgtattttgacagatgatcttccaaaacccaagactactgaagtaattaggaaaggctcaattactgaatacacagcagcagaggaaaaagaagatggacgacgctggcgtatgttcaggattggagaacaggaccacagggttgatatgaaggcaattgaaccctataagtttgctgtctgtttcatgcctgaaagtagtcagcctaactatagatacctgatggacaatctttttaaatatgttattggcactttggagctattagtagcagaaaactacatgatagtttatttaaatggtgcaacaactcgaagaaaaatgcccagtctgggatggctcaggaaatgttatcagcaaattgatagaaggttacggaaaaatctaaaatccctaatcattgtacatccttcttggtttatcagaacacttctggctgttacaagaccatttattagctcgaaattcagccaaaaaattagatacgtgtttaatttggcagaactagcagaacttgtccccatggaatacgttggcataccagaatgcataaaacagtatgaagaagaaaagtttaaaaagaaacaaaaaagagttgatcaagaacttaatggaaaacaagatgaaccgaaaaatgaacagtaagtttggcatctagtccaaacaagactgaagaatgtgctgatggagcagtgctgtttctgcattcataatgcatttattggcccatatttttatgtaacctgttacaaaatagacttgactttttcataatggacttttgtattatacaagggactgttcactgctgtactggtttgcaaatttcttgaatttagctctttaatagctaactgtattattatcgttttatattttatattgctaaatagagaaccacactttatataaagtagtttttgcatttgtttattgaatgatgcatcttcttcggtgaaatatttatatgcataaatggcaaaggaaagaaataatatatatttttatgtcattgagcaatattttttaatgtgtacctgtcttatggaagaaatatgcaggtatataagaccacgattttctaaagtgcatattagaatttttgtttttgtaaatggttaaatacatttcctgggtaacttaggaaattaagtttttcataaggcaacagatggttaaactgattgtcatgaatacccaaagatcatgtatataatcgaagtgtattagtaccatcccaaggtttttttctcatttaacatatttgtttcataattcagcaagtacagatgcaagcgcattgcacactttttcctttctaaacttaaagacaagtcaaaaagccattcttagaactagaggatttaagagggtaggaattagggtttgtatatatgtatatatgggacattttatcttctggcccaaagtcagaactttataaaaatcttgagtttgttcactaatgtgaaataagctatgtgtccagggtattgctcccctgagtgtatatgagtgctgagtagtattgcagagaatgtgatgagttattcactgtcacaactttttctatagaaaacaggggctgctttttaaactctcactatgggcactttaccaaaatacttccatatcaattatttgaactcggtagttgtttgacctagttagatgtggtgtttattcaagtttgtatgaaatcatgtttgacaatactgtaaattaggttaattttgtaagtcttagcatcatcatattgtgctgttttggataacacgtttgttacaagcatttaaactgtttcatttggtagtacctttacattgaaataaattgtgtttgtgcctccaaacaaaaaaaaaaaaaaaaaaaaaaaaaaaaaaaaaaaaaccgcggggcgctttttttgtggggggcggcgaaaaagagggcgttattgtgaggtgggcgcccgtgtggtccttcgcgtgtgtttcccttggccccatttttttgtgtccagcggtgggtaataacttcgtgcgcgggctccccctattttgtgggaggcgctcgatattaattttgccgatttagcgccccggtgttctcccccctgcttattattagtatcttcccgtcttacctccccccggggcattactacttctccccccgtccctgctagcacggcgcgcattatctctgtgtgtatccccaacgagaacttcttttcagcaataaccccttttcattctctctggcggacgatcaaatcctctgcgttgcgtcgtcggcccanagcacaacacagccccgccggcttttaccggcgcggtgtggtgtttttggtattgccgggacacacactcacgtctgcccaccacctattttatctcgcgaggaggtactctgttgtttcttcgaactcgactcgcgatgtttatccatactctccgtggtctctctcttgttgttaccccgggtatttacgtcgccccaccattttagacacactttctttgtagccccgcgttatatattactatcgagctctggattatctagtggtcccaccagtggtgacttccgcccagtcgcataactcgtttcttcaccggcgtcgccactaacacgatgcctagtgcggaacagcgccagcgctggacaacggggcttctaccttcccccttttcatctactattacgcgtgta

SEQ ID NO: 735195 - DNA, 5159 bp, Homo sapiens
attacaagcgtaaaccaccgcgcccgacctcctccccttatttcatccattttataattcacattattgatcgctgataattgcacctattgtaatgatactgataattgcacctgttgtaataatattgatattgataattgcacctattgtattacaatattattattgatatcgataatttcacctactgtaatgatcaataaaggcaggcagaaagaaaacaaaagtaactgaaactaccaggcagcgtccctgcgaacagcaaagagggaagaaacgccttgaggcgtagtaacgccaccaataaggagtcgacgcgacgggtccgcccacaggcaaggaaggccgaccccgcgagtgcaggcgcgagcgctagcccgtgacgtctgagggggttggggggatgctgtgtgggtttcaagaagacgccacgcctccgccgccgccacgcccccgccgcctccaccgccggctgccgcgcccggaggaggtcgggatgttatcacttccgccggggcttctcactgtgtccgggtcagctgctgccgccgacgccgtaccgctgcggccgggggattgggccggggtctccaccgccgaccgaggggagcgggctccgctcggccctgctttttgcgacctggccgtcagccccacgtcgccggcctggaggggcgaagaggacgagggggccaaggcttcctccggggacattggctccctggattatcaagagtttgtagttgacattgaatccaggctgaggatggaaggtgtggaacttaaagaagaatggcaagatgaagattttccgatacctttaccagaagatgatagtattgaagcagatatactagctataactggaccagaggaccagcctggctcactagaagttaatggaaataaagtgagaaagaaactaatggctccagacattagcctgacactggatcctagtgatggctctgtattgtcagatgatttggatgaaagtggggagattgacttagatggcttagacacaccgtcagagaatagtaatgagtttgagtgggaagtcatttcctggaaggatattttccgttaacagctttgtcttggaaacaactaacatgcagtaggtttccccctccccccatcttttggtaaggactataatactgaaattttgaaaattattactacattgaaaatcagctaaactgcaatctcaaaacataaattacacttaatcattggtgcttatgctttggctaatgctaatttaaatagacttctgcatgtatacttcaaagtattataaatacatttctgctttataaactgatcaaatgagaagtgatcattgagtagttaaccacttcctatctggtattacagttaatttatgtgctcaacaacaacaaaattggctcccagatagctacttgaagtaacctatagtcataactgccagggagaatattgtcacaagttgaatctggaaaggcattgtaaggccagtgtactaagattttgatgactctacaaattatattttctgaacttgtggatacacgtttcactatgattaggtggtttttgctaaattgggcaataaaagttaaagaaccatgatttccaaagacataaaacagcctcatgttaagaataagccttttcctcctttatggaagagagattgaaaattgtgcagatggtataatgaaaattctctgtaaaatctaggtagtaaagtggttaacgtataatttgatttttgttgtgtaacaatttgtgattcaaaaactttgtattttgacagatgatcttccaaaacccaagactactgaagtaattaggaaaggctcaattactgaatacacagcagcagaggaaaaagaagatggacgacgctggcgtatgttcaggattggagaacaggaccacagggttgatatgaaggcaattgaaccctataagtttgctgtctgtttcatgcctgaaagtagtcagcctaactatagatacctgatggacaatctttttaaatatgttattggcactttggagctattagtagcagaaaactacatgatagtttatttaaatggtgcaacaactcgaagaaaaatgcccagtctgggatggctcaggaaatgttatcagcaaattgatagaaggttacggaaaaatctaaaatccctaatcattgtacatccttcttggtttatcagaacacttctggctgttacaagaccatttattagctcgaaattcagccaaaaaattagatacgtgtttaatttggcagaactagcagaacttgtccccatggaatacgttggcataccagaatgcataaaacagtatgaagaagaaaagtttaaaaagaaacaaaaaagagttgatcaagaacttaatggaaaacaagatgaaccgaaaaatgaacagtaagtttggcatctagtccaaacaagactgaagaatgtgctgatggagcagtgctgtttctgcattcataatgcatttattggcccatatttttatgtaacctgttacaaaatagacttgactttttcataatggacttttgtattatacaagggactgttcactgctgtactggtttgcaaatttcttgaatttagctctttaatagctaactgtattattatcgtttaatttttgtttttgtaaatggttaaatacatttcctgggtaacttaggaaattaagtttttcataaggcaacagatggttaaactgattgtcatgaatacccaaagatcatgtatataatcgaagtgtattagtaccatcccaaggtttttttctcatttaacatatttgtttcataattcagcaagtacagatgcaagcgcattgcacactttttcctttctaaacttaaagacaagtcaaaaagccattcttagaactagaggatttaagagggtaggaattagggtttgtatatatgtatatatgggacattttatcttctggcccaaagtcagaactttataaaaatcttgagtttgttcactaatgtgaaataagctatgtgtccagggtattgctcccctgagtgtatatgagtgctgagtagtattgcagagaatgtgatgagttattcactgtcacaactttttctatagaaaacaggggctgctttttaaactctcactatgggcactttaccaaaatacttccatatcaattatttgaactcggtagttgtttgacctagttagatgtggtgtttattcaagtttgtatgaaatcatgtttgacaatactgtaaattaggttaattttgtaagtcttagcatcatcatattgtgctgttttggataacacgtttgttacaagcatttaaactgtttcatttggtagtacctttacattgaaataaattgtgtttgtgcctccaaacaaaaagtttaattaccgacaaaattatttctaaaacaacagattgatctgatattgtgtcatatacttgaaaggctcatacacagctggtaagcataataccttccaaatttgaaggtcatggctactcttcaacccttcctgtaaggtattttacaaaacagtggcctagagtagcaaaattgaagtggatgtgagctaacctttcaagatttagtctatcctagattgaacacacatgtggctgtgaccattctcatgtacttacaaaccttctgttacaaaagggaactttcctatattttttgtcctcctcagtcctaaacttggcatgctaacttaaaaccagttataggagagagatgctggaggattcccaggatgaaacattcctcagcagcctcctgacttaactcagatccagcagctcttggcagatcctgaactaatgtcattacagtgaattgagccaaaacgattattgcttgctcacattttaggaacactttttgttgaagaagcaaactaacaataacaagttaggcattccttctgaatttaccatataaggattatgtataaacaattatattgaatttgtcattagattctatatttgtagacgatttaacgtagtctttcatctgtacatctttatcttgttcaaaatgggctgaggtttttaataggtggttttctaccacattaagtacttggttcttcattttaaaaaatatgaagaataacttcaactcttttttgcattattttgatttttgattttgcagtcattgctcctaactgtagatacatgttgcaaaagtgatgtttttctgaattttttttaaaagtagaagactattctgttaaacattaaaattcagagacaacagtgataacacctgggatataatgaaaatgaggtgctgtgaatcagtaaactaaagggatacctgctttaacctgcaccttaatggaatctggtatagagatgtacccacaataaatgttttataagatttaagatcataatagtaggttagaggaagagcatttattaagtctgttgtttctaatctatagctaagttaacatctcccatattattccattttaatttcccattactgaccaaggtgaaagtatatgtgactgtacttttatctttctgttgggatcatggatctaatttaactggcttaatttgatgcttctgtcactaggctctaagtgccccttttttagtcagaagtttttcatgtgaaataatttgattctgtgttctgcttgatcatactcctaagcaagcaccaagggaagacgttctattcaccccacaatttaagcttaacaatctttaactcagagggagatatgaagaaatatgattctaagtagggtctagcagaggcattggaaagtgataaaagtaggaagtaagagaaagcaaacctttataaagagataaagacatagttgttacctaagatgccactgtatgtgtgccctctctttttttttttttttttttggagacagagactcactctgtcacccattctggagtgcagtggcgcaatcctggctcactgcaacctctgcctcccgggttcaagcatttctcctgcctcagcctcctgagtagctgggattacaggcacacgccacaatgcccggctaatttttgtatttttagtagagacggggtttcgccatgctaggctggtctcgaactc

SEQ ID NO: 735196 - DNA, 4265 bp, Homo sapiens
  misc_feature (3852)..(3852): n is a, c, g, or t
attacaagcgtaaaccaccgcgcccgacctcctccccttatttcatccattttataattcacattattgatcgctgataattgcacctattgtaatgatactgataattgcacctgttgtaataatattgatattgataattgcacctattgtattacaatattattattgatatcgataatttcacctactgtaatgatcaataaaggcaggcagaaagaaaacaaaagtaactgaaactaccaggcagcgtccctgcgaacagcaaagagggaagaaacgccttgaggcgtagtaacgccaccaataaggagtcgacgcgacgggtccgcccacaggcaaggaaggccgaccccgcgagtgcaggcgcgagcgctagcccgtgacgtctgagggggttggggggatgctgtgtgggtttcaagaagacgccacgcctccgccgccgccacgcccccgccgcctccaccgccggctgccgcgcccggaggaggtcgggatgttatcacttccgccggggcttctcactgtgtccgggtcagctgctgccgccgacgccgtaccgctgcggccgggggattgggccggggtctccaccgccgaccgaggggagcgggctccgctcggccctgctttttgcgacctggccgtcagccccacgtcgccggcctggaggggcgaagaggacgagggggccaaggcttcctccggggacattggctccctggattatcaagagtttgtagttgacattgaatccaggctgaggatggaaggtgtggaacttaaagaagaatggcaagatgaagattttccgatacctttaccagaagatgatagtattgaagcagatatactagctataactggaccagaggaccagcctggctcactagaagttaatggaaataaagtgagaaagaaactaatggctccagacattagcctgacactggatcctagtgatggctctgtattgtcagatgatttggatgaaagtggggagattgacttagatggcttagacacaccgtcagagaatagtaatgagtttgagtgggaagtcatttcctggaaggatattttccgttaacagctttgtcttggaaacaactaacatgcagtaggtttccccctccccccatcttttggtaaggactataatactgaaattttgaaaattattactacattgaaaatcagctaaactgcaatctcaaaacataaattacacttaatcattggtgcttatgctttggctaatgctaatttaaatagacttctgcatgtatacttcaaagtattataaatacatttctgctttataaactgatcaaatgagaagtgatcattgagtagttaaccacttcctatctggtattacagttaatttatgtgctcaacaacaacaaaattggctcccagatagctacttgaagtaacctatagtcataactgccagggagaatattgtcacaagttgaatctggaaaggcattgtaaggccagtgtactaagattttgatgactctacaaattatattttctgaacttgtggatacacgtttcactatgattaggtggtttttgctaaattgggcaataaaagttaaagaaccatgatttccaaagacataaaacagcctcatgttaagaataagccttttcctcctttatggaagagagattgaaaattgtgcagatggtataatgaaaattctctgtaaaatctaggtagtaaagtggttaacgtataatttgatttttgttgtgtaacaatttgtgattcaaaaactttgtattttgacagatgatcttccaaaacccaagactactgaagtaattaggaaaggctcaattactgaatacacagcagcagaggaaaaagaagatggacgacgctggcgtatgttcaggattggagaacaggaccacagggttgatatgaaggcaattgaaccctataagtttgctgtctgtttcatgcctgaaagtagtcagcctaactatagatacctgatggacaatctttttaaatatgttattggcactttggagctattagtagcagaaaactacatgatagtttatttaaatggtgcaacaactcgaagaaaaatgcccagtctgggatggctcaggaaatgttatcagcaaattgatagaaggttacggaaaaatctaaaatccctaatcattgtacatccttcttggtttatcagaacacttctggctgttacaagaccatttattagctcgaaattcagccaaaaaattagatacgtgtttaatttggcagaactagcagaacttgtccccatggaatacgttggcataccagaatgcataaaacagtatgaagaagaaaagtttaaaaagaaacaaaaaagagttgatcaagaacttaatggaaaacaagatgaaccgaaaaatgaacagtaagtttggcatctagtccaaacaagactgaagaatgtgctgatggagcagtgctgtttctgcattcataatgcatttattggcccatatttttatgtaacctgttacaaaatagacttgactttttcataatggacttttgtattatacaagggactgttcactgctgtactggtttgcaaatttcttgaatttagctctttaatagctaactgtattattatcgtttaatttttgtttttgtaaatggttaaatacatttcctgggtaacttaggaaattaagtttttcataaggcaacagatggttaaactgattgtcatgaatacccaaagatcatgtatataatcgaagtgtattagtaccatcccaaggtttttttctcatttaacatatttgtttcataattcagcaagtacagatgcaagcgcattgcacactttttcctttctaaacttaaagacaagtcaaaaagccattcttagaactagaggatttaagagggtaggaattagggtttgtatatatgtatatatgggacattttatcttctggcccaaagtcagaactttataaaaatcttgagtttgttcactaatgtgaaataagctatgtgtccagggtattgctcccctgagtgtatatgagtgctgagtagtattgcagagaatgtgatgagttattcactgtcacaactttttctatagaaaacaggggctgctttttaaactctcactatgggcactttaccaaaatacttccatatcaattatttgaactcggtagttgtttgacctagttagatgtggtgtttattcaagtttgtatgaaatcatgtttgacaatactgtaaattaggttaattttgtaagtcttagcatcatcatattgtgctgttttggataacacgtttgttacaagcatttaaactgtttcatttggtagtacctttacattgaaataaattgtgtttgtgcctccaaacaaaaaaaaaaaaaaaaaaaaaaaaaaaaaaaaaaaaaccgcggggcgctttttttgtggggggcggcgaaaaagagggcgttattgtgaggtgggcgcccgtgtggtccttcgcgtgtgtttcccttggccccatttttttgtgtccagcggtgggtaataacttcgtgcgcgggctccccctattttgtgggaggcgctcgatattaattttgccgatttagcgccccggtgttctcccccctgcttattattagtatcttcccgtcttacctccccccggggcattactacttctccccccgtccctgctagcacggcgcgcattatctctgtgtgtatccccaacgagaacttcttttcagcaataaccccttttcattctctctggcggacgatcaaatcctctgcgttgcgtcgtcggcccanagcacaacacagccccgccggcttttaccggcgcggtgtggtgtttttggtattgccgggacacacactcacgtctgcccaccacctattttatctcgcgaggaggtactctgttgtttcttcgaactcgactcgcgatgtttatccatactctccgtggtctctctcttgttgttaccccgggtatttacgtcgccccaccattttagacacactttctttgtagccccgcgttatatattactatcgagctctggattatctagtggtcccaccagtggtgacttccgcccagtcgcataactcgtttcttcaccggcgtcgccactaacacgatgcctagtgcggaacagcgccagcgctggacaacggggcttctaccttcccccttttcatctactattacgcgtgta

SEQ ID NO: 735197 - DNA, 5301 bp, Homo sapiens
attacaagcgtaaaccaccgcgcccgacctcctccccttatttcatccattttataattcacattattgatcgctgataattgcacctattgtaatgatactgataattgcacctgttgtaataatattgatattgataattgcacctattgtattacaatattattattgatatcgataatttcacctactgtaatgatcaataaaggcaggcagaaagaaaacaaaagtaactgaaactaccaggcagcgtccctgcgaacagcaaagagggaagaaacgccttgaggcgtagtaacgccaccaataaggagtcgacgcgacgggtccgcccacaggcaaggaaggccgaccccgcgagtgcaggcgcgagcgctagcccgtgacgtctgagggggttggggggatgctgtgtgggtttcaagaagacgccacgcctccgccgccgccacgcccccgccgcctccaccgccggctgccgcgcccggaggaggtcgggatgttatcacttccgccggggcttctcactgtgtccgggtcagctgctgccgccgacgccgtaccgctgcggccgggggattgggccggggtctccaccgccgaccgaggggagcgggctccgctcggccctgctttttgcgacctggccgtcagccccacgtcgccggcctggaggggcgaagaggacgagggggccaaggcttcctccggggacattggctccctggattatcaagagtttgtagttgacattgaatccaggctgaggatggaaggtgtggaacttaaagaagaatggcaagatgaagattttccgatacctttaccagaagatgatagtattgaagcagatatactagctataactggaccagaggaccagcctggctcactagaagttaatggaaataaagtgagaaagaaactaatggctccagacattagcctgacactggatcctagtgatggctctgtattgtcagatgatttggatgaaagtggggagattgacttagatggcttagacacaccgtcagagaatagtaatgagtttgagtgggaagtcatttcctggaaggatattttccgttaacagctttgtcttggaaacaactaacatgcagtaggtttccccctccccccatcttttggtaaggactataatactgaaattttgaaaattattactacattgaaaatcagctaaactgcaatctcaaaacataaattacacttaatcattggtgcttatgctttggctaatgctaatttaaatagacttctgcatgtatacttcaaagtattataaatacatttctgctttataaactgatcaaatgagaagtgatcattgagtagttaaccacttcctatctggtattacagttaatttatgtgctcaacaacaacaaaattggctcccagatagctacttgaagtaacctatagtcataactgccagggagaatattgtcacaagttgaatctggaaaggcattgtaaggccagtgtactaagattttgatgactctacaaattatattttctgaacttgtggatacacgtttcactatgattaggtggtttttgctaaattgggcaataaaagttaaagaaccatgatttccaaagacataaaacagcctcatgttaagaataagccttttcctcctttatggaagagagattgaaaattgtgcagatggtataatgaaaattctctgtaaaatctaggtagtaaagtggttaacgtataatttgatttttgttgtgtaacaatttgtgattcaaaaactttgtattttgacagatgatcttccaaaacccaagactactgaagtaattaggaaaggctcaattactgaatacacagcagcagaggaaaaagaagatggacgacgctggcgtatgttcaggattggagaacaggaccacagggttgatatgaaggcaattgaaccctataagtttgctgtctgtttcatgcctgaaagtagtcagcctaactatagatacctgatggacaatctttttaaatatgttattggcactttggagctattagtagcagaaaactacatgatagtttatttaaatggtgcaacaactcgaagaaaaatgcccagtctgggatggctcaggaaatgttatcagcaaattgatagaaggttacggaaaaatctaaaatccctaatcattgtacatccttcttggtttatcagaacacttctggctgttacaagaccatttattagctcgaaattcagccaaaaaattagatacgtgtttaatttggcagaactagcagaacttgtccccatggaatacgttggcataccagaatgcataaaacagtatgaagaagaaaagtttaaaaagaaacaaaaaagagttgatcaagaacttaatggaaaacaagatgaaccgaaaaatgaacagtaagtttggcatctagtccaaacaagactgaagaatgtgctgatggagcagtgctgtttctgcattaagggactgttcactgctgtactggtttgcaaatttcttgaatttagctctttaatagctaactgtattattatcgttttatattttatattgctaaatagagaaccacactttatataaagtagtttttgcatttgtttattgaatgatgcatcttcttcggtgaaatatttatatgcataaatggcaaaggaaagaaataatatatatttttatgtcattgagcaatattttttaatgtgtacctgtcttatggaagaaatatgcaggtatataagaccacgattttctaaagtgcatattagaatttttgtttttgtaaatggttaaatacatttcctgggtaacttaggaaattaagtttttcataaggcaacagatggttaaactgattgtcatgaatacccaaagatcatgtatataatcgaagtgtattagtaccatcccaaggtttttttctcatttaacatatttgtttcataattcagcaagtacagatgcaagcgcattgcacactttttcctttctaaacttaaagacaagtcaaaaagccattcttagaactagaggatttaagagggtaggaattagggtttgtatatatgtatatatgggacattttatcttctggcccaaagtcagaactttataaaaatcttgagtttgttcactaatgtgaaataagctatgtgtccagggtattgctcccctgagtgtatatgagtgctgagtagtattgcagagaatgtgatgagttattcactgtcacaactttttctatagaaaacaggggctgctttttaaactctcactatgggcactttaccaaaatacttccatatcaattatttgaactcggtagttgtttgacctagttagatgtggtgtttattcaagtttgtatgaaatcatgtttgacaatactgtaaattaggttaattttgtaagtcttagcatcatcatattgtgctgttttggataacacgtttgttacaagcatttaaactgtttcatttggtagtacctttacattgaaataaattgtgtttgtgcctccaaacaaaaagtttaattaccgacaaaattatttctaaaacaacagattgatctgatattgtgtcatatacttgaaaggctcatacacagctggtaagcataataccttccaaatttgaaggtcatggctactcttcaacccttcctgtaaggtattttacaaaacagtggcctagagtagcaaaattgaagtggatgtgagctaacctttcaagatttagtctatcctagattgaacacacatgtggctgtgaccattctcatgtacttacaaaccttctgttacaaaagggaactttcctatattttttgtcctcctcagtcctaaacttggcatgctaacttaaaaccagttataggagagagatgctggaggattcccaggatgaaacattcctcagcagcctcctgacttaactcagatccagcagctcttggcagatcctgaactaatgtcattacagtgaattgagccaaaacgattattgcttgctcacattttaggaacactttttgttgaagaagcaaactaacaataacaagttaggcattccttctgaatttaccatataaggattatgtataaacaattatattgaatttgtcattagattctatatttgtagacgatttaacgtagtctttcatctgtacatctttatcttgttcaaaatgggctgaggtttttaataggtggttttctaccacattaagtacttggttcttcattttaaaaaatatgaagaataacttcaactcttttttgcattattttgatttttgattttgcagtcattgctcctaactgtagatacatgttgcaaaagtgatgtttttctgaattttttttaaaagtagaagactattctgttaaacattaaaattcagagacaacagtgataacacctgggatataatgaaaatgaggtgctgtgaatcagtaaactaaagggatacctgctttaacctgcaccttaatggaatctggtatagagatgtacccacaataaatgttttataagatttaagatcataatagtaggttagaggaagagcatttattaagtctgttgtttctaatctatagctaagttaacatctcccatattattccattttaatttcccattactgaccaaggtgaaagtatatgtgactgtacttttatctttctgttgggatcatggatctaatttaactggcttaatttgatgcttctgtcactaggctctaagtgccccttttttagtcagaagtttttcatgtgaaataatttgattctgtgttctgcttgatcatactcctaagcaagcaccaagggaagacgttctattcaccccacaatttaagcttaacaatctttaactcagagggagatatgaagaaatatgattctaagtagggtctagcagaggcattggaaagtgataaaagtaggaagtaagagaaagcaaacctttataaagagataaagacatagttgttacctaagatgccactgtatgtgtgccctctctttttttttttttttttttggagacagagactcactctgtcacccattctggagtgcagtggcgcaatcctggctcactgcaacctctgcctcccgggttcaagcatttctcctgcctcagcctcctgagtagctgggattacaggcacacgccacaatgcccggctaatttttgtatttttagtagagacggggtttcgccatgctaggctggtctcgaactc

SEQ ID NO: 735198 - DNA, 4407 bp, Homo sapiens
  misc_feature (3994)..(3994): n is a, c, g, or t
attacaagcgtaaaccaccgcgcccgacctcctccccttatttcatccattttataattcacattattgatcgctgataattgcacctattgtaatgatactgataattgcacctgttgtaataatattgatattgataattgcacctattgtattacaatattattattgatatcgataatttcacctactgtaatgatcaataaaggcaggcagaaagaaaacaaaagtaactgaaactaccaggcagcgtccctgcgaacagcaaagagggaagaaacgccttgaggcgtagtaacgccaccaataaggagtcgacgcgacgggtccgcccacaggcaaggaaggccgaccccgcgagtgcaggcgcgagcgctagcccgtgacgtctgagggggttggggggatgctgtgtgggtttcaagaagacgccacgcctccgccgccgccacgcccccgccgcctccaccgccggctgccgcgcccggaggaggtcgggatgttatcacttccgccggggcttctcactgtgtccgggtcagctgctgccgccgacgccgtaccgctgcggccgggggattgggccggggtctccaccgccgaccgaggggagcgggctccgctcggccctgctttttgcgacctggccgtcagccccacgtcgccggcctggaggggcgaagaggacgagggggccaaggcttcctccggggacattggctccctggattatcaagagtttgtagttgacattgaatccaggctgaggatggaaggtgtggaacttaaagaagaatggcaagatgaagattttccgatacctttaccagaagatgatagtattgaagcagatatactagctataactggaccagaggaccagcctggctcactagaagttaatggaaataaagtgagaaagaaactaatggctccagacattagcctgacactggatcctagtgatggctctgtattgtcagatgatttggatgaaagtggggagattgacttagatggcttagacacaccgtcagagaatagtaatgagtttgagtgggaagtcatttcctggaaggatattttccgttaacagctttgtcttggaaacaactaacatgcagtaggtttccccctccccccatcttttggtaaggactataatactgaaattttgaaaattattactacattgaaaatcagctaaactgcaatctcaaaacataaattacacttaatcattggtgcttatgctttggctaatgctaatttaaatagacttctgcatgtatacttcaaagtattataaatacatttctgctttataaactgatcaaatgagaagtgatcattgagtagttaaccacttcctatctggtattacagttaatttatgtgctcaacaacaacaaaattggctcccagatagctacttgaagtaacctatagtcataactgccagggagaatattgtcacaagttgaatctggaaaggcattgtaaggccagtgtactaagattttgatgactctacaaattatattttctgaacttgtggatacacgtttcactatgattaggtggtttttgctaaattgggcaataaaagttaaagaaccatgatttccaaagacataaaacagcctcatgttaagaataagccttttcctcctttatggaagagagattgaaaattgtgcagatggtataatgaaaattctctgtaaaatctaggtagtaaagtggttaacgtataatttgatttttgttgtgtaacaatttgtgattcaaaaactttgtattttgacagatgatcttccaaaacccaagactactgaagtaattaggaaaggctcaattactgaatacacagcagcagaggaaaaagaagatggacgacgctggcgtatgttcaggattggagaacaggaccacagggttgatatgaaggcaattgaaccctataagtttgctgtctgtttcatgcctgaaagtagtcagcctaactatagatacctgatggacaatctttttaaatatgttattggcactttggagctattagtagcagaaaactacatgatagtttatttaaatggtgcaacaactcgaagaaaaatgcccagtctgggatggctcaggaaatgttatcagcaaattgatagaaggttacggaaaaatctaaaatccctaatcattgtacatccttcttggtttatcagaacacttctggctgttacaagaccatttattagctcgaaattcagccaaaaaattagatacgtgtttaatttggcagaactagcagaacttgtccccatggaatacgttggcataccagaatgcataaaacagtatgaagaagaaaagtttaaaaagaaacaaaaaagagttgatcaagaacttaatggaaaacaagatgaaccgaaaaatgaacagtaagtttggcatctagtccaaacaagactgaagaatgtgctgatggagcagtgctgtttctgcattaagggactgttcactgctgtactggtttgcaaatttcttgaatttagctctttaatagctaactgtattattatcgttttatattttatattgctaaatagagaaccacactttatataaagtagtttttgcatttgtttattgaatgatgcatcttcttcggtgaaatatttatatgcataaatggcaaaggaaagaaataatatatatttttatgtcattgagcaatattttttaatgtgtacctgtcttatggaagaaatatgcaggtatataagaccacgattttctaaagtgcatattagaatttttgtttttgtaaatggttaaatacatttcctgggtaacttaggaaattaagtttttcataaggcaacagatggttaaactgattgtcatgaatacccaaagatcatgtatataatcgaagtgtattagtaccatcccaaggtttttttctcatttaacatatttgtttcataattcagcaagtacagatgcaagcgcattgcacactttttcctttctaaacttaaagacaagtcaaaaagccattcttagaactagaggatttaagagggtaggaattagggtttgtatatatgtatatatgggacattttatcttctggcccaaagtcagaactttataaaaatcttgagtttgttcactaatgtgaaataagctatgtgtccagggtattgctcccctgagtgtatatgagtgctgagtagtattgcagagaatgtgatgagttattcactgtcacaactttttctatagaaaacaggggctgctttttaaactctcactatgggcactttaccaaaatacttccatatcaattatttgaactcggtagttgtttgacctagttagatgtggtgtttattcaagtttgtatgaaatcatgtttgacaatactgtaaattaggttaattttgtaagtcttagcatcatcatattgtgctgttttggataacacgtttgttacaagcatttaaactgtttcatttggtagtacctttacattgaaataaattgtgtttgtgcctccaaacaaaaaaaaaaaaaaaaaaaaaaaaaaaaaaaaaaaaaccgcggggcgctttttttgtggggggcggcgaaaaagagggcgttattgtgaggtgggcgcccgtgtggtccttcgcgtgtgtttcccttggccccatttttttgtgtccagcggtgggtaataacttcgtgcgcgggctccccctattttgtgggaggcgctcgatattaattttgccgatttagcgccccggtgttctcccccctgcttattattagtatcttcccgtcttacctccccccggggcattactacttctccccccgtccctgctagcacggcgcgcattatctctgtgtgtatccccaacgagaacttcttttcagcaataaccccttttcattctctctggcggacgatcaaatcctctgcgttgcgtcgtcggcccanagcacaacacagccccgccggcttttaccggcgcggtgtggtgtttttggtattgccgggacacacactcacgtctgcccaccacctattttatctcgcgaggaggtactctgttgtttcttcgaactcgactcgcgatgtttatccatactctccgtggtctctctcttgttgttaccccgggtatttacgtcgccccaccattttagacacactttctttgtagccccgcgttatatattactatcgagctctggattatctagtggtcccaccagtggtgacttccgcccagtcgcataactcgtttcttcaccggcgtcgccactaacacgatgcctagtgcggaacagcgccagcgctggacaacggggcttctaccttcccccttttcatctactattacgcgtgta

SEQ ID NO: 735199 - DNA, 5075 bp, Homo sapiens
attacaagcgtaaaccaccgcgcccgacctcctccccttatttcatccattttataattcacattattgatcgctgataattgcacctattgtaatgatactgataattgcacctgttgtaataatattgatattgataattgcacctattgtattacaatattattattgatatcgataatttcacctactgtaatgatcaataaaggcaggcagaaagaaaacaaaagtaactgaaactaccaggcagcgtccctgcgaacagcaaagagggaagaaacgccttgaggcgtagtaacgccaccaataaggagtcgacgcgacgggtccgcccacaggcaaggaaggccgaccccgcgagtgcaggcgcgagcgctagcccgtgacgtctgagggggttggggggatgctgtgtgggtttcaagaagacgccacgcctccgccgccgccacgcccccgccgcctccaccgccggctgccgcgcccggaggaggtcgggatgttatcacttccgccggggcttctcactgtgtccgggtcagctgctgccgccgacgccgtaccgctgcggccgggggattgggccggggtctccaccgccgaccgaggggagcgggctccgctcggccctgctttttgcgacctggccgtcagccccacgtcgccggcctggaggggcgaagaggacgagggggccaaggcttcctccggggacattggctccctggattatcaagagtttgtagttgacattgaatccaggctgaggatggaaggtgtggaacttaaagaagaatggcaagatgaagattttccgatacctttaccagaagatgatagtattgaagcagatatactagctataactggaccagaggaccagcctggctcactagaagttaatggaaataaagtgagaaagaaactaatggctccagacattagcctgacactggatcctagtgatggctctgtattgtcagatgatttggatgaaagtggggagattgacttagatggcttagacacaccgtcagagaatagtaatgagtttgagtgggaagtcatttcctggaaggatattttccgttaacagctttgtcttggaaacaactaacatgcagtaggtttccccctccccccatcttttggtaaggactataatactgaaattttgaaaattattactacattgaaaatcagctaaactgcaatctcaaaacataaattacacttaatcattggtgcttatgctttggctaatgctaatttaaatagacttctgcatgtatacttcaaagtattataaatacatttctgctttataaactgatcaaatgagaagtgatcattgagtagttaaccacttcctatctggtattacagttaatttatgtgctcaacaacaacaaaattggctcccagatagctacttgaagtaacctatagtcataactgccagggagaatattgtcacaagttgaatctggaaaggcattgtaaggccagtgtactaagattttgatgactctacaaattatattttctgaacttgtggatacacgtttcactatgattaggtggtttttgctaaattgggcaataaaagttaaagaaccatgatttccaaagacataaaacagcctcatgttaagaataagccttttcctcctttatggaagagagattgaaaattgtgcagatggtataatgaaaattctctgtaaaatctaggtagtaaagtggttaacgtataatttgatttttgttgtgtaacaatttgtgattcaaaaactttgtattttgacagatgatcttccaaaacccaagactactgaagtaattaggaaaggctcaattactgaatacacagcagcagaggaaaaagaagatggacgacgctggcgtatgttcaggattggagaacaggaccacagggttgatatgaaggcaattgaaccctataagtttgctgtctgtttcatgcctgaaagtagtcagcctaactatagatacctgatggacaatctttttaaatatgttattggcactttggagctattagtagcagaaaactacatgatagtttatttaaatggtgcaacaactcgaagaaaaatgcccagtctgggatggctcaggaaatgttatcagcaaattgatagaaggttacggaaaaatctaaaatccctaatcattgtacatccttcttggtttatcagaacacttctggctgttacaagaccatttattagctcgaaattcagccaaaaaattagatacgtgtttaatttggcagaactagcagaacttgtccccatggaatacgttggcataccagaatgcataaaacagtatgaagaagaaaagtttaaaaagaaacaaaaaagagttgatcaagaacttaatggaaaacaagatgaaccgaaaaatgaacagtaagtttggcatctagtccaaacaagactgaagaatgtgctgatggagcagtgctgtttctgcattaagggactgttcactgctgtactggtttgcaaatttcttgaatttagctctttaatagctaactgtattattatcgtttaatttttgtttttgtaaatggttaaatacatttcctgggtaacttaggaaattaagtttttcataaggcaacagatggttaaactgattgtcatgaatacccaaagatcatgtatataatcgaagtgtattagtaccatcccaaggtttttttctcatttaacatatttgtttcataattcagcaagtacagatgcaagcgcattgcacactttttcctttctaaacttaaagacaagtcaaaaagccattcttagaactagaggatttaagagggtaggaattagggtttgtatatatgtatatatgggacattttatcttctggcccaaagtcagaactttataaaaatcttgagtttgttcactaatgtgaaataagctatgtgtccagggtattgctcccctgagtgtatatgagtgctgagtagtattgcagagaatgtgatgagttattcactgtcacaactttttctatagaaaacaggggctgctttttaaactctcactatgggcactttaccaaaatacttccatatcaattatttgaactcggtagttgtttgacctagttagatgtggtgtttattcaagtttgtatgaaatcatgtttgacaatactgtaaattaggttaattttgtaagtcttagcatcatcatattgtgctgttttggataacacgtttgttacaagcatttaaactgtttcatttggtagtacctttacattgaaataaattgtgtttgtgcctccaaacaaaaagtttaattaccgacaaaattatttctaaaacaacagattgatctgatattgtgtcatatacttgaaaggctcatacacagctggtaagcataataccttccaaatttgaaggtcatggctactcttcaacccttcctgtaaggtattttacaaaacagtggcctagagtagcaaaattgaagtggatgtgagctaacctttcaagatttagtctatcctagattgaacacacatgtggctgtgaccattctcatgtacttacaaaccttctgttacaaaagggaactttcctatattttttgtcctcctcagtcctaaacttggcatgctaacttaaaaccagttataggagagagatgctggaggattcccaggatgaaacattcctcagcagcctcctgacttaactcagatccagcagctcttggcagatcctgaactaatgtcattacagtgaattgagccaaaacgattattgcttgctcacattttaggaacactttttgttgaagaagcaaactaacaataacaagttaggcattccttctgaatttaccatataaggattatgtataaacaattatattgaatttgtcattagattctatatttgtagacgatttaacgtagtctttcatctgtacatctttatcttgttcaaaatgggctgaggtttttaataggtggttttctaccacattaagtacttggttcttcattttaaaaaatatgaagaataacttcaactcttttttgcattattttgatttttgattttgcagtcattgctcctaactgtagatacatgttgcaaaagtgatgtttttctgaattttttttaaaagtagaagactattctgttaaacattaaaattcagagacaacagtgataacacctgggatataatgaaaatgaggtgctgtgaatcagtaaactaaagggatacctgctttaacctgcaccttaatggaatctggtatagagatgtacccacaataaatgttttataagatttaagatcataatagtaggttagaggaagagcatttattaagtctgttgtttctaatctatagctaagttaacatctcccatattattccattttaatttcccattactgaccaaggtgaaagtatatgtgactgtacttttatctttctgttgggatcatggatctaatttaactggcttaatttgatgcttctgtcactaggctctaagtgccccttttttagtcagaagtttttcatgtgaaataatttgattctgtgttctgcttgatcatactcctaagcaagcaccaagggaagacgttctattcaccccacaatttaagcttaacaatctttaactcagagggagatatgaagaaatatgattctaagtagggtctagcagaggcattggaaagtgataaaagtaggaagtaagagaaagcaaacctttataaagagataaagacatagttgttacctaagatgccactgtatgtgtgccctctctttttttttttttttttttggagacagagactcactctgtcacccattctggagtgcagtggcgcaatcctggctcactgcaacctctgcctcccgggttcaagcatttctcctgcctcagcctcctgagtagctgggattacaggcacacgccacaatgcccggctaatttttgtatttttagtagagacggggtttcgccatgctaggctggtctcgaactc

SEQ ID NO: 735200 - DNA, 4181 bp, Homo sapiens
  misc_feature (3768)..(3768): n is a, c, g, or t
attacaagcgtaaaccaccgcgcccgacctcctccccttatttcatccattttataattcacattattgatcgctgataattgcacctattgtaatgatactgataattgcacctgttgtaataatattgatattgataattgcacctattgtattacaatattattattgatatcgataatttcacctactgtaatgatcaataaaggcaggcagaaagaaaacaaaagtaactgaaactaccaggcagcgtccctgcgaacagcaaagagggaagaaacgccttgaggcgtagtaacgccaccaataaggagtcgacgcgacgggtccgcccacaggcaaggaaggccgaccccgcgagtgcaggcgcgagcgctagcccgtgacgtctgagggggttggggggatgctgtgtgggtttcaagaagacgccacgcctccgccgccgccacgcccccgccgcctccaccgccggctgccgcgcccggaggaggtcgggatgttatcacttccgccggggcttctcactgtgtccgggtcagctgctgccgccgacgccgtaccgctgcggccgggggattgggccggggtctccaccgccgaccgaggggagcgggctccgctcggccctgctttttgcgacctggccgtcagccccacgtcgccggcctggaggggcgaagaggacgagggggccaaggcttcctccggggacattggctccctggattatcaagagtttgtagttgacattgaatccaggctgaggatggaaggtgtggaacttaaagaagaatggcaagatgaagattttccgatacctttaccagaagatgatagtattgaagcagatatactagctataactggaccagaggaccagcctggctcactagaagttaatggaaataaagtgagaaagaaactaatggctccagacattagcctgacactggatcctagtgatggctctgtattgtcagatgatttggatgaaagtggggagattgacttagatggcttagacacaccgtcagagaatagtaatgagtttgagtgggaagtcatttcctggaaggatattttccgttaacagctttgtcttggaaacaactaacatgcagtaggtttccccctccccccatcttttggtaaggactataatactgaaattttgaaaattattactacattgaaaatcagctaaactgcaatctcaaaacataaattacacttaatcattggtgcttatgctttggctaatgctaatttaaatagacttctgcatgtatacttcaaagtattataaatacatttctgctttataaactgatcaaatgagaagtgatcattgagtagttaaccacttcctatctggtattacagttaatttatgtgctcaacaacaacaaaattggctcccagatagctacttgaagtaacctatagtcataactgccagggagaatattgtcacaagttgaatctggaaaggcattgtaaggccagtgtactaagattttgatgactctacaaattatattttctgaacttgtggatacacgtttcactatgattaggtggtttttgctaaattgggcaataaaagttaaagaaccatgatttccaaagacataaaacagcctcatgttaagaataagccttttcctcctttatggaagagagattgaaaattgtgcagatggtataatgaaaattctctgtaaaatctaggtagtaaagtggttaacgtataatttgatttttgttgtgtaacaatttgtgattcaaaaactttgtattttgacagatgatcttccaaaacccaagactactgaagtaattaggaaaggctcaattactgaatacacagcagcagaggaaaaagaagatggacgacgctggcgtatgttcaggattggagaacaggaccacagggttgatatgaaggcaattgaaccctataagtttgctgtctgtttcatgcctgaaagtagtcagcctaactatagatacctgatggacaatctttttaaatatgttattggcactttggagctattagtagcagaaaactacatgatagtttatttaaatggtgcaacaactcgaagaaaaatgcccagtctgggatggctcaggaaatgttatcagcaaattgatagaaggttacggaaaaatctaaaatccctaatcattgtacatccttcttggtttatcagaacacttctggctgttacaagaccatttattagctcgaaattcagccaaaaaattagatacgtgtttaatttggcagaactagcagaacttgtccccatggaatacgttggcataccagaatgcataaaacagtatgaagaagaaaagtttaaaaagaaacaaaaaagagttgatcaagaacttaatggaaaacaagatgaaccgaaaaatgaacagtaagtttggcatctagtccaaacaagactgaagaatgtgctgatggagcagtgctgtttctgcattaagggactgttcactgctgtactggtttgcaaatttcttgaatttagctctttaatagctaactgtattattatcgtttaatttttgtttttgtaaatggttaaatacatttcctgggtaacttaggaaattaagtttttcataaggcaacagatggttaaactgattgtcatgaatacccaaagatcatgtatataatcgaagtgtattagtaccatcccaaggtttttttctcatttaacatatttgtttcataattcagcaagtacagatgcaagcgcattgcacactttttcctttctaaacttaaagacaagtcaaaaagccattcttagaactagaggatttaagagggtaggaattagggtttgtatatatgtatatatgggacattttatcttctggcccaaagtcagaactttataaaaatcttgagtttgttcactaatgtgaaataagctatgtgtccagggtattgctcccctgagtgtatatgagtgctgagtagtattgcagagaatgtgatgagttattcactgtcacaactttttctatagaaaacaggggctgctttttaaactctcactatgggcactttaccaaaatacttccatatcaattatttgaactcggtagttgtttgacctagttagatgtggtgtttattcaagtttgtatgaaatcatgtttgacaatactgtaaattaggttaattttgtaagtcttagcatcatcatattgtgctgttttggataacacgtttgttacaagcatttaaactgtttcatttggtagtacctttacattgaaataaattgtgtttgtgcctccaaacaaaaaaaaaaaaaaaaaaaaaaaaaaaaaaaaaaaaaccgcggggcgctttttttgtggggggcggcgaaaaagagggcgttattgtgaggtgggcgcccgtgtggtccttcgcgtgtgtttcccttggccccatttttttgtgtccagcggtgggtaataacttcgtgcgcgggctccccctattttgtgggaggcgctcgatattaattttgccgatttagcgccccggtgttctcccccctgcttattattagtatcttcccgtcttacctccccccggggcattactacttctccccccgtccctgctagcacggcgcgcattatctctgtgtgtatccccaacgagaacttcttttcagcaataaccccttttcattctctctggcggacgatcaaatcctctgcgttgcgtcgtcggcccanagcacaacacagccccgccggcttttaccggcgcggtgtggtgtttttggtattgccgggacacacactcacgtctgcccaccacctattttatctcgcgaggaggtactctgttgtttcttcgaactcgactcgcgatgtttatccatactctccgtggtctctctcttgttgttaccccgggtatttacgtcgccccaccattttagacacactttctttgtagccccgcgttatatattactatcgagctctggattatctagtggtcccaccagtggtgacttccgcccagtcgcataactcgtttcttcaccggcgtcgccactaacacgatgcctagtgcggaacagcgccagcgctggacaacggggcttctaccttcccccttttcatctactattacgcgtgta

SEQ ID NO: 735201 - DNA, 4780 bp, Homo sapiens
attacaagcgtaaaccaccgcgcccgacctcctccccttatttcatccattttataattcacattattgatcgctgataattgcacctattgtaatgatactgataattgcacctgttgtaataatattgatattgataattgcacctattgtattacaatattattattgatatcgataatttcacctactgtaatgatcaataaaggcaggcagaaagaaaacaaaagtaactgaaactaccaggcagcgtccctgcgaacagcaaagagggaagaaacgccttgaggcgtagtaacgccaccaataaggagtcgacgcgacgggtccgcccacaggcaaggaaggccgaccccgcgagtgcaggcgcgagcgctagcccgtgacgtctgagggggttggggggatgctgtgtgggtttcaagaagacgccacgcctccgccgccgccacgcccccgccgcctccaccgccggctgccgcgcccggaggaggtcgggatgttatcacttccgccggggcttctcactgtgtccgggtcagctgctgccgccgacgccgtaccgctgcggccgggggattgggccggggtctccaccgccgaccgaggggagcgggctccgctcggccctgctttttgcgacctggccgtcagccccacgtcgccggcctggaggggcgaagaggacgagggggccaaggcttcctccggggacattggctccctggattatcaagagtttgtagttgacattgaatccaggctgaggatggaaggtgtggaacttaaagaagaatggcaagatgaagattttccgatacctttaccagaagatgatagtattgaagcagatatactagctataactggaccagaggaccagcctggctcactagaagttaatggaaataaagtgagaaagaaactaatggctccagacattagcctgacactggatcctagtgatggctctgtattgtcagatgatttggatgaaagtggggagattgacttagatggcttagacacaccgtcagagaatagtaatgagtttgagtgggaagtcatttcctggaaggatattttccgttaacagctttgtcttggaaacaactaacatgcagtaggtttccccctccccccatcttttgatgatcttccaaaacccaagactactgaagtaattaggaaaggctcaattactgaatacacagcagcagaggaaaaagaagatggacgacgctggcgtatgttcaggattggagaacaggaccacagggttgatatgaaggcaattgaaccctataaaaaagttatcagccatgggggatattatggggatggattaaatgccattgttgtgtttgctgtctgtttcatgcctgaaagtagtcagcctaactatagatacctgatggacaatctttttaaatatgttattggcactttggagctattagtagcagaaaactacatgatagtttatttaaatggtgcaacaactcgaagaaaaatgcccagtctgggatggctcaggaaatgttatcagcaaattgatagaaggttacggaaaaatctaaaatccctaatcattgtacatccttcttggtttatcagaacacttctggctgttacaagaccatttattagctcgaaattcagccaaaaaattagatacgtgtttaatttggcagaactagcagaacttgtccccatggaatacgttggcataccagaatgcataaaacagtatgaagaagaaaagtttaaaaagaaacaaaaaagagttgatcaagaacttaatggaaaacaagatgaaccgaaaaatgaacagtaagtttggcatctagtccaaacaagactgaagaatgtgctgatggagcagtgctgtttctgcattcataatgcatttattggcccatatttttatgtaacctgttacaaaatagacttgactttttcataatggacttttgtattatacaagggactgttcactgctgtactggtttgcaaatttcttgaatttagctctttaatagctaactgtattattatcgttttatattttatattgctaaatagagaaccacactttatataaagtagtttttgcatttgtttattgaatgatgcatcttcttcggtgaaatatttatatgcataaatggcaaaggaaagaaataatatatatttttatgtcattgagcaatattttttaatgtgtacctgtcttatggaagaaatatgcaggtatataagaccacgattttctaaagtgcatattagaatttttgtttttgtaaatggttaaatacatttcctgggtaacttaggaaattaagtttttcataaggcaacagatggttaaactgattgtcatgaatacccaaagatcatgtatataatcgaagtgtattagtaccatcccaaggtttttttctcatttaacatatttgtttcataattcagcaagtacagatgcaagcgcattgcacactttttcctttctaaacttaaagacaagtcaaaaagccattcttagaactagaggatttaagagggtaggaattagggtttgtatatatgtatatatgggacattttatcttctggcccaaagtcagaactttataaaaatcttgagtttgttcactaatgtgaaataagctatgtgtccagggtattgctcccctgagtgtatatgagtgctgagtagtattgcagagaatgtgatgagttattcactgtcacaactttttctatagaaaacaggggctgctttttaaactctcactatgggcactttaccaaaatacttccatatcaattatttgaactcggtagttgtttgacctagttagatgtggtgtttattcaagtttgtatgaaatcatgtttgacaatactgtaaattaggttaattttgtaagtcttagcatcatcatattgtgctgttttggataacacgtttgttacaagcatttaaactgtttcatttggtagtacctttacattgaaataaattgtgtttgtgcctccaaacaaaaagtttaattaccgacaaaattatttctaaaacaacagattgatctgatattgtgtcatatacttgaaaggctcatacacagctggtaagcataataccttccaaatttgaaggtcatggctactcttcaacccttcctgtaaggtattttacaaaacagtggcctagagtagcaaaattgaagtggatgtgagctaacctttcaagatttagtctatcctagattgaacacacatgtggctgtgaccattctcatgtacttacaaaccttctgttacaaaagggaactttcctatattttttgtcctcctcagtcctaaacttggcatgctaacttaaaaccagttataggagagagatgctggaggattcccaggatgaaacattcctcagcagcctcctgacttaactcagatccagcagctcttggcagatcctgaactaatgtcattacagtgaattgagccaaaacgattattgcttgctcacattttaggaacactttttgttgaagaagcaaactaacaataacaagttaggcattccttctgaatttaccatataaggattatgtataaacaattatattgaatttgtcattagattctatatttgtagacgatttaacgtagtctttcatctgtacatctttatcttgttcaaaatgggctgaggtttttaataggtggttttctaccacattaagtacttggttcttcattttaaaaaatatgaagaataacttcaactcttttttgcattattttgatttttgattttgcagtcattgctcctaactgtagatacatgttgcaaaagtgatgtttttctgaattttttttaaaagtagaagactattctgttaaacattaaaattcagagacaacagtgataacacctgggatataatgaaaatgaggtgctgtgaatcagtaaactaaagggatacctgctttaacctgcaccttaatggaatctggtatagagatgtacccacaataaatgttttataagatttaagatcataatagtaggttagaggaagagcatttattaagtctgttgtttctaatctatagctaagttaacatctcccatattattccattttaatttcccattactgaccaaggtgaaagtatatgtgactgtacttttatctttctgttgggatcatggatctaatttaactggcttaatttgatgcttctgtcactaggctctaagtgccccttttttagtcagaagtttttcatgtgaaataatttgattctgtgttctgcttgatcatactcctaagcaagcaccaagggaagacgttctattcaccccacaatttaagcttaacaatctttaactcagagggagatatgaagaaatatgattctaagtagggtctagcagaggcattggaaagtgataaaagtaggaagtaagagaaagcaaacctttataaagagataaagacatagttgttacctaagatgccactgtatgtgtgccctctctttttttttttttttttttggagacagagactcactctgtcacccattctggagtgcagtggcgcaatcctggctcactgcaacctctgcctcccgggttcaagcatttctcctgcctcagcctcctgagtagctgggattacaggcacacgccacaatgcccggctaatttttgtatttttagtagagacggggtttcgccatgctaggctggtctcgaactc

SEQ ID NO: 735202 - DNA, 3886 bp, Homo sapiens
  misc_feature (3473)..(3473): n is a, c, g, or t
attacaagcgtaaaccaccgcgcccgacctcctccccttatttcatccattttataattcacattattgatcgctgataattgcacctattgtaatgatactgataattgcacctgttgtaataatattgatattgataattgcacctattgtattacaatattattattgatatcgataatttcacctactgtaatgatcaataaaggcaggcagaaagaaaacaaaagtaactgaaactaccaggcagcgtccctgcgaacagcaaagagggaagaaacgccttgaggcgtagtaacgccaccaataaggagtcgacgcgacgggtccgcccacaggcaaggaaggccgaccccgcgagtgcaggcgcgagcgctagcccgtgacgtctgagggggttggggggatgctgtgtgggtttcaagaagacgccacgcctccgccgccgccacgcccccgccgcctccaccgccggctgccgcgcccggaggaggtcgggatgttatcacttccgccggggcttctcactgtgtccgggtcagctgctgccgccgacgccgtaccgctgcggccgggggattgggccggggtctccaccgccgaccgaggggagcgggctccgctcggccctgctttttgcgacctggccgtcagccccacgtcgccggcctggaggggcgaagaggacgagggggccaaggcttcctccggggacattggctccctggattatcaagagtttgtagttgacattgaatccaggctgaggatggaaggtgtggaacttaaagaagaatggcaagatgaagattttccgatacctttaccagaagatgatagtattgaagcagatatactagctataactggaccagaggaccagcctggctcactagaagttaatggaaataaagtgagaaagaaactaatggctccagacattagcctgacactggatcctagtgatggctctgtattgtcagatgatttggatgaaagtggggagattgacttagatggcttagacacaccgtcagagaatagtaatgagtttgagtgggaagtcatttcctggaaggatattttccgttaacagctttgtcttggaaacaactaacatgcagtaggtttccccctccccccatcttttgatgatcttccaaaacccaagactactgaagtaattaggaaaggctcaattactgaatacacagcagcagaggaaaaagaagatggacgacgctggcgtatgttcaggattggagaacaggaccacagggttgatatgaaggcaattgaaccctataaaaaagttatcagccatgggggatattatggggatggattaaatgccattgttgtgtttgctgtctgtttcatgcctgaaagtagtcagcctaactatagatacctgatggacaatctttttaaatatgttattggcactttggagctattagtagcagaaaactacatgatagtttatttaaatggtgcaacaactcgaagaaaaatgcccagtctgggatggctcaggaaatgttatcagcaaattgatagaaggttacggaaaaatctaaaatccctaatcattgtacatccttcttggtttatcagaacacttctggctgttacaagaccatttattagctcgaaattcagccaaaaaattagatacgtgtttaatttggcagaactagcagaacttgtccccatggaatacgttggcataccagaatgcataaaacagtatgaagaagaaaagtttaaaaagaaacaaaaaagagttgatcaagaacttaatggaaaacaagatgaaccgaaaaatgaacagtaagtttggcatctagtccaaacaagactgaagaatgtgctgatggagcagtgctgtttctgcattcataatgcatttattggcccatatttttatgtaacctgttacaaaatagacttgactttttcataatggacttttgtattatacaagggactgttcactgctgtactggtttgcaaatttcttgaatttagctctttaatagctaactgtattattatcgttttatattttatattgctaaatagagaaccacactttatataaagtagtttttgcatttgtttattgaatgatgcatcttcttcggtgaaatatttatatgcataaatggcaaaggaaagaaataatatatatttttatgtcattgagcaatattttttaatgtgtacctgtcttatggaagaaatatgcaggtatataagaccacgattttctaaagtgcatattagaatttttgtttttgtaaatggttaaatacatttcctgggtaacttaggaaattaagtttttcataaggcaacagatggttaaactgattgtcatgaatacccaaagatcatgtatataatcgaagtgtattagtaccatcccaaggtttttttctcatttaacatatttgtttcataattcagcaagtacagatgcaagcgcattgcacactttttcctttctaaacttaaagacaagtcaaaaagccattcttagaactagaggatttaagagggtaggaattagggtttgtatatatgtatatatgggacattttatcttctggcccaaagtcagaactttataaaaatcttgagtttgttcactaatgtgaaataagctatgtgtccagggtattgctcccctgagtgtatatgagtgctgagtagtattgcagagaatgtgatgagttattcactgtcacaactttttctatagaaaacaggggctgctttttaaactctcactatgggcactttaccaaaatacttccatatcaattatttgaactcggtagttgtttgacctagttagatgtggtgtttattcaagtttgtatgaaatcatgtttgacaatactgtaaattaggttaattttgtaagtcttagcatcatcatattgtgctgttttggataacacgtttgttacaagcatttaaactgtttcatttggtagtacctttacattgaaataaattgtgtttgtgcctccaaacaaaaaaaaaaaaaaaaaaaaaaaaaaaaaaaaaaaaaccgcggggcgctttttttgtggggggcggcgaaaaagagggcgttattgtgaggtgggcgcccgtgtggtccttcgcgtgtgtttcccttggccccatttttttgtgtccagcggtgggtaataacttcgtgcgcgggctccccctattttgtgggaggcgctcgatattaattttgccgatttagcgccccggtgttctcccccctgcttattattagtatcttcccgtcttacctccccccggggcattactacttctccccccgtccctgctagcacggcgcgcattatctctgtgtgtatccccaacgagaacttcttttcagcaataaccccttttcattctctctggcggacgatcaaatcctctgcgttgcgtcgtcggcccanagcacaacacagccccgccggcttttaccggcgcggtgtggtgtttttggtattgccgggacacacactcacgtctgcccaccacctattttatctcgcgaggaggtactctgttgtttcttcgaactcgactcgcgatgtttatccatactctccgtggtctctctcttgttgttaccccgggtatttacgtcgccccaccattttagacacactttctttgtagccccgcgttatatattactatcgagctctggattatctagtggtcccaccagtggtgacttccgcccagtcgcataactcgtttcttcaccggcgtcgccactaacacgatgcctagtgcggaacagcgccagcgctggacaacggggcttctaccttcccccttttcatctactattacgcgtgta

SEQ ID NO: 735203 - DNA, 4554 bp, Homo sapiens
attacaagcgtaaaccaccgcgcccgacctcctccccttatttcatccattttataattcacattattgatcgctgataattgcacctattgtaatgatactgataattgcacctgttgtaataatattgatattgataattgcacctattgtattacaatattattattgatatcgataatttcacctactgtaatgatcaataaaggcaggcagaaagaaaacaaaagtaactgaaactaccaggcagcgtccctgcgaacagcaaagagggaagaaacgccttgaggcgtagtaacgccaccaataaggagtcgacgcgacgggtccgcccacaggcaaggaaggccgaccccgcgagtgcaggcgcgagcgctagcccgtgacgtctgagggggttggggggatgctgtgtgggtttcaagaagacgccacgcctccgccgccgccacgcccccgccgcctccaccgccggctgccgcgcccggaggaggtcgggatgttatcacttccgccggggcttctcactgtgtccgggtcagctgctgccgccgacgccgtaccgctgcggccgggggattgggccggggtctccaccgccgaccgaggggagcgggctccgctcggccctgctttttgcgacctggccgtcagccccacgtcgccggcctggaggggcgaagaggacgagggggccaaggcttcctccggggacattggctccctggattatcaagagtttgtagttgacattgaatccaggctgaggatggaaggtgtggaacttaaagaagaatggcaagatgaagattttccgatacctttaccagaagatgatagtattgaagcagatatactagctataactggaccagaggaccagcctggctcactagaagttaatggaaataaagtgagaaagaaactaatggctccagacattagcctgacactggatcctagtgatggctctgtattgtcagatgatttggatgaaagtggggagattgacttagatggcttagacacaccgtcagagaatagtaatgagtttgagtgggaagtcatttcctggaaggatattttccgttaacagctttgtcttggaaacaactaacatgcagtaggtttccccctccccccatcttttgatgatcttccaaaacccaagactactgaagtaattaggaaaggctcaattactgaatacacagcagcagaggaaaaagaagatggacgacgctggcgtatgttcaggattggagaacaggaccacagggttgatatgaaggcaattgaaccctataaaaaagttatcagccatgggggatattatggggatggattaaatgccattgttgtgtttgctgtctgtttcatgcctgaaagtagtcagcctaactatagatacctgatggacaatctttttaaatatgttattggcactttggagctattagtagcagaaaactacatgatagtttatttaaatggtgcaacaactcgaagaaaaatgcccagtctgggatggctcaggaaatgttatcagcaaattgatagaaggttacggaaaaatctaaaatccctaatcattgtacatccttcttggtttatcagaacacttctggctgttacaagaccatttattagctcgaaattcagccaaaaaattagatacgtgtttaatttggcagaactagcagaacttgtccccatggaatacgttggcataccagaatgcataaaacagtatgaagaagaaaagtttaaaaagaaacaaaaaagagttgatcaagaacttaatggaaaacaagatgaaccgaaaaatgaacagtaagtttggcatctagtccaaacaagactgaagaatgtgctgatggagcagtgctgtttctgcattcataatgcatttattggcccatatttttatgtaacctgttacaaaatagacttgactttttcataatggacttttgtattatacaagggactgttcactgctgtactggtttgcaaatttcttgaatttagctctttaatagctaactgtattattatcgtttaatttttgtttttgtaaatggttaaatacatttcctgggtaacttaggaaattaagtttttcataaggcaacagatggttaaactgattgtcatgaatacccaaagatcatgtatataatcgaagtgtattagtaccatcccaaggtttttttctcatttaacatatttgtttcataattcagcaagtacagatgcaagcgcattgcacactttttcctttctaaacttaaagacaagtcaaaaagccattcttagaactagaggatttaagagggtaggaattagggtttgtatatatgtatatatgggacattttatcttctggcccaaagtcagaactttataaaaatcttgagtttgttcactaatgtgaaataagctatgtgtccagggtattgctcccctgagtgtatatgagtgctgagtagtattgcagagaatgtgatgagttattcactgtcacaactttttctatagaaaacaggggctgctttttaaactctcactatgggcactttaccaaaatacttccatatcaattatttgaactcggtagttgtttgacctagttagatgtggtgtttattcaagtttgtatgaaatcatgtttgacaatactgtaaattaggttaattttgtaagtcttagcatcatcatattgtgctgttttggataacacgtttgttacaagcatttaaactgtttcatttggtagtacctttacattgaaataaattgtgtttgtgcctccaaacaaaaagtttaattaccgacaaaattatttctaaaacaacagattgatctgatattgtgtcatatacttgaaaggctcatacacagctggtaagcataataccttccaaatttgaaggtcatggctactcttcaacccttcctgtaaggtattttacaaaacagtggcctagagtagcaaaattgaagtggatgtgagctaacctttcaagatttagtctatcctagattgaacacacatgtggctgtgaccattctcatgtacttacaaaccttctgttacaaaagggaactttcctatattttttgtcctcctcagtcctaaacttggcatgctaacttaaaaccagttataggagagagatgctggaggattcccaggatgaaacattcctcagcagcctcctgacttaactcagatccagcagctcttggcagatcctgaactaatgtcattacagtgaattgagccaaaacgattattgcttgctcacattttaggaacactttttgttgaagaagcaaactaacaataacaagttaggcattccttctgaatttaccatataaggattatgtataaacaattatattgaatttgtcattagattctatatttgtagacgatttaacgtagtctttcatctgtacatctttatcttgttcaaaatgggctgaggtttttaataggtggttttctaccacattaagtacttggttcttcattttaaaaaatatgaagaataacttcaactcttttttgcattattttgatttttgattttgcagtcattgctcctaactgtagatacatgttgcaaaagtgatgtttttctgaattttttttaaaagtagaagactattctgttaaacattaaaattcagagacaacagtgataacacctgggatataatgaaaatgaggtgctgtgaatcagtaaactaaagggatacctgctttaacctgcaccttaatggaatctggtatagagatgtacccacaataaatgttttataagatttaagatcataatagtaggttagaggaagagcatttattaagtctgttgtttctaatctatagctaagttaacatctcccatattattccattttaatttcccattactgaccaaggtgaaagtatatgtgactgtacttttatctttctgttgggatcatggatctaatttaactggcttaatttgatgcttctgtcactaggctctaagtgccccttttttagtcagaagtttttcatgtgaaataatttgattctgtgttctgcttgatcatactcctaagcaagcaccaagggaagacgttctattcaccccacaatttaagcttaacaatctttaactcagagggagatatgaagaaatatgattctaagtagggtctagcagaggcattggaaagtgataaaagtaggaagtaagagaaagcaaacctttataaagagataaagacatagttgttacctaagatgccactgtatgtgtgccctctctttttttttttttttttttggagacagagactcactctgtcacccattctggagtgcagtggcgcaatcctggctcactgcaacctctgcctcccgggttcaagcatttctcctgcctcagcctcctgagtagctgggattacaggcacacgccacaatgcccggctaatttttgtatttttagtagagacggggtttcgccatgctaggctggtctcgaactc

SEQ ID NO: 735204 - DNA, 3660 bp, Homo sapiens
  misc_feature (3247)..(3247): n is a, c, g, or t
attacaagcgtaaaccaccgcgcccgacctcctccccttatttcatccattttataattcacattattgatcgctgataattgcacctattgtaatgatactgataattgcacctgttgtaataatattgatattgataattgcacctattgtattacaatattattattgatatcgataatttcacctactgtaatgatcaataaaggcaggcagaaagaaaacaaaagtaactgaaactaccaggcagcgtccctgcgaacagcaaagagggaagaaacgccttgaggcgtagtaacgccaccaataaggagtcgacgcgacgggtccgcccacaggcaaggaaggccgaccccgcgagtgcaggcgcgagcgctagcccgtgacgtctgagggggttggggggatgctgtgtgggtttcaagaagacgccacgcctccgccgccgccacgcccccgccgcctccaccgccggctgccgcgcccggaggaggtcgggatgttatcacttccgccggggcttctcactgtgtccgggtcagctgctgccgccgacgccgtaccgctgcggccgggggattgggccggggtctccaccgccgaccgaggggagcgggctccgctcggccctgctttttgcgacctggccgtcagccccacgtcgccggcctggaggggcgaagaggacgagggggccaaggcttcctccggggacattggctccctggattatcaagagtttgtagttgacattgaatccaggctgaggatggaaggtgtggaacttaaagaagaatggcaagatgaagattttccgatacctttaccagaagatgatagtattgaagcagatatactagctataactggaccagaggaccagcctggctcactagaagttaatggaaataaagtgagaaagaaactaatggctccagacattagcctgacactggatcctagtgatggctctgtattgtcagatgatttggatgaaagtggggagattgacttagatggcttagacacaccgtcagagaatagtaatgagtttgagtgggaagtcatttcctggaaggatattttccgttaacagctttgtcttggaaacaactaacatgcagtaggtttccccctccccccatcttttgatgatcttccaaaacccaagactactgaagtaattaggaaaggctcaattactgaatacacagcagcagaggaaaaagaagatggacgacgctggcgtatgttcaggattggagaacaggaccacagggttgatatgaaggcaattgaaccctataaaaaagttatcagccatgggggatattatggggatggattaaatgccattgttgtgtttgctgtctgtttcatgcctgaaagtagtcagcctaactatagatacctgatggacaatctttttaaatatgttattggcactttggagctattagtagcagaaaactacatgatagtttatttaaatggtgcaacaactcgaagaaaaatgcccagtctgggatggctcaggaaatgttatcagcaaattgatagaaggttacggaaaaatctaaaatccctaatcattgtacatccttcttggtttatcagaacacttctggctgttacaagaccatttattagctcgaaattcagccaaaaaattagatacgtgtttaatttggcagaactagcagaacttgtccccatggaatacgttggcataccagaatgcataaaacagtatgaagaagaaaagtttaaaaagaaacaaaaaagagttgatcaagaacttaatggaaaacaagatgaaccgaaaaatgaacagtaagtttggcatctagtccaaacaagactgaagaatgtgctgatggagcagtgctgtttctgcattcataatgcatttattggcccatatttttatgtaacctgttacaaaatagacttgactttttcataatggacttttgtattatacaagggactgttcactgctgtactggtttgcaaatttcttgaatttagctctttaatagctaactgtattattatcgtttaatttttgtttttgtaaatggttaaatacatttcctgggtaacttaggaaattaagtttttcataaggcaacagatggttaaactgattgtcatgaatacccaaagatcatgtatataatcgaagtgtattagtaccatcccaaggtttttttctcatttaacatatttgtttcataattcagcaagtacagatgcaagcgcattgcacactttttcctttctaaacttaaagacaagtcaaaaagccattcttagaactagaggatttaagagggtaggaattagggtttgtatatatgtatatatgggacattttatcttctggcccaaagtcagaactttataaaaatcttgagtttgttcactaatgtgaaataagctatgtgtccagggtattgctcccctgagtgtatatgagtgctgagtagtattgcagagaatgtgatgagttattcactgtcacaactttttctatagaaaacaggggctgctttttaaactctcactatgggcactttaccaaaatacttccatatcaattatttgaactcggtagttgtttgacctagttagatgtggtgtttattcaagtttgtatgaaatcatgtttgacaatactgtaaattaggttaattttgtaagtcttagcatcatcatattgtgctgttttggataacacgtttgttacaagcatttaaactgtttcatttggtagtacctttacattgaaataaattgtgtttgtgcctccaaacaaaaaaaaaaaaaaaaaaaaaaaaaaaaaaaaaaaaaccgcggggcgctttttttgtggggggcggcgaaaaagagggcgttattgtgaggtgggcgcccgtgtggtccttcgcgtgtgtttcccttggccccatttttttgtgtccagcggtgggtaataacttcgtgcgcgggctccccctattttgtgggaggcgctcgatattaattttgccgatttagcgccccggtgttctcccccctgcttattattagtatcttcccgtcttacctccccccggggcattactacttctccccccgtccctgctagcacggcgcgcattatctctgtgtgtatccccaacgagaacttcttttcagcaataaccccttttcattctctctggcggacgatcaaatcctctgcgttgcgtcgtcggcccanagcacaacacagccccgccggcttttaccggcgcggtgtggtgtttttggtattgccgggacacacactcacgtctgcccaccacctattttatctcgcgaggaggtactctgttgtttcttcgaactcgactcgcgatgtttatccatactctccgtggtctctctcttgttgttaccccgggtatttacgtcgccccaccattttagacacactttctttgtagccccgcgttatatattactatcgagctctggattatctagtggtcccaccagtggtgacttccgcccagtcgcataactcgtttcttcaccggcgtcgccactaacacgatgcctagtgcggaacagcgccagcgctggacaacggggcttctaccttcccccttttcatctactattacgcgtgta

SEQ ID NO: 735205 - DNA, 4696 bp, Homo sapiens
attacaagcgtaaaccaccgcgcccgacctcctccccttatttcatccattttataattcacattattgatcgctgataattgcacctattgtaatgatactgataattgcacctgttgtaataatattgatattgataattgcacctattgtattacaatattattattgatatcgataatttcacctactgtaatgatcaataaaggcaggcagaaagaaaacaaaagtaactgaaactaccaggcagcgtccctgcgaacagcaaagagggaagaaacgccttgaggcgtagtaacgccaccaataaggagtcgacgcgacgggtccgcccacaggcaaggaaggccgaccccgcgagtgcaggcgcgagcgctagcccgtgacgtctgagggggttggggggatgctgtgtgggtttcaagaagacgccacgcctccgccgccgccacgcccccgccgcctccaccgccggctgccgcgcccggaggaggtcgggatgttatcacttccgccggggcttctcactgtgtccgggtcagctgctgccgccgacgccgtaccgctgcggccgggggattgggccggggtctccaccgccgaccgaggggagcgggctccgctcggccctgctttttgcgacctggccgtcagccccacgtcgccggcctggaggggcgaagaggacgagggggccaaggcttcctccggggacattggctccctggattatcaagagtttgtagttgacattgaatccaggctgaggatggaaggtgtggaacttaaagaagaatggcaagatgaagattttccgatacctttaccagaagatgatagtattgaagcagatatactagctataactggaccagaggaccagcctggctcactagaagttaatggaaataaagtgagaaagaaactaatggctccagacattagcctgacactggatcctagtgatggctctgtattgtcagatgatttggatgaaagtggggagattgacttagatggcttagacacaccgtcagagaatagtaatgagtttgagtgggaagtcatttcctggaaggatattttccgttaacagctttgtcttggaaacaactaacatgcagtaggtttccccctccccccatcttttgatgatcttccaaaacccaagactactgaagtaattaggaaaggctcaattactgaatacacagcagcagaggaaaaagaagatggacgacgctggcgtatgttcaggattggagaacaggaccacagggttgatatgaaggcaattgaaccctataaaaaagttatcagccatgggggatattatggggatggattaaatgccattgttgtgtttgctgtctgtttcatgcctgaaagtagtcagcctaactatagatacctgatggacaatctttttaaatatgttattggcactttggagctattagtagcagaaaactacatgatagtttatttaaatggtgcaacaactcgaagaaaaatgcccagtctgggatggctcaggaaatgttatcagcaaattgatagaaggttacggaaaaatctaaaatccctaatcattgtacatccttcttggtttatcagaacacttctggctgttacaagaccatttattagctcgaaattcagccaaaaaattagatacgtgtttaatttggcagaactagcagaacttgtccccatggaatacgttggcataccagaatgcataaaacagtatgaagaagaaaagtttaaaaagaaacaaaaaagagttgatcaagaacttaatggaaaacaagatgaaccgaaaaatgaacagtaagtttggcatctagtccaaacaagactgaagaatgtgctgatggagcagtgctgtttctgcattaagggactgttcactgctgtactggtttgcaaatttcttgaatttagctctttaatagctaactgtattattatcgttttatattttatattgctaaatagagaaccacactttatataaagtagtttttgcatttgtttattgaatgatgcatcttcttcggtgaaatatttatatgcataaatggcaaaggaaagaaataatatatatttttatgtcattgagcaatattttttaatgtgtacctgtcttatggaagaaatatgcaggtatataagaccacgattttctaaagtgcatattagaatttttgtttttgtaaatggttaaatacatttcctgggtaacttaggaaattaagtttttcataaggcaacagatggttaaactgattgtcatgaatacccaaagatcatgtatataatcgaagtgtattagtaccatcccaaggtttttttctcatttaacatatttgtttcataattcagcaagtacagatgcaagcgcattgcacactttttcctttctaaacttaaagacaagtcaaaaagccattcttagaactagaggatttaagagggtaggaattagggtttgtatatatgtatatatgggacattttatcttctggcccaaagtcagaactttataaaaatcttgagtttgttcactaatgtgaaataagctatgtgtccagggtattgctcccctgagtgtatatgagtgctgagtagtattgcagagaatgtgatgagttattcactgtcacaactttttctatagaaaacaggggctgctttttaaactctcactatgggcactttaccaaaatacttccatatcaattatttgaactcggtagttgtttgacctagttagatgtggtgtttattcaagtttgtatgaaatcatgtttgacaatactgtaaattaggttaattttgtaagtcttagcatcatcatattgtgctgttttggataacacgtttgttacaagcatttaaactgtttcatttggtagtacctttacattgaaataaattgtgtttgtgcctccaaacaaaaagtttaattaccgacaaaattatttctaaaacaacagattgatctgatattgtgtcatatacttgaaaggctcatacacagctggtaagcataataccttccaaatttgaaggtcatggctactcttcaacccttcctgtaaggtattttacaaaacagtggcctagagtagcaaaattgaagtggatgtgagctaacctttcaagatttagtctatcctagattgaacacacatgtggctgtgaccattctcatgtacttacaaaccttctgttacaaaagggaactttcctatattttttgtcctcctcagtcctaaacttggcatgctaacttaaaaccagttataggagagagatgctggaggattcccaggatgaaacattcctcagcagcctcctgacttaactcagatccagcagctcttggcagatcctgaactaatgtcattacagtgaattgagccaaaacgattattgcttgctcacattttaggaacactttttgttgaagaagcaaactaacaataacaagttaggcattccttctgaatttaccatataaggattatgtataaacaattatattgaatttgtcattagattctatatttgtagacgatttaacgtagtctttcatctgtacatctttatcttgttcaaaatgggctgaggtttttaataggtggttttctaccacattaagtacttggttcttcattttaaaaaatatgaagaataacttcaactcttttttgcattattttgatttttgattttgcagtcattgctcctaactgtagatacatgttgcaaaagtgatgtttttctgaattttttttaaaagtagaagactattctgttaaacattaaaattcagagacaacagtgataacacctgggatataatgaaaatgaggtgctgtgaatcagtaaactaaagggatacctgctttaacctgcaccttaatggaatctggtatagagatgtacccacaataaatgttttataagatttaagatcataatagtaggttagaggaagagcatttattaagtctgttgtttctaatctatagctaagttaacatctcccatattattccattttaatttcccattactgaccaaggtgaaagtatatgtgactgtacttttatctttctgttgggatcatggatctaatttaactggcttaatttgatgcttctgtcactaggctctaagtgccccttttttagtcagaagtttttcatgtgaaataatttgattctgtgttctgcttgatcatactcctaagcaagcaccaagggaagacgttctattcaccccacaatttaagcttaacaatctttaactcagagggagatatgaagaaatatgattctaagtagggtctagcagaggcattggaaagtgataaaagtaggaagtaagagaaagcaaacctttataaagagataaagacatagttgttacctaagatgccactgtatgtgtgccctctctttttttttttttttttttggagacagagactcactctgtcacccattctggagtgcagtggcgcaatcctggctcactgcaacctctgcctcccgggttcaagcatttctcctgcctcagcctcctgagtagctgggattacaggcacacgccacaatgcccggctaatttttgtatttttagtagagacggggtttcgccatgctaggctggtctcgaactc

SEQ ID NO: 735206 - DNA, 3802 bp, Homo sapiens
  misc_feature (3389)..(3389): n is a, c, g, or t
attacaagcgtaaaccaccgcgcccgacctcctccccttatttcatccattttataattcacattattgatcgctgataattgcacctattgtaatgatactgataattgcacctgttgtaataatattgatattgataattgcacctattgtattacaatattattattgatatcgataatttcacctactgtaatgatcaataaaggcaggcagaaagaaaacaaaagtaactgaaactaccaggcagcgtccctgcgaacagcaaagagggaagaaacgccttgaggcgtagtaacgccaccaataaggagtcgacgcgacgggtccgcccacaggcaaggaaggccgaccccgcgagtgcaggcgcgagcgctagcccgtgacgtctgagggggttggggggatgctgtgtgggtttcaagaagacgccacgcctccgccgccgccacgcccccgccgcctccaccgccggctgccgcgcccggaggaggtcgggatgttatcacttccgccggggcttctcactgtgtccgggtcagctgctgccgccgacgccgtaccgctgcggccgggggattgggccggggtctccaccgccgaccgaggggagcgggctccgctcggccctgctttttgcgacctggccgtcagccccacgtcgccggcctggaggggcgaagaggacgagggggccaaggcttcctccggggacattggctccctggattatcaagagtttgtagttgacattgaatccaggctgaggatggaaggtgtggaacttaaagaagaatggcaagatgaagattttccgatacctttaccagaagatgatagtattgaagcagatatactagctataactggaccagaggaccagcctggctcactagaagttaatggaaataaagtgagaaagaaactaatggctccagacattagcctgacactggatcctagtgatggctctgtattgtcagatgatttggatgaaagtggggagattgacttagatggcttagacacaccgtcagagaatagtaatgagtttgagtgggaagtcatttcctggaaggatattttccgttaacagctttgtcttggaaacaactaacatgcagtaggtttccccctccccccatcttttgatgatcttccaaaacccaagactactgaagtaattaggaaaggctcaattactgaatacacagcagcagaggaaaaagaagatggacgacgctggcgtatgttcaggattggagaacaggaccacagggttgatatgaaggcaattgaaccctataaaaaagttatcagccatgggggatattatggggatggattaaatgccattgttgtgtttgctgtctgtttcatgcctgaaagtagtcagcctaactatagatacctgatggacaatctttttaaatatgttattggcactttggagctattagtagcagaaaactacatgatagtttatttaaatggtgcaacaactcgaagaaaaatgcccagtctgggatggctcaggaaatgttatcagcaaattgatagaaggttacggaaaaatctaaaatccctaatcattgtacatccttcttggtttatcagaacacttctggctgttacaagaccatttattagctcgaaattcagccaaaaaattagatacgtgtttaatttggcagaactagcagaacttgtccccatggaatacgttggcataccagaatgcataaaacagtatgaagaagaaaagtttaaaaagaaacaaaaaagagttgatcaagaacttaatggaaaacaagatgaaccgaaaaatgaacagtaagtttggcatctagtccaaacaagactgaagaatgtgctgatggagcagtgctgtttctgcattaagggactgttcactgctgtactggtttgcaaatttcttgaatttagctctttaatagctaactgtattattatcgttttatattttatattgctaaatagagaaccacactttatataaagtagtttttgcatttgtttattgaatgatgcatcttcttcggtgaaatatttatatgcataaatggcaaaggaaagaaataatatatatttttatgtcattgagcaatattttttaatgtgtacctgtcttatggaagaaatatgcaggtatataagaccacgattttctaaagtgcatattagaatttttgtttttgtaaatggttaaatacatttcctgggtaacttaggaaattaagtttttcataaggcaacagatggttaaactgattgtcatgaatacccaaagatcatgtatataatcgaagtgtattagtaccatcccaaggtttttttctcatttaacatatttgtttcataattcagcaagtacagatgcaagcgcattgcacactttttcctttctaaacttaaagacaagtcaaaaagccattcttagaactagaggatttaagagggtaggaattagggtttgtatatatgtatatatgggacattttatcttctggcccaaagtcagaactttataaaaatcttgagtttgttcactaatgtgaaataagctatgtgtccagggtattgctcccctgagtgtatatgagtgctgagtagtattgcagagaatgtgatgagttattcactgtcacaactttttctatagaaaacaggggctgctttttaaactctcactatgggcactttaccaaaatacttccatatcaattatttgaactcggtagttgtttgacctagttagatgtggtgtttattcaagtttgtatgaaatcatgtttgacaatactgtaaattaggttaattttgtaagtcttagcatcatcatattgtgctgttttggataacacgtttgttacaagcatttaaactgtttcatttggtagtacctttacattgaaataaattgtgtttgtgcctccaaacaaaaaaaaaaaaaaaaaaaaaaaaaaaaaaaaaaaaaccgcggggcgctttttttgtggggggcggcgaaaaagagggcgttattgtgaggtgggcgcccgtgtggtccttcgcgtgtgtttcccttggccccatttttttgtgtccagcggtgggtaataacttcgtgcgcgggctccccctattttgtgggaggcgctcgatattaattttgccgatttagcgccccggtgttctcccccctgcttattattagtatcttcccgtcttacctccccccggggcattactacttctccccccgtccctgctagcacggcgcgcattatctctgtgtgtatccccaacgagaacttcttttcagcaataaccccttttcattctctctggcggacgatcaaatcctctgcgttgcgtcgtcggcccanagcacaacacagccccgccggcttttaccggcgcggtgtggtgtttttggtattgccgggacacacactcacgtctgcccaccacctattttatctcgcgaggaggtactctgttgtttcttcgaactcgactcgcgatgtttatccatactctccgtggtctctctcttgttgttaccccgggtatttacgtcgccccaccattttagacacactttctttgtagccccgcgttatatattactatcgagctctggattatctagtggtcccaccagtggtgacttccgcccagtcgcataactcgtttcttcaccggcgtcgccactaacacgatgcctagtgcggaacagcgccagcgctggacaacggggcttctaccttcccccttttcatctactattacgcgtgta

SEQ ID NO: 735207 - DNA, 4470 bp, Homo sapiens
attacaagcgtaaaccaccgcgcccgacctcctccccttatttcatccattttataattcacattattgatcgctgataattgcacctattgtaatgatactgataattgcacctgttgtaataatattgatattgataattgcacctattgtattacaatattattattgatatcgataatttcacctactgtaatgatcaataaaggcaggcagaaagaaaacaaaagtaactgaaactaccaggcagcgtccctgcgaacagcaaagagggaagaaacgccttgaggcgtagtaacgccaccaataaggagtcgacgcgacgggtccgcccacaggcaaggaaggccgaccccgcgagtgcaggcgcgagcgctagcccgtgacgtctgagggggttggggggatgctgtgtgggtttcaagaagacgccacgcctccgccgccgccacgcccccgccgcctccaccgccggctgccgcgcccggaggaggtcgggatgttatcacttccgccggggcttctcactgtgtccgggtcagctgctgccgccgacgccgtaccgctgcggccgggggattgggccggggtctccaccgccgaccgaggggagcgggctccgctcggccctgctttttgcgacctggccgtcagccccacgtcgccggcctggaggggcgaagaggacgagggggccaaggcttcctccggggacattggctccctggattatcaagagtttgtagttgacattgaatccaggctgaggatggaaggtgtggaacttaaagaagaatggcaagatgaagattttccgatacctttaccagaagatgatagtattgaagcagatatactagctataactggaccagaggaccagcctggctcactagaagttaatggaaataaagtgagaaagaaactaatggctccagacattagcctgacactggatcctagtgatggctctgtattgtcagatgatttggatgaaagtggggagattgacttagatggcttagacacaccgtcagagaatagtaatgagtttgagtgggaagtcatttcctggaaggatattttccgttaacagctttgtcttggaaacaactaacatgcagtaggtttccccctccccccatcttttgatgatcttccaaaacccaagactactgaagtaattaggaaaggctcaattactgaatacacagcagcagaggaaaaagaagatggacgacgctggcgtatgttcaggattggagaacaggaccacagggttgatatgaaggcaattgaaccctataaaaaagttatcagccatgggggatattatggggatggattaaatgccattgttgtgtttgctgtctgtttcatgcctgaaagtagtcagcctaactatagatacctgatggacaatctttttaaatatgttattggcactttggagctattagtagcagaaaactacatgatagtttatttaaatggtgcaacaactcgaagaaaaatgcccagtctgggatggctcaggaaatgttatcagcaaattgatagaaggttacggaaaaatctaaaatccctaatcattgtacatccttcttggtttatcagaacacttctggctgttacaagaccatttattagctcgaaattcagccaaaaaattagatacgtgtttaatttggcagaactagcagaacttgtccccatggaatacgttggcataccagaatgcataaaacagtatgaagaagaaaagtttaaaaagaaacaaaaaagagttgatcaagaacttaatggaaaacaagatgaaccgaaaaatgaacagtaagtttggcatctagtccaaacaagactgaagaatgtgctgatggagcagtgctgtttctgcattaagggactgttcactgctgtactggtttgcaaatttcttgaatttagctctttaatagctaactgtattattatcgtttaatttttgtttttgtaaatggttaaatacatttcctgggtaacttaggaaattaagtttttcataaggcaacagatggttaaactgattgtcatgaatacccaaagatcatgtatataatcgaagtgtattagtaccatcccaaggtttttttctcatttaacatatttgtttcataattcagcaagtacagatgcaagcgcattgcacactttttcctttctaaacttaaagacaagtcaaaaagccattcttagaactagaggatttaagagggtaggaattagggtttgtatatatgtatatatgggacattttatcttctggcccaaagtcagaactttataaaaatcttgagtttgttcactaatgtgaaataagctatgtgtccagggtattgctcccctgagtgtatatgagtgctgagtagtattgcagagaatgtgatgagttattcactgtcacaactttttctatagaaaacaggggctgctttttaaactctcactatgggcactttaccaaaatacttccatatcaattatttgaactcggtagttgtttgacctagttagatgtggtgtttattcaagtttgtatgaaatcatgtttgacaatactgtaaattaggttaattttgtaagtcttagcatcatcatattgtgctgttttggataacacgtttgttacaagcatttaaactgtttcatttggtagtacctttacattgaaataaattgtgtttgtgcctccaaacaaaaagtttaattaccgacaaaattatttctaaaacaacagattgatctgatattgtgtcatatacttgaaaggctcatacacagctggtaagcataataccttccaaatttgaaggtcatggctactcttcaacccttcctgtaaggtattttacaaaacagtggcctagagtagcaaaattgaagtggatgtgagctaacctttcaagatttagtctatcctagattgaacacacatgtggctgtgaccattctcatgtacttacaaaccttctgttacaaaagggaactttcctatattttttgtcctcctcagtcctaaacttggcatgctaacttaaaaccagttataggagagagatgctggaggattcccaggatgaaacattcctcagcagcctcctgacttaactcagatccagcagctcttggcagatcctgaactaatgtcattacagtgaattgagccaaaacgattattgcttgctcacattttaggaacactttttgttgaagaagcaaactaacaataacaagttaggcattccttctgaatttaccatataaggattatgtataaacaattatattgaatttgtcattagattctatatttgtagacgatttaacgtagtctttcatctgtacatctttatcttgttcaaaatgggctgaggtttttaataggtggttttctaccacattaagtacttggttcttcattttaaaaaatatgaagaataacttcaactcttttttgcattattttgatttttgattttgcagtcattgctcctaactgtagatacatgttgcaaaagtgatgtttttctgaattttttttaaaagtagaagactattctgttaaacattaaaattcagagacaacagtgataacacctgggatataatgaaaatgaggtgctgtgaatcagtaaactaaagggatacctgctttaacctgcaccttaatggaatctggtatagagatgtacccacaataaatgttttataagatttaagatcataatagtaggttagaggaagagcatttattaagtctgttgtttctaatctatagctaagttaacatctcccatattattccattttaatttcccattactgaccaaggtgaaagtatatgtgactgtacttttatctttctgttgggatcatggatctaatttaactggcttaatttgatgcttctgtcactaggctctaagtgccccttttttagtcagaagtttttcatgtgaaataatttgattctgtgttctgcttgatcatactcctaagcaagcaccaagggaagacgttctattcaccccacaatttaagcttaacaatctttaactcagagggagatatgaagaaatatgattctaagtagggtctagcagaggcattggaaagtgataaaagtaggaagtaagagaaagcaaacctttataaagagataaagacatagttgttacctaagatgccactgtatgtgtgccctctctttttttttttttttttttggagacagagactcactctgtcacccattctggagtgcagtggcgcaatcctggctcactgcaacctctgcctcccgggttcaagcatttctcctgcctcagcctcctgagtagctgggattacaggcacacgccacaatgcccggctaatttttgtatttttagtagagacggggtttcgccatgctaggctggtctcgaactc

SEQ ID NO: 735208 - DNA, 3576 bp, Homo sapiens
  misc_feature (3163)..(3163): n is a, c, g, or t
attacaagcgtaaaccaccgcgcccgacctcctccccttatttcatccattttataattcacattattgatcgctgataattgcacctattgtaatgatactgataattgcacctgttgtaataatattgatattgataattgcacctattgtattacaatattattattgatatcgataatttcacctactgtaatgatcaataaaggcaggcagaaagaaaacaaaagtaactgaaactaccaggcagcgtccctgcgaacagcaaagagggaagaaacgccttgaggcgtagtaacgccaccaataaggagtcgacgcgacgggtccgcccacaggcaaggaaggccgaccccgcgagtgcaggcgcgagcgctagcccgtgacgtctgagggggttggggggatgctgtgtgggtttcaagaagacgccacgcctccgccgccgccacgcccccgccgcctccaccgccggctgccgcgcccggaggaggtcgggatgttatcacttccgccggggcttctcactgtgtccgggtcagctgctgccgccgacgccgtaccgctgcggccgggggattgggccggggtctccaccgccgaccgaggggagcgggctccgctcggccctgctttttgcgacctggccgtcagccccacgtcgccggcctggaggggcgaagaggacgagggggccaaggcttcctccggggacattggctccctggattatcaagagtttgtagttgacattgaatccaggctgaggatggaaggtgtggaacttaaagaagaatggcaagatgaagattttccgatacctttaccagaagatgatagtattgaagcagatatactagctataactggaccagaggaccagcctggctcactagaagttaatggaaataaagtgagaaagaaactaatggctccagacattagcctgacactggatcctagtgatggctctgtattgtcagatgatttggatgaaagtggggagattgacttagatggcttagacacaccgtcagagaatagtaatgagtttgagtgggaagtcatttcctggaaggatattttccgttaacagctttgtcttggaaacaactaacatgcagtaggtttccccctccccccatcttttgatgatcttccaaaacccaagactactgaagtaattaggaaaggctcaattactgaatacacagcagcagaggaaaaagaagatggacgacgctggcgtatgttcaggattggagaacaggaccacagggttgatatgaaggcaattgaaccctataaaaaagttatcagccatgggggatattatggggatggattaaatgccattgttgtgtttgctgtctgtttcatgcctgaaagtagtcagcctaactatagatacctgatggacaatctttttaaatatgttattggcactttggagctattagtagcagaaaactacatgatagtttatttaaatggtgcaacaactcgaagaaaaatgcccagtctgggatggctcaggaaatgttatcagcaaattgatagaaggttacggaaaaatctaaaatccctaatcattgtacatccttcttggtttatcagaacacttctggctgttacaagaccatttattagctcgaaattcagccaaaaaattagatacgtgtttaatttggcagaactagcagaacttgtccccatggaatacgttggcataccagaatgcataaaacagtatgaagaagaaaagtttaaaaagaaacaaaaaagagttgatcaagaacttaatggaaaacaagatgaaccgaaaaatgaacagtaagtttggcatctagtccaaacaagactgaagaatgtgctgatggagcagtgctgtttctgcattaagggactgttcactgctgtactggtttgcaaatttcttgaatttagctctttaatagctaactgtattattatcgtttaatttttgtttttgtaaatggttaaatacatttcctgggtaacttaggaaattaagtttttcataaggcaacagatggttaaactgattgtcatgaatacccaaagatcatgtatataatcgaagtgtattagtaccatcccaaggtttttttctcatttaacatatttgtttcataattcagcaagtacagatgcaagcgcattgcacactttttcctttctaaacttaaagacaagtcaaaaagccattcttagaactagaggatttaagagggtaggaattagggtttgtatatatgtatatatgggacattttatcttctggcccaaagtcagaactttataaaaatcttgagtttgttcactaatgtgaaataagctatgtgtccagggtattgctcccctgagtgtatatgagtgctgagtagtattgcagagaatgtgatgagttattcactgtcacaactttttctatagaaaacaggggctgctttttaaactctcactatgggcactttaccaaaatacttccatatcaattatttgaactcggtagttgtttgacctagttagatgtggtgtttattcaagtttgtatgaaatcatgtttgacaatactgtaaattaggttaattttgtaagtcttagcatcatcatattgtgctgttttggataacacgtttgttacaagcatttaaactgtttcatttggtagtacctttacattgaaataaattgtgtttgtgcctccaaacaaaaaaaaaaaaaaaaaaaaaaaaaaaaaaaaaaaaaccgcggggcgctttttttgtggggggcggcgaaaaagagggcgttattgtgaggtgggcgcccgtgtggtccttcgcgtgtgtttcccttggccccatttttttgtgtccagcggtgggtaataacttcgtgcgcgggctccccctattttgtgggaggcgctcgatattaattttgccgatttagcgccccggtgttctcccccctgcttattattagtatcttcccgtcttacctccccccggggcattactacttctccccccgtccctgctagcacggcgcgcattatctctgtgtgtatccccaacgagaacttcttttcagcaataaccccttttcattctctctggcggacgatcaaatcctctgcgttgcgtcgtcggcccanagcacaacacagccccgccggcttttaccggcgcggtgtggtgtttttggtattgccgggacacacactcacgtctgcccaccacctattttatctcgcgaggaggtactctgttgtttcttcgaactcgactcgcgatgtttatccatactctccgtggtctctctcttgttgttaccccgggtatttacgtcgccccaccattttagacacactttctttgtagccccgcgttatatattactatcgagctctggattatctagtggtcccaccagtggtgacttccgcccagtcgcataactcgtttcttcaccggcgtcgccactaacacgatgcctagtgcggaacagcgccagcgctggacaacggggcttctaccttcccccttttcatctactattacgcgtgta

SEQ ID NO: 735209 - DNA, 4726 bp, Homo sapiens
attacaagcgtaaaccaccgcgcccgacctcctccccttatttcatccattttataattcacattattgatcgctgataattgcacctattgtaatgatactgataattgcacctgttgtaataatattgatattgataattgcacctattgtattacaatattattattgatatcgataatttcacctactgtaatgatcaataaaggcaggcagaaagaaaacaaaagtaactgaaactaccaggcagcgtccctgcgaacagcaaagagggaagaaacgccttgaggcgtagtaacgccaccaataaggagtcgacgcgacgggtccgcccacaggcaaggaaggccgaccccgcgagtgcaggcgcgagcgctagcccgtgacgtctgagggggttggggggatgctgtgtgggtttcaagaagacgccacgcctccgccgccgccacgcccccgccgcctccaccgccggctgccgcgcccggaggaggtcgggatgttatcacttccgccggggcttctcactgtgtccgggtcagctgctgccgccgacgccgtaccgctgcggccgggggattgggccggggtctccaccgccgaccgaggggagcgggctccgctcggccctgctttttgcgacctggccgtcagccccacgtcgccggcctggaggggcgaagaggacgagggggccaaggcttcctccggggacattggctccctggattatcaagagtttgtagttgacattgaatccaggctgaggatggaaggtgtggaacttaaagaagaatggcaagatgaagattttccgatacctttaccagaagatgatagtattgaagcagatatactagctataactggaccagaggaccagcctggctcactagaagttaatggaaataaagtgagaaagaaactaatggctccagacattagcctgacactggatcctagtgatggctctgtattgtcagatgatttggatgaaagtggggagattgacttagatggcttagacacaccgtcagagaatagtaatgagtttgagtgggaagtcatttcctggaaggatattttccgttaacagctttgtcttggaaacaactaacatgcagtaggtttccccctccccccatcttttgatgatcttccaaaacccaagactactgaagtaattaggaaaggctcaattactgaatacacagcagcagaggaaaaagaagatggacgacgctggcgtatgttcaggattggagaacaggaccacagggttgatatgaaggcaattgaaccctataagtttgctgtctgtttcatgcctgaaagtagtcagcctaactatagatacctgatggacaatctttttaaatatgttattggcactttggagctattagtagcagaaaactacatgatagtttatttaaatggtgcaacaactcgaagaaaaatgcccagtctgggatggctcaggaaatgttatcagcaaattgatagaaggttacggaaaaatctaaaatccctaatcattgtacatccttcttggtttatcagaacacttctggctgttacaagaccatttattagctcgaaattcagccaaaaaattagatacgtgtttaatttggcagaactagcagaacttgtccccatggaatacgttggcataccagaatgcataaaacagtatgaagaagaaaagtttaaaaagaaacaaaaaagagttgatcaagaacttaatggaaaacaagatgaaccgaaaaatgaacagtaagtttggcatctagtccaaacaagactgaagaatgtgctgatggagcagtgctgtttctgcattcataatgcatttattggcccatatttttatgtaacctgttacaaaatagacttgactttttcataatggacttttgtattatacaagggactgttcactgctgtactggtttgcaaatttcttgaatttagctctttaatagctaactgtattattatcgttttatattttatattgctaaatagagaaccacactttatataaagtagtttttgcatttgtttattgaatgatgcatcttcttcggtgaaatatttatatgcataaatggcaaaggaaagaaataatatatatttttatgtcattgagcaatattttttaatgtgtacctgtcttatggaagaaatatgcaggtatataagaccacgattttctaaagtgcatattagaatttttgtttttgtaaatggttaaatacatttcctgggtaacttaggaaattaagtttttcataaggcaacagatggttaaactgattgtcatgaatacccaaagatcatgtatataatcgaagtgtattagtaccatcccaaggtttttttctcatttaacatatttgtttcataattcagcaagtacagatgcaagcgcattgcacactttttcctttctaaacttaaagacaagtcaaaaagccattcttagaactagaggatttaagagggtaggaattagggtttgtatatatgtatatatgggacattttatcttctggcccaaagtcagaactttataaaaatcttgagtttgttcactaatgtgaaataagctatgtgtccagggtattgctcccctgagtgtatatgagtgctgagtagtattgcagagaatgtgatgagttattcactgtcacaactttttctatagaaaacaggggctgctttttaaactctcactatgggcactttaccaaaatacttccatatcaattatttgaactcggtagttgtttgacctagttagatgtggtgtttattcaagtttgtatgaaatcatgtttgacaatactgtaaattaggttaattttgtaagtcttagcatcatcatattgtgctgttttggataacacgtttgttacaagcatttaaactgtttcatttggtagtacctttacattgaaataaattgtgtttgtgcctccaaacaaaaagtttaattaccgacaaaattatttctaaaacaacagattgatctgatattgtgtcatatacttgaaaggctcatacacagctggtaagcataataccttccaaatttgaaggtcatggctactcttcaacccttcctgtaaggtattttacaaaacagtggcctagagtagcaaaattgaagtggatgtgagctaacctttcaagatttagtctatcctagattgaacacacatgtggctgtgaccattctcatgtacttacaaaccttctgttacaaaagggaactttcctatattttttgtcctcctcagtcctaaacttggcatgctaacttaaaaccagttataggagagagatgctggaggattcccaggatgaaacattcctcagcagcctcctgacttaactcagatccagcagctcttggcagatcctgaactaatgtcattacagtgaattgagccaaaacgattattgcttgctcacattttaggaacactttttgttgaagaagcaaactaacaataacaagttaggcattccttctgaatttaccatataaggattatgtataaacaattatattgaatttgtcattagattctatatttgtagacgatttaacgtagtctttcatctgtacatctttatcttgttcaaaatgggctgaggtttttaataggtggttttctaccacattaagtacttggttcttcattttaaaaaatatgaagaataacttcaactcttttttgcattattttgatttttgattttgcagtcattgctcctaactgtagatacatgttgcaaaagtgatgtttttctgaattttttttaaaagtagaagactattctgttaaacattaaaattcagagacaacagtgataacacctgggatataatgaaaatgaggtgctgtgaatcagtaaactaaagggatacctgctttaacctgcaccttaatggaatctggtatagagatgtacccacaataaatgttttataagatttaagatcataatagtaggttagaggaagagcatttattaagtctgttgtttctaatctatagctaagttaacatctcccatattattccattttaatttcccattactgaccaaggtgaaagtatatgtgactgtacttttatctttctgttgggatcatggatctaatttaactggcttaatttgatgcttctgtcactaggctctaagtgccccttttttagtcagaagtttttcatgtgaaataatttgattctgtgttctgcttgatcatactcctaagcaagcaccaagggaagacgttctattcaccccacaatttaagcttaacaatctttaactcagagggagatatgaagaaatatgattctaagtagggtctagcagaggcattggaaagtgataaaagtaggaagtaagagaaagcaaacctttataaagagataaagacatagttgttacctaagatgccactgtatgtgtgccctctctttttttttttttttttttggagacagagactcactctgtcacccattctggagtgcagtggcgcaatcctggctcactgcaacctctgcctcccgggttcaagcatttctcctgcctcagcctcctgagtagctgggattacaggcacacgccacaatgcccggctaatttttgtatttttagtagagacggggtttcgccatgctaggctggtctcgaactc

SEQ ID NO: 735210 - DNA, 3832 bp, Homo sapiens
  misc_feature (3419)..(3419): n is a, c, g, or t
attacaagcgtaaaccaccgcgcccgacctcctccccttatttcatccattttataattcacattattgatcgctgataattgcacctattgtaatgatactgataattgcacctgttgtaataatattgatattgataattgcacctattgtattacaatattattattgatatcgataatttcacctactgtaatgatcaataaaggcaggcagaaagaaaacaaaagtaactgaaactaccaggcagcgtccctgcgaacagcaaagagggaagaaacgccttgaggcgtagtaacgccaccaataaggagtcgacgcgacgggtccgcccacaggcaaggaaggccgaccccgcgagtgcaggcgcgagcgctagcccgtgacgtctgagggggttggggggatgctgtgtgggtttcaagaagacgccacgcctccgccgccgccacgcccccgccgcctccaccgccggctgccgcgcccggaggaggtcgggatgttatcacttccgccggggcttctcactgtgtccgggtcagctgctgccgccgacgccgtaccgctgcggccgggggattgggccggggtctccaccgccgaccgaggggagcgggctccgctcggccctgctttttgcgacctggccgtcagccccacgtcgccggcctggaggggcgaagaggacgagggggccaaggcttcctccggggacattggctccctggattatcaagagtttgtagttgacattgaatccaggctgaggatggaaggtgtggaacttaaagaagaatggcaagatgaagattttccgatacctttaccagaagatgatagtattgaagcagatatactagctataactggaccagaggaccagcctggctcactagaagttaatggaaataaagtgagaaagaaactaatggctccagacattagcctgacactggatcctagtgatggctctgtattgtcagatgatttggatgaaagtggggagattgacttagatggcttagacacaccgtcagagaatagtaatgagtttgagtgggaagtcatttcctggaaggatattttccgttaacagctttgtcttggaaacaactaacatgcagtaggtttccccctccccccatcttttgatgatcttccaaaacccaagactactgaagtaattaggaaaggctcaattactgaatacacagcagcagaggaaaaagaagatggacgacgctggcgtatgttcaggattggagaacaggaccacagggttgatatgaaggcaattgaaccctataagtttgctgtctgtttcatgcctgaaagtagtcagcctaactatagatacctgatggacaatctttttaaatatgttattggcactttggagctattagtagcagaaaactacatgatagtttatttaaatggtgcaacaactcgaagaaaaatgcccagtctgggatggctcaggaaatgttatcagcaaattgatagaaggttacggaaaaatctaaaatccctaatcattgtacatccttcttggtttatcagaacacttctggctgttacaagaccatttattagctcgaaattcagccaaaaaattagatacgtgtttaatttggcagaactagcagaacttgtccccatggaatacgttggcataccagaatgcataaaacagtatgaagaagaaaagtttaaaaagaaacaaaaaagagttgatcaagaacttaatggaaaacaagatgaaccgaaaaatgaacagtaagtttggcatctagtccaaacaagactgaagaatgtgctgatggagcagtgctgtttctgcattcataatgcatttattggcccatatttttatgtaacctgttacaaaatagacttgactttttcataatggacttttgtattatacaagggactgttcactgctgtactggtttgcaaatttcttgaatttagctctttaatagctaactgtattattatcgttttatattttatattgctaaatagagaaccacactttatataaagtagtttttgcatttgtttattgaatgatgcatcttcttcggtgaaatatttatatgcataaatggcaaaggaaagaaataatatatatttttatgtcattgagcaatattttttaatgtgtacctgtcttatggaagaaatatgcaggtatataagaccacgattttctaaagtgcatattagaatttttgtttttgtaaatggttaaatacatttcctgggtaacttaggaaattaagtttttcataaggcaacagatggttaaactgattgtcatgaatacccaaagatcatgtatataatcgaagtgtattagtaccatcccaaggtttttttctcatttaacatatttgtttcataattcagcaagtacagatgcaagcgcattgcacactttttcctttctaaacttaaagacaagtcaaaaagccattcttagaactagaggatttaagagggtaggaattagggtttgtatatatgtatatatgggacattttatcttctggcccaaagtcagaactttataaaaatcttgagtttgttcactaatgtgaaataagctatgtgtccagggtattgctcccctgagtgtatatgagtgctgagtagtattgcagagaatgtgatgagttattcactgtcacaactttttctatagaaaacaggggctgctttttaaactctcactatgggcactttaccaaaatacttccatatcaattatttgaactcggtagttgtttgacctagttagatgtggtgtttattcaagtttgtatgaaatcatgtttgacaatactgtaaattaggttaattttgtaagtcttagcatcatcatattgtgctgttttggataacacgtttgttacaagcatttaaactgtttcatttggtagtacctttacattgaaataaattgtgtttgtgcctccaaacaaaaaaaaaaaaaaaaaaaaaaaaaaaaaaaaaaaaaccgcggggcgctttttttgtggggggcggcgaaaaagagggcgttattgtgaggtgggcgcccgtgtggtccttcgcgtgtgtttcccttggccccatttttttgtgtccagcggtgggtaataacttcgtgcgcgggctccccctattttgtgggaggcgctcgatattaattttgccgatttagcgccccggtgttctcccccctgcttattattagtatcttcccgtcttacctccccccggggcattactacttctccccccgtccctgctagcacggcgcgcattatctctgtgtgtatccccaacgagaacttcttttcagcaataaccccttttcattctctctggcggacgatcaaatcctctgcgttgcgtcgtcggcccanagcacaacacagccccgccggcttttaccggcgcggtgtggtgtttttggtattgccgggacacacactcacgtctgcccaccacctattttatctcgcgaggaggtactctgttgtttcttcgaactcgactcgcgatgtttatccatactctccgtggtctctctcttgttgttaccccgggtatttacgtcgccccaccattttagacacactttctttgtagccccgcgttatatattactatcgagctctggattatctagtggtcccaccagtggtgacttccgcccagtcgcataactcgtttcttcaccggcgtcgccactaacacgatgcctagtgcggaacagcgccagcgctggacaacggggcttctaccttcccccttttcatctactattacgcgtgta

SEQ ID NO: 735211 - DNA, 4500 bp, Homo sapiens
attacaagcgtaaaccaccgcgcccgacctcctccccttatttcatccattttataattcacattattgatcgctgataattgcacctattgtaatgatactgataattgcacctgttgtaataatattgatattgataattgcacctattgtattacaatattattattgatatcgataatttcacctactgtaatgatcaataaaggcaggcagaaagaaaacaaaagtaactgaaactaccaggcagcgtccctgcgaacagcaaagagggaagaaacgccttgaggcgtagtaacgccaccaataaggagtcgacgcgacgggtccgcccacaggcaaggaaggccgaccccgcgagtgcaggcgcgagcgctagcccgtgacgtctgagggggttggggggatgctgtgtgggtttcaagaagacgccacgcctccgccgccgccacgcccccgccgcctccaccgccggctgccgcgcccggaggaggtcgggatgttatcacttccgccggggcttctcactgtgtccgggtcagctgctgccgccgacgccgtaccgctgcggccgggggattgggccggggtctccaccgccgaccgaggggagcgggctccgctcggccctgctttttgcgacctggccgtcagccccacgtcgccggcctggaggggcgaagaggacgagggggccaaggcttcctccggggacattggctccctggattatcaagagtttgtagttgacattgaatccaggctgaggatggaaggtgtggaacttaaagaagaatggcaagatgaagattttccgatacctttaccagaagatgatagtattgaagcagatatactagctataactggaccagaggaccagcctggctcactagaagttaatggaaataaagtgagaaagaaactaatggctccagacattagcctgacactggatcctagtgatggctctgtattgtcagatgatttggatgaaagtggggagattgacttagatggcttagacacaccgtcagagaatagtaatgagtttgagtgggaagtcatttcctggaaggatattttccgttaacagctttgtcttggaaacaactaacatgcagtaggtttccccctccccccatcttttgatgatcttccaaaacccaagactactgaagtaattaggaaaggctcaattactgaatacacagcagcagaggaaaaagaagatggacgacgctggcgtatgttcaggattggagaacaggaccacagggttgatatgaaggcaattgaaccctataagtttgctgtctgtttcatgcctgaaagtagtcagcctaactatagatacctgatggacaatctttttaaatatgttattggcactttggagctattagtagcagaaaactacatgatagtttatttaaatggtgcaacaactcgaagaaaaatgcccagtctgggatggctcaggaaatgttatcagcaaattgatagaaggttacggaaaaatctaaaatccctaatcattgtacatccttcttggtttatcagaacacttctggctgttacaagaccatttattagctcgaaattcagccaaaaaattagatacgtgtttaatttggcagaactagcagaacttgtccccatggaatacgttggcataccagaatgcataaaacagtatgaagaagaaaagtttaaaaagaaacaaaaaagagttgatcaagaacttaatggaaaacaagatgaaccgaaaaatgaacagtaagtttggcatctagtccaaacaagactgaagaatgtgctgatggagcagtgctgtttctgcattcataatgcatttattggcccatatttttatgtaacctgttacaaaatagacttgactttttcataatggacttttgtattatacaagggactgttcactgctgtactggtttgcaaatttcttgaatttagctctttaatagctaactgtattattatcgtttaatttttgtttttgtaaatggttaaatacatttcctgggtaacttaggaaattaagtttttcataaggcaacagatggttaaactgattgtcatgaatacccaaagatcatgtatataatcgaagtgtattagtaccatcccaaggtttttttctcatttaacatatttgtttcataattcagcaagtacagatgcaagcgcattgcacactttttcctttctaaacttaaagacaagtcaaaaagccattcttagaactagaggatttaagagggtaggaattagggtttgtatatatgtatatatgggacattttatcttctggcccaaagtcagaactttataaaaatcttgagtttgttcactaatgtgaaataagctatgtgtccagggtattgctcccctgagtgtatatgagtgctgagtagtattgcagagaatgtgatgagttattcactgtcacaactttttctatagaaaacaggggctgctttttaaactctcactatgggcactttaccaaaatacttccatatcaattatttgaactcggtagttgtttgacctagttagatgtggtgtttattcaagtttgtatgaaatcatgtttgacaatactgtaaattaggttaattttgtaagtcttagcatcatcatattgtgctgttttggataacacgtttgttacaagcatttaaactgtttcatttggtagtacctttacattgaaataaattgtgtttgtgcctccaaacaaaaagtttaattaccgacaaaattatttctaaaacaacagattgatctgatattgtgtcatatacttgaaaggctcatacacagctggtaagcataataccttccaaatttgaaggtcatggctactcttcaacccttcctgtaaggtattttacaaaacagtggcctagagtagcaaaattgaagtggatgtgagctaacctttcaagatttagtctatcctagattgaacacacatgtggctgtgaccattctcatgtacttacaaaccttctgttacaaaagggaactttcctatattttttgtcctcctcagtcctaaacttggcatgctaacttaaaaccagttataggagagagatgctggaggattcccaggatgaaacattcctcagcagcctcctgacttaactcagatccagcagctcttggcagatcctgaactaatgtcattacagtgaattgagccaaaacgattattgcttgctcacattttaggaacactttttgttgaagaagcaaactaacaataacaagttaggcattccttctgaatttaccatataaggattatgtataaacaattatattgaatttgtcattagattctatatttgtagacgatttaacgtagtctttcatctgtacatctttatcttgttcaaaatgggctgaggtttttaataggtggttttctaccacattaagtacttggttcttcattttaaaaaatatgaagaataacttcaactcttttttgcattattttgatttttgattttgcagtcattgctcctaactgtagatacatgttgcaaaagtgatgtttttctgaattttttttaaaagtagaagactattctgttaaacattaaaattcagagacaacagtgataacacctgggatataatgaaaatgaggtgctgtgaatcagtaaactaaagggatacctgctttaacctgcaccttaatggaatctggtatagagatgtacccacaataaatgttttataagatttaagatcataatagtaggttagaggaagagcatttattaagtctgttgtttctaatctatagctaagttaacatctcccatattattccattttaatttcccattactgaccaaggtgaaagtatatgtgactgtacttttatctttctgttgggatcatggatctaatttaactggcttaatttgatgcttctgtcactaggctctaagtgccccttttttagtcagaagtttttcatgtgaaataatttgattctgtgttctgcttgatcatactcctaagcaagcaccaagggaagacgttctattcaccccacaatttaagcttaacaatctttaactcagagggagatatgaagaaatatgattctaagtagggtctagcagaggcattggaaagtgataaaagtaggaagtaagagaaagcaaacctttataaagagataaagacatagttgttacctaagatgccactgtatgtgtgccctctctttttttttttttttttttggagacagagactcactctgtcacccattctggagtgcagtggcgcaatcctggctcactgcaacctctgcctcccgggttcaagcatttctcctgcctcagcctcctgagtagctgggattacaggcacacgccacaatgcccggctaatttttgtatttttagtagagacggggtttcgccatgctaggctggtctcgaactc

SEQ ID NO: 735212 - DNA, 3606 bp, Homo sapiens
  misc_feature (3193)..(3193): n is a, c, g, or t
attacaagcgtaaaccaccgcgcccgacctcctccccttatttcatccattttataattcacattattgatcgctgataattgcacctattgtaatgatactgataattgcacctgttgtaataatattgatattgataattgcacctattgtattacaatattattattgatatcgataatttcacctactgtaatgatcaataaaggcaggcagaaagaaaacaaaagtaactgaaactaccaggcagcgtccctgcgaacagcaaagagggaagaaacgccttgaggcgtagtaacgccaccaataaggagtcgacgcgacgggtccgcccacaggcaaggaaggccgaccccgcgagtgcaggcgcgagcgctagcccgtgacgtctgagggggttggggggatgctgtgtgggtttcaagaagacgccacgcctccgccgccgccacgcccccgccgcctccaccgccggctgccgcgcccggaggaggtcgggatgttatcacttccgccggggcttctcactgtgtccgggtcagctgctgccgccgacgccgtaccgctgcggccgggggattgggccggggtctccaccgccgaccgaggggagcgggctccgctcggccctgctttttgcgacctggccgtcagccccacgtcgccggcctggaggggcgaagaggacgagggggccaaggcttcctccggggacattggctccctggattatcaagagtttgtagttgacattgaatccaggctgaggatggaaggtgtggaacttaaagaagaatggcaagatgaagattttccgatacctttaccagaagatgatagtattgaagcagatatactagctataactggaccagaggaccagcctggctcactagaagttaatggaaataaagtgagaaagaaactaatggctccagacattagcctgacactggatcctagtgatggctctgtattgtcagatgatttggatgaaagtggggagattgacttagatggcttagacacaccgtcagagaatagtaatgagtttgagtgggaagtcatttcctggaaggatattttccgttaacagctttgtcttggaaacaactaacatgcagtaggtttccccctccccccatcttttgatgatcttccaaaacccaagactactgaagtaattaggaaaggctcaattactgaatacacagcagcagaggaaaaagaagatggacgacgctggcgtatgttcaggattggagaacaggaccacagggttgatatgaaggcaattgaaccctataagtttgctgtctgtttcatgcctgaaagtagtcagcctaactatagatacctgatggacaatctttttaaatatgttattggcactttggagctattagtagcagaaaactacatgatagtttatttaaatggtgcaacaactcgaagaaaaatgcccagtctgggatggctcaggaaatgttatcagcaaattgatagaaggttacggaaaaatctaaaatccctaatcattgtacatccttcttggtttatcagaacacttctggctgttacaagaccatttattagctcgaaattcagccaaaaaattagatacgtgtttaatttggcagaactagcagaacttgtccccatggaatacgttggcataccagaatgcataaaacagtatgaagaagaaaagtttaaaaagaaacaaaaaagagttgatcaagaacttaatggaaaacaagatgaaccgaaaaatgaacagtaagtttggcatctagtccaaacaagactgaagaatgtgctgatggagcagtgctgtttctgcattcataatgcatttattggcccatatttttatgtaacctgttacaaaatagacttgactttttcataatggacttttgtattatacaagggactgttcactgctgtactggtttgcaaatttcttgaatttagctctttaatagctaactgtattattatcgtttaatttttgtttttgtaaatggttaaatacatttcctgggtaacttaggaaattaagtttttcataaggcaacagatggttaaactgattgtcatgaatacccaaagatcatgtatataatcgaagtgtattagtaccatcccaaggtttttttctcatttaacatatttgtttcataattcagcaagtacagatgcaagcgcattgcacactttttcctttctaaacttaaagacaagtcaaaaagccattcttagaactagaggatttaagagggtaggaattagggtttgtatatatgtatatatgggacattttatcttctggcccaaagtcagaactttataaaaatcttgagtttgttcactaatgtgaaataagctatgtgtccagggtattgctcccctgagtgtatatgagtgctgagtagtattgcagagaatgtgatgagttattcactgtcacaactttttctatagaaaacaggggctgctttttaaactctcactatgggcactttaccaaaatacttccatatcaattatttgaactcggtagttgtttgacctagttagatgtggtgtttattcaagtttgtatgaaatcatgtttgacaatactgtaaattaggttaattttgtaagtcttagcatcatcatattgtgctgttttggataacacgtttgttacaagcatttaaactgtttcatttggtagtacctttacattgaaataaattgtgtttgtgcctccaaacaaaaaaaaaaaaaaaaaaaaaaaaaaaaaaaaaaaaaccgcggggcgctttttttgtggggggcggcgaaaaagagggcgttattgtgaggtgggcgcccgtgtggtccttcgcgtgtgtttcccttggccccatttttttgtgtccagcggtgggtaataacttcgtgcgcgggctccccctattttgtgggaggcgctcgatattaattttgccgatttagcgccccggtgttctcccccctgcttattattagtatcttcccgtcttacctccccccggggcattactacttctccccccgtccctgctagcacggcgcgcattatctctgtgtgtatccccaacgagaacttcttttcagcaataaccccttttcattctctctggcggacgatcaaatcctctgcgttgcgtcgtcggcccanagcacaacacagccccgccggcttttaccggcgcggtgtggtgtttttggtattgccgggacacacactcacgtctgcccaccacctattttatctcgcgaggaggtactctgttgtttcttcgaactcgactcgcgatgtttatccatactctccgtggtctctctcttgttgttaccccgggtatttacgtcgccccaccattttagacacactttctttgtagccccgcgttatatattactatcgagctctggattatctagtggtcccaccagtggtgacttccgcccagtcgcataactcgtttcttcaccggcgtcgccactaacacgatgcctagtgcggaacagcgccagcgctggacaacggggcttctaccttcccccttttcatctactattacgcgtgta

SEQ ID NO: 735213 - DNA, 4642 bp, Homo sapiens
attacaagcgtaaaccaccgcgcccgacctcctccccttatttcatccattttataattcacattattgatcgctgataattgcacctattgtaatgatactgataattgcacctgttgtaataatattgatattgataattgcacctattgtattacaatattattattgatatcgataatttcacctactgtaatgatcaataaaggcaggcagaaagaaaacaaaagtaactgaaactaccaggcagcgtccctgcgaacagcaaagagggaagaaacgccttgaggcgtagtaacgccaccaataaggagtcgacgcgacgggtccgcccacaggcaaggaaggccgaccccgcgagtgcaggcgcgagcgctagcccgtgacgtctgagggggttggggggatgctgtgtgggtttcaagaagacgccacgcctccgccgccgccacgcccccgccgcctccaccgccggctgccgcgcccggaggaggtcgggatgttatcacttccgccggggcttctcactgtgtccgggtcagctgctgccgccgacgccgtaccgctgcggccgggggattgggccggggtctccaccgccgaccgaggggagcgggctccgctcggccctgctttttgcgacctggccgtcagccccacgtcgccggcctggaggggcgaagaggacgagggggccaaggcttcctccggggacattggctccctggattatcaagagtttgtagttgacattgaatccaggctgaggatggaaggtgtggaacttaaagaagaatggcaagatgaagattttccgatacctttaccagaagatgatagtattgaagcagatatactagctataactggaccagaggaccagcctggctcactagaagttaatggaaataaagtgagaaagaaactaatggctccagacattagcctgacactggatcctagtgatggctctgtattgtcagatgatttggatgaaagtggggagattgacttagatggcttagacacaccgtcagagaatagtaatgagtttgagtgggaagtcatttcctggaaggatattttccgttaacagctttgtcttggaaacaactaacatgcagtaggtttccccctccccccatcttttgatgatcttccaaaacccaagactactgaagtaattaggaaaggctcaattactgaatacacagcagcagaggaaaaagaagatggacgacgctggcgtatgttcaggattggagaacaggaccacagggttgatatgaaggcaattgaaccctataagtttgctgtctgtttcatgcctgaaagtagtcagcctaactatagatacctgatggacaatctttttaaatatgttattggcactttggagctattagtagcagaaaactacatgatagtttatttaaatggtgcaacaactcgaagaaaaatgcccagtctgggatggctcaggaaatgttatcagcaaattgatagaaggttacggaaaaatctaaaatccctaatcattgtacatccttcttggtttatcagaacacttctggctgttacaagaccatttattagctcgaaattcagccaaaaaattagatacgtgtttaatttggcagaactagcagaacttgtccccatggaatacgttggcataccagaatgcataaaacagtatgaagaagaaaagtttaaaaagaaacaaaaaagagttgatcaagaacttaatggaaaacaagatgaaccgaaaaatgaacagtaagtttggcatctagtccaaacaagactgaagaatgtgctgatggagcagtgctgtttctgcattaagggactgttcactgctgtactggtttgcaaatttcttgaatttagctctttaatagctaactgtattattatcgttttatattttatattgctaaatagagaaccacactttatataaagtagtttttgcatttgtttattgaatgatgcatcttcttcggtgaaatatttatatgcataaatggcaaaggaaagaaataatatatatttttatgtcattgagcaatattttttaatgtgtacctgtcttatggaagaaatatgcaggtatataagaccacgattttctaaagtgcatattagaatttttgtttttgtaaatggttaaatacatttcctgggtaacttaggaaattaagtttttcataaggcaacagatggttaaactgattgtcatgaatacccaaagatcatgtatataatcgaagtgtattagtaccatcccaaggtttttttctcatttaacatatttgtttcataattcagcaagtacagatgcaagcgcattgcacactttttcctttctaaacttaaagacaagtcaaaaagccattcttagaactagaggatttaagagggtaggaattagggtttgtatatatgtatatatgggacattttatcttctggcccaaagtcagaactttataaaaatcttgagtttgttcactaatgtgaaataagctatgtgtccagggtattgctcccctgagtgtatatgagtgctgagtagtattgcagagaatgtgatgagttattcactgtcacaactttttctatagaaaacaggggctgctttttaaactctcactatgggcactttaccaaaatacttccatatcaattatttgaactcggtagttgtttgacctagttagatgtggtgtttattcaagtttgtatgaaatcatgtttgacaatactgtaaattaggttaattttgtaagtcttagcatcatcatattgtgctgttttggataacacgtttgttacaagcatttaaactgtttcatttggtagtacctttacattgaaataaattgtgtttgtgcctccaaacaaaaagtttaattaccgacaaaattatttctaaaacaacagattgatctgatattgtgtcatatacttgaaaggctcatacacagctggtaagcataataccttccaaatttgaaggtcatggctactcttcaacccttcctgtaaggtattttacaaaacagtggcctagagtagcaaaattgaagtggatgtgagctaacctttcaagatttagtctatcctagattgaacacacatgtggctgtgaccattctcatgtacttacaaaccttctgttacaaaagggaactttcctatattttttgtcctcctcagtcctaaacttggcatgctaacttaaaaccagttataggagagagatgctggaggattcccaggatgaaacattcctcagcagcctcctgacttaactcagatccagcagctcttggcagatcctgaactaatgtcattacagtgaattgagccaaaacgattattgcttgctcacattttaggaacactttttgttgaagaagcaaactaacaataacaagttaggcattccttctgaatttaccatataaggattatgtataaacaattatattgaatttgtcattagattctatatttgtagacgatttaacgtagtctttcatctgtacatctttatcttgttcaaaatgggctgaggtttttaataggtggttttctaccacattaagtacttggttcttcattttaaaaaatatgaagaataacttcaactcttttttgcattattttgatttttgattttgcagtcattgctcctaactgtagatacatgttgcaaaagtgatgtttttctgaattttttttaaaagtagaagactattctgttaaacattaaaattcagagacaacagtgataacacctgggatataatgaaaatgaggtgctgtgaatcagtaaactaaagggatacctgctttaacctgcaccttaatggaatctggtatagagatgtacccacaataaatgttttataagatttaagatcataatagtaggttagaggaagagcatttattaagtctgttgtttctaatctatagctaagttaacatctcccatattattccattttaatttcccattactgaccaaggtgaaagtatatgtgactgtacttttatctttctgttgggatcatggatctaatttaactggcttaatttgatgcttctgtcactaggctctaagtgccccttttttagtcagaagtttttcatgtgaaataatttgattctgtgttctgcttgatcatactcctaagcaagcaccaagggaagacgttctattcaccccacaatttaagcttaacaatctttaactcagagggagatatgaagaaatatgattctaagtagggtctagcagaggcattggaaagtgataaaagtaggaagtaagagaaagcaaacctttataaagagataaagacatagttgttacctaagatgccactgtatgtgtgccctctctttttttttttttttttttggagacagagactcactctgtcacccattctggagtgcagtggcgcaatcctggctcactgcaacctctgcctcccgggttcaagcatttctcctgcctcagcctcctgagtagctgggattacaggcacacgccacaatgcccggctaatttttgtatttttagtagagacggggtttcgccatgctaggctggtctcgaactc

SEQ ID NO: 735214 - DNA, 3748 bp, Homo sapiens
  misc_feature (3335)..(3335): n is a, c, g, or t
attacaagcgtaaaccaccgcgcccgacctcctccccttatttcatccattttataattcacattattgatcgctgataattgcacctattgtaatgatactgataattgcacctgttgtaataatattgatattgataattgcacctattgtattacaatattattattgatatcgataatttcacctactgtaatgatcaataaaggcaggcagaaagaaaacaaaagtaactgaaactaccaggcagcgtccctgcgaacagcaaagagggaagaaacgccttgaggcgtagtaacgccaccaataaggagtcgacgcgacgggtccgcccacaggcaaggaaggccgaccccgcgagtgcaggcgcgagcgctagcccgtgacgtctgagggggttggggggatgctgtgtgggtttcaagaagacgccacgcctccgccgccgccacgcccccgccgcctccaccgccggctgccgcgcccggaggaggtcgggatgttatcacttccgccggggcttctcactgtgtccgggtcagctgctgccgccgacgccgtaccgctgcggccgggggattgggccggggtctccaccgccgaccgaggggagcgggctccgctcggccctgctttttgcgacctggccgtcagccccacgtcgccggcctggaggggcgaagaggacgagggggccaaggcttcctccggggacattggctccctggattatcaagagtttgtagttgacattgaatccaggctgaggatggaaggtgtggaacttaaagaagaatggcaagatgaagattttccgatacctttaccagaagatgatagtattgaagcagatatactagctataactggaccagaggaccagcctggctcactagaagttaatggaaataaagtgagaaagaaactaatggctccagacattagcctgacactggatcctagtgatggctctgtattgtcagatgatttggatgaaagtggggagattgacttagatggcttagacacaccgtcagagaatagtaatgagtttgagtgggaagtcatttcctggaaggatattttccgttaacagctttgtcttggaaacaactaacatgcagtaggtttccccctccccccatcttttgatgatcttccaaaacccaagactactgaagtaattaggaaaggctcaattactgaatacacagcagcagaggaaaaagaagatggacgacgctggcgtatgttcaggattggagaacaggaccacagggttgatatgaaggcaattgaaccctataagtttgctgtctgtttcatgcctgaaagtagtcagcctaactatagatacctgatggacaatctttttaaatatgttattggcactttggagctattagtagcagaaaactacatgatagtttatttaaatggtgcaacaactcgaagaaaaatgcccagtctgggatggctcaggaaatgttatcagcaaattgatagaaggttacggaaaaatctaaaatccctaatcattgtacatccttcttggtttatcagaacacttctggctgttacaagaccatttattagctcgaaattcagccaaaaaattagatacgtgtttaatttggcagaactagcagaacttgtccccatggaatacgttggcataccagaatgcataaaacagtatgaagaagaaaagtttaaaaagaaacaaaaaagagttgatcaagaacttaatggaaaacaagatgaaccgaaaaatgaacagtaagtttggcatctagtccaaacaagactgaagaatgtgctgatggagcagtgctgtttctgcattaagggactgttcactgctgtactggtttgcaaatttcttgaatttagctctttaatagctaactgtattattatcgttttatattttatattgctaaatagagaaccacactttatataaagtagtttttgcatttgtttattgaatgatgcatcttcttcggtgaaatatttatatgcataaatggcaaaggaaagaaataatatatatttttatgtcattgagcaatattttttaatgtgtacctgtcttatggaagaaatatgcaggtatataagaccacgattttctaaagtgcatattagaatttttgtttttgtaaatggttaaatacatttcctgggtaacttaggaaattaagtttttcataaggcaacagatggttaaactgattgtcatgaatacccaaagatcatgtatataatcgaagtgtattagtaccatcccaaggtttttttctcatttaacatatttgtttcataattcagcaagtacagatgcaagcgcattgcacactttttcctttctaaacttaaagacaagtcaaaaagccattcttagaactagaggatttaagagggtaggaattagggtttgtatatatgtatatatgggacattttatcttctggcccaaagtcagaactttataaaaatcttgagtttgttcactaatgtgaaataagctatgtgtccagggtattgctcccctgagtgtatatgagtgctgagtagtattgcagagaatgtgatgagttattcactgtcacaactttttctatagaaaacaggggctgctttttaaactctcactatgggcactttaccaaaatacttccatatcaattatttgaactcggtagttgtttgacctagttagatgtggtgtttattcaagtttgtatgaaatcatgtttgacaatactgtaaattaggttaattttgtaagtcttagcatcatcatattgtgctgttttggataacacgtttgttacaagcatttaaactgtttcatttggtagtacctttacattgaaataaattgtgtttgtgcctccaaacaaaaaaaaaaaaaaaaaaaaaaaaaaaaaaaaaaaaaccgcggggcgctttttttgtggggggcggcgaaaaagagggcgttattgtgaggtgggcgcccgtgtggtccttcgcgtgtgtttcccttggccccatttttttgtgtccagcggtgggtaataacttcgtgcgcgggctccccctattttgtgggaggcgctcgatattaattttgccgatttagcgccccggtgttctcccccctgcttattattagtatcttcccgtcttacctccccccggggcattactacttctccccccgtccctgctagcacggcgcgcattatctctgtgtgtatccccaacgagaacttcttttcagcaataaccccttttcattctctctggcggacgatcaaatcctctgcgttgcgtcgtcggcccanagcacaacacagccccgccggcttttaccggcgcggtgtggtgtttttggtattgccgggacacacactcacgtctgcccaccacctattttatctcgcgaggaggtactctgttgtttcttcgaactcgactcgcgatgtttatccatactctccgtggtctctctcttgttgttaccccgggtatttacgtcgccccaccattttagacacactttctttgtagccccgcgttatatattactatcgagctctggattatctagtggtcccaccagtggtgacttccgcccagtcgcataactcgtttcttcaccggcgtcgccactaacacgatgcctagtgcggaacagcgccagcgctggacaacggggcttctaccttcccccttttcatctactattacgcgtgta

SEQ ID NO: 735215 - DNA, 6071 bp, Homo sapiens
ctcgtaatccataacttgagatgaacacaccaaattataaatatcttattcacctaatccgtggaaagtttgtaacaccaaaatattaacttctgttcttgatcactcagcctccatagttattcatgttgcatgatctgattcgctcttttagaatttctcatagcgtcaggtactagctcaaaataacaggagcaactgcttctttccatatcccacattgaggaaaacacattttgcaagccgtcttaaagaaacaggtcaacttagtttagggatgaaacttaaaagtaagcttcgtcacaaaaaacacagttcaacaccacctcgcccggctgcaggcagctcagaggacaggaagtgaggccaagacatatttcacgcagcacagactaaaccccagcttttatctttcccgctggtccttaagggaccaaccgtactgattttccgtcatgttccgcgccacttccgttcgcgcactttaattacgtcaggcgtcctctctcgcggtatcatccggttgctgaggccctgtaataaaggtctcgcgaaatttgttctagaggtccaagtttgcttcttagcttactccaccccacccccaacctgtccctccttttctttccaagtcacaaaattctcccctcccctaccccggagtttacggccctcctcctgtttccgatttcagcccggaaccggaagtgtagtgggcggggcccgtcggcggaaaacgcagcggagccagagccggacacggctgtggccgctgcctctacccccgccacggatcgccgggtagtaggactgcgcggctccaggctgagggtcggtccggaggcgggtgggcgcgggtctcacccggattgtccgggtggcaccgttcccggccccaccgggcgccgcgagggatcatgtctacagcctctgccgcctcctcctcctcctcgtcttcggccggtgagatgatcgaagccccttcccaggtcctcaactttgaagagatcgactacaaggagatcgaggtggaagaggttgttggaagaggagcctttggagttgtttgcaaagctaagtggagagcaaaagatgttgctattaaacaaatagaaagtgaatctgagaggaaagcgtttattgtagagcttcggcagttatcccgtgtgaaccatcctaatattgtaaagctttatggagcctgcttgaatccagtgtgtcttgtgatggaatatgctgaagggggctctttatataatgtgctgcatggtgctgaaccattgccatattatactgctgcccacgcaatgagttggtgtttacagtgttcccaaggagtggcttatcttcacagcatgcaacccaaagcgctaattcacagggacctgaaaccaccaaacttactgctggttgcaggggggacagttctaaaaatttgtgattttggtacagcctgtgacattcagacacacatgaccaataacaaggggagtgctgcttggatggcacctgaagtttttgaaggtagtaattacagtgaaaaatgtgacgtcttcagctggggtattattctttgggaagtgataacgcgtcggaaaccctttgatgagattggtggcccagctttccgaatcatgtgggctgttcataatggtactcgaccaccactgataaaaaatttacctaagcccattgagagcctgatgactcgttgttggtctaaagatccttcccagcgcccttcaatggaggaaattgtgaaaataatgactcacttgatgcggtactttccaggagcagatgagccattacagtatccttgtcagtattcagatgaaggacagagcaactctgccaccagtacaggctcattcatggacattgcttctacaaatacgagtaacaaaagtgacactaatatggagcaagttcctgccacaaatgatactattaagcgcttagaatcaaaattgttgaaaaatcaggcaaagcaacagagtgaatctggacgtttaagcttgggagcctcccgtgggagcagtgtggagagcttgcccccaacctctgagggcaagaggatgagtgctgacatgtctgaaatagaagctaggatcgccgcaaccacagcctattccaagcctaaacggggccaccgtaaaactgcttcatttggcaacattctggatgtccctgagatcgtcatatcaggcaacggacagccaagacgtagatccatccaagacttgactgtaactggaacagaacctggtcaggtgagcagtaggtcatccagtcccagtgtcagaatgattactacctcaggaccaacctcagaaaagccaactcgaagtcatccatggacccctgatgattccacagataccaatggatcagataactccatcccaatggcttatcttacactggatcaccaactacaggcaagaactagttgcagaactggaccaggatgaaaaggaccagcaaaatacatctcgcctggtacaggaacataaaaagcttttagatgaaaacaaaagcctttctacttactaccagcaatgcaaaaaacaactagaggtcatcagaagtcagcagcagaaacgacaaggcacttcatgattctctgggaccgttacattttgaaatatgcaaagaaagactttttttttaaggaaaggaaaaccttataatgacgattcatgagtgttagctttttggcgtgttctgaatgccaactgcctatatttgctgcatttttttcattgtttattttccttttctcatggtggacatacaattttactgtttcattgcataacatggtagcatctgtgacttgaatgagcagcactttgcaacttcaaaacagatgcagtgaactgtggctgtatatgcatgctcattgtgtgaaggctagcctaacagaacaggaggtatcaaactagctgctatgtgcaaacagcgtccattttttcatattagaggtggaacctcaagaatgactttattcttgtatctcatctcaaaatattaataatttttttcccaaaagatggtatataccaagttaaagacagggtattataaatttagagtgattggtggtatattacggaaatacggaacctttagggatagttccgtgtaagggctttgatgccagcatccttggatcagtactgaactcagttccatccgtaaaatatgtaaaggtaagtggcagctgctctatttaatgaaagcagttttaccggattttgttagactaaaatttgattgtgatacattgaacaaaatggaactcatttttttttaaggagtaaagatttttaattctgtgattgtgtgtatgtgtgttgaaactgtaaagcttttatgactctaatattaatctcttaaatgaaattaaaaggcaaaagaacatgattgagcttaaatgatcatttcttcctgcagtgattcttggattgttttctcatgtatttgaaaaaaaaaaaatgaagaaaaataatggaaaatggaagtaattactccagctaaaaaaagcttggacttagatttctttttatgataccaaatgagaaataaaccaggcaaatcagaaggaagttaaagaagcaaatataaattcaacaagtgtcctaattatcctggatattggaatatttgattttccttacaatcccgttctagaatgcctgccgcctttcaacactttcaagagaatttcaacacttacagagtatttatattgttaacagtaattttgctaccaaaaccttcagaataactttaataataaaatgacactgaaataatagactatacaaactctatattttttcagttggtgttaaaataagtcacattttgataccagtacaagatgtcttttaaataaggatgtcatcagtctgatttttatagcattaatgttttatgaagaaaaagttcaaaatgaaagcattaattgctgtgattattagaattctatcatgactgtattgtagtttttgctctatttcagataagcaagatctaagaagttatcaaaactattctttaaaatgctaaagcaggtaactttttcttccattattttttcctcctaccactgagttttgtaatgaattccttgtgtatacaagcaatacaggtgaatactaaactgttatttttagcttcttcaaaagctattttagaaagcttcctggaaataaatgtcttctgtcatttaatttaaataaaaggagtgttaattgttcccaaatttgattacctagctgaaacagatattggattcagcatagtaatagtaaaataaaattggcagagaaaataactgtagactaggataaagcatgactcctccatagcattgttgcttgtatgtacatctgtcactccactgaaagggacctagtcactttaaagaggccttttatctcagcacgagatatccaagcgtgaatgctaaggcttgatgtttccattaggatttagcattcgagatttcagattttatttatagtcattgatgtgttttgctgtattataacacatttaaagggaaattttattatggtttttacatgtagtcatttcataaaaatatccagataggtaaatggaagaaaatagtagattttagtcatggtaccaaatgcaagaggctgttgaacagttgcttgtttgtttacagtaagttccttgagattttcagtactgtagttgccctggacattgagtacagttcagccttactctgtttttaagtagttgtgttgtcaatttcatgcttttaagtcctgatgatccttggagatgggagaaaaagataccagggataattaaaatccacagccagtttcatcagtttcctcatccatcctgcaaataaaaatgttaacaaggagccaaacttattcgttctggttttacaatttattttgaccgttttttgggtgaaaattgcaaacagccaagcaagtggctggaatgccccagtctaagaaattcaaaaacaatcactgagtaagccctaattacattttactcttgactccaggaaaagaaagcaagcttttatctaatctagagggaagtattcgtgagcaataaaaatcacttttttgagttgaataataatcagttaagaatatttaccgcatagcaacacaacatataaagatttgttacaagttgtttacagatgtttgactatttttgctgaagtattttagagtattgaatgtcttctctcttcaagtttctttcatgttcctaatttcagctcctgtagccagagatcacaggtcttccctgtgaaactttggtttctttctataaatgtgtgtggttttcagcgctcaactcctgtcttcaaatggtagtaagttctacttctacttctgtcattcagaacattttatgtcaaatgatgtaatgcagaaattcttgtgcatatttgtaactgaaggaagctttttagatttatttttgtttttaataaaattcagattcctattctaaactggtacataaaagtggtgaatgacttgtatcagcaaatgagctgcgaagtgttctgctctagcaccgtgtttaccttacacagaacctactaaaaactgaaatgtcacttttgtacgataatcatggtttttaagaggctgggtaattggccagttaacacatcatctcttgcatttcaaaattttgtgttaaatggagctcttcacaatttcatgagtcctaatttgtgtgaagcacaacacgtcatacattgctaagtgattcttctcatcagaaagctgatttcttagagtatttctaagttaaattaggtatttcattcctttatcaacctgctggctttccaaccctaacatatgcacacattcttataaactctaccttcattttagtaaatccatccattcatttgctcattcttttaataaatatttgtttatcatatattataaactgcactgctattaccaataccaagttacatgtccattccagtcacacagtagtttgatggtattcccatcttacagatg

SEQ ID NO: 735216 - DNA, 7570 bp, Homo sapiens
ctcgtaatccataacttgagatgaacacaccaaattataaatatcttattcacctaatccgtggaaagtttgtaacaccaaaatattaacttctgttcttgatcactcagcctccatagttattcatgttgcatgatctgattcgctcttttagaatttctcatagcgtcaggtactagctcaaaataacaggagcaactgcttctttccatatcccacattgaggaaaacacattttgcaagccgtcttaaagaaacaggtcaacttagtttagggatgaaacttaaaagtaagcttcgtcacaaaaaacacagttcaacaccacctcgcccggctgcaggcagctcagaggacaggaagtgaggccaagacatatttcacgcagcacagactaaaccccagcttttatctttcccgctggtccttaagggaccaaccgtactgattttccgtcatgttccgcgccacttccgttcgcgcactttaattacgtcaggcgtcctctctcgcggtatcatccggttgctgaggccctgtaataaaggtctcgcgaaatttgttctagaggtccaagtttgcttcttagcttactccaccccacccccaacctgtccctccttttctttccaagtcacaaaattctcccctcccctaccccggagtttacggccctcctcctgtttccgatttcagcccggaaccggaagtgtagtgggcggggcccgtcggcggaaaacgcagcggagccagagccggacacggctgtggccgctgcctctacccccgccacggatcgccgggtagtaggactgcgcggctccaggctgagggtcggtccggaggcgggtgggcgcgggtctcacccggattgtccgggtggcaccgttcccggccccaccgggcgccgcgagggatcatgtctacagcctctgccgcctcctcctcctcctcgtcttcggccggtgagatgatcgaagccccttcccaggtcctcaactttgaagagatcgactacaaggagatcgaggtggaagaggttgttggaagaggagcctttggagttgtttgcaaagctaagtggagagcaaaagatgttgctattaaacaaatagaaagtgaatctgagaggaaagcgtttattgtagagcttcggcagttatcccgtgtgaaccatcctaatattgtaaagctttatggagcctgcttgaatccagtgtgtcttgtgatggaatatgctgaagggggctctttatataatgtgctgcatggtgctgaaccattgccatattatactgctgcccacgcaatgagttggtgtttacagtgttcccaaggagtggcttatcttcacagcatgcaacccaaagcgctaattcacagggacctgaaaccaccaaacttactgctggttgcaggggggacagttctaaaaatttgtgattttggtacagcctgtgacattcagacacacatgaccaataacaaggggagtgctgcttggatggcacctgaagtttttgaaggtagtaattacagtgaaaaatgtgacgtcttcagctggggtattattctttgggaagtgataacgcgtcggaaaccctttgatgagattggtggcccagctttccgaatcatgtgggctgttcataatggtactcgaccaccactgataaaaaatttacctaagcccattgagagcctgatgactcgttgttggtctaaagatccttcccagcgcccttcaatggaggaaattgtgaaaataatgactcacttgatgcgggtataatccttcttttgaggggctttggatttaggggaatttaatatgtgctgagttttaatggaattttaaaagggatgttattactatattctgctttatatattgctatgttttctaagtgagaatgggcatttattactcatagtcagaagaggaaacatttcgagagggaaaatctagttctttatcactggaaagatggctagactaggtttctagacttgcttttttctttttgcttacattagtggacaagtatgtttgtctctgggcctgttgcctcatttgtaatgtgggagaaactgaaatagatagtctctaaagccatcacaggacttggatatattaatattatgacttcaatacatgataaactaaattttacatttttctgataccaattttcatcaagcatttagtcatttatgcaaggcaataggttgcattctcagacacatttatttgagtgacttttactatttggcctattttcaggtttttatatcccagtaaaaagttaaactttcttctatttagaagaacccttttaaatgattatcaaattttcctagtctgtgaatcaagcgcctttagaattatttggaatattttacgcctctggtttttggtacattaacaaaaactgtgaagtggtatcttggctttaaaaagttcaaatatctatgaaagtgcctgaattttgaaacagtttgttcagtagaagaatcttacaatctccttaaatatagactaagtaatttcctaaatggtaaaacgttgtttattcaatctattgaaaatttcttacgcaaagcagcttgaactaatctactaaaagtttaccatcgtatttggataccagtcatatatagaagcctaggccttaaaggtgtgtgcataagaaaacaacttagtctctgtagtcagattacttaaaactttaggatatataagttattgcagttgtaattttgcttctctgttccttgtctaatttgaggagaatacgtttcctttttttctctaaattctaacatttttgtccagcagatactttgagtattatgcctccagtttgtagaaagacattcataatctatcctcttaatatttaaaatgttctaacaattattctatggtatactagtctcagtcttcagactaacagtcactggaagtttacatcactactgtaagaacatgagtatgttttacataattatgagaaatgatactattttatttcatatgtttctctagagaaatatttgctgttttcttcaagactatctagactccaatgtaagctagattcttaggtaggtgcatggcattgatcaaagttgaaatccaagagtacattattgtaatctttgtaaaataaaaaacttaggcacctacaaatttagtatataacttagggaaaataaaacattaatcaggatttaatttgtattaaggaaattttaagctgtggtttacttttttatatatagtactttccaggagcagatgagccattacagtatccttgtcagtattcagatgaaggacagagcaactctgccaccagtacaggctcattcatggacattgcttctacaaatacgagtaacaaaagtgacactaatatggagcaagttcctgccacaaatgatactattaagcgcttagaatcaaaattgttgaaaaatcaggcaaagcaacagagtgaatctggacgtttaagcttgggagcctcccgtgggagcagtgtggagagcttgcccccaacctctgagggcaagaggatgagtgctgacatgtctgaaatagaagctaggatcgccgcaaccacagcctattccaagcctaaacggggccaccgtaaaactgcttcatttggcaacattctggatgtccctgagatcgtcatatcaggcaacggacagccaagacgtagatccatccaagacttgactgtaactggaacagaacctggtcaggtgagcagtaggtcatccagtcccagtgtcagaatgattactacctcaggaccaacctcagaaaagccaactcgaagtcatccatggacccctgatgattccacagataccaatggatcagataactccatcccaatggcttatcttacactggatcaccaactacaggcaagaactagttgcagaactggaccaggatgaaaaggaccagcaaaatacatctcgcctggtacaggaacataaaaagcttttagatgaaaacaaaagcctttctacttactaccagcaatgcaaaaaacaactagaggtcatcagaagtcagcagcagaaacgacaaggcacttcatgattctctgggaccgttacattttgaaatatgcaaagaaagactttttttttaaggaaaggaaaaccttataatgacgattcatgagtgttagctttttggcgtgttctgaatgccaactgcctatatttgctgcatttttttcattgtttattttccttttctcatggtggacatacaattttactgtttcattgcataacatggtagcatctgtgacttgaatgagcagcactttgcaacttcaaaacagatgcagtgaactgtggctgtatatgcatgctcattgtgtgaaggctagcctaacagaacaggaggtatcaaactagctgctatgtgcaaacagcgtccattttttcatattagaggtggaacctcaagaatgactttattcttgtatctcatctcaaaatattaataatttttttcccaaaagatggtatataccaagttaaagacagggtattataaatttagagtgattggtggtatattacggaaatacggaacctttagggatagttccgtgtaagggctttgatgccagcatccttggatcagtactgaactcagttccatccgtaaaatatgtaaaggtaagtggcagctgctctatttaatgaaagcagttttaccggattttgttagactaaaatttgattgtgatacattgaacaaaatggaactcatttttttttaaggagtaaagatttttaattctgtgattgtgtgtatgtgtgttgaaactgtaaagcttttatgactctaatattaatctcttaaatgaaattaaaaggcaaaagaacatgattgagcttaaatgatcatttcttcctgcagtgattcttggattgttttctcatgtatttgaaaaaaaaaaaatgaagaaaaataatggaaaatggaagtaattactccagctaaaaaaagcttggacttagatttctttttatgataccaaatgagaaataaaccaggcaaatcagaaggaagttaaagaagcaaatataaattcaacaagtgtcctaattatcctggatattggaatatttgattttccttacaatcccgttctagaatgcctgccgcctttcaacactttcaagagaatttcaacacttacagagtatttatattgttaacagtaattttgctaccaaaaccttcagaataactttaataataaaatgacactgaaataatagactatacaaactctatattttttcagttggtgttaaaataagtcacattttgataccagtacaagatgtcttttaaataaggatgtcatcagtctgatttttatagcattaatgttttatgaagaaaaagttcaaaatgaaagcattaattgctgtgattattagaattctatcatgactgtattgtagtttttgctctatttcagataagcaagatctaagaagttatcaaaactattctttaaaatgctaaagcaggtaactttttcttccattattttttcctcctaccactgagttttgtaatgaattccttgtgtatacaagcaatacaggtgaatactaaactgttatttttagcttcttcaaaagctattttagaaagcttcctggaaataaatgtcttctgtcatttaatttaaataaaaggagtgttaattgttcccaaatttgattacctagctgaaacagatattggattcagcatagtaatagtaaaataaaattggcagagaaaataactgtagactaggataaagcatgactcctccatagcattgttgcttgtatgtacatctgtcactccactgaaagggacctagtcactttaaagaggccttttatctcagcacgagatatccaagcgtgaatgctaaggcttgatgtttccattaggatttagcattcgagatttcagattttatttatagtcattgatgtgttttgctgtattataacacatttaaagggaaattttattatggtttttacatgtagtcatttcataaaaatatccagataggtaaatggaagaaaatagtagattttagtcatggtaccaaatgcaagaggctgttgaacagttgcttgtttgtttacagtaagttccttgagattttcagtactgtagttgccctggacattgagtacagttcagccttactctgtttttaagtagttgtgttgtcaatttcatgcttttaagtcctgatgatccttggagatgggagaaaaagataccagggataattaaaatccacagccagtttcatcagtttcctcatccatcctgcaaataaaaatgttaacaaggagccaaacttattcgttctggttttacaatttattttgaccgttttttgggtgaaaattgcaaacagccaagcaagtggctggaatgccccagtctaagaaattcaaaaacaatcactgagtaagccctaattacattttactcttgactccaggaaaagaaagcaagcttttatctaatctagagggaagtattcgtgagcaataaaaatcacttttttgagttgaataataatcagttaagaatatttaccgcatagcaacacaacatataaagatttgttacaagttgtttacagatgtttgactatttttgctgaagtattttagagtattgaatgtcttctctcttcaagtttctttcatgttcctaatttcagctcctgtagccagagatcacaggtcttccctgtgaaactttggtttctttctataaatgtgtgtggttttcagcgctcaactcctgtcttcaaatggtagtaagttctacttctacttctgtcattcagaacattttatgtcaaatgatgtaatgcagaaattcttgtgcatatttgtaactgaaggaagctttttagatttatttttgtttttaataaaattcagattcctattctaaactggtacataaaagtggtgaatgacttgtatcagcaaatgagctgcgaagtgttctgctctagcaccgtgtttaccttacacagaacctactaaaaactgaaatgtcacttttgtacgataatcatggtttttaagaggctgggtaattggccagttaacacatcatctcttgcatttcaaaattttgtgttaaatggagctcttcacaatttcatgagtcctaatttgtgtgaagcacaacacgtcatacattgctaagtgattcttctcatcagaaagctgatttcttagagtatttctaagttaaattaggtatttcattcctttatcaacctgctggctttccaaccctaacatatgcacacattcttataaactctaccttcattttagtaaatccatccattcatttgctcattcttttaataaatatttgtttatcatatattataaactgcactgctattaccaataccaagttacatgtccattccagtcacacagtagtttgatggtattcccatcttacagatg

SEQ ID NO: 735217 - DNA, 7271 bp, Homo sapiens
ctcgtaatccataacttgagatgaacacaccaaattataaatatcttattcacctaatccgtggaaagtttgtaacaccaaaatattaacttctgttcttgatcactcagcctccatagttattcatgttgcatgatctgattcgctcttttagaatttctcatagcgtcaggtactagctcaaaataacaggagcaactgcttctttccatatcccacattgaggaaaacacattttgcaagccgtcttaaagaaacaggtcaacttagtttagggatgaaacttaaaagtaagcttcgtcacaaaaaacacagttcaacaccacctcgcccggctgcaggcagctcagaggacaggaagtgaggccaagacatatttcacgcagcacagactaaaccccagcttttatctttcccgctggtccttaagggaccaaccgtactgattttccgtcatgttccgcgccacttccgttcgcgcactttaattacgtcaggcgtcctctctcgcggtatcatccggttgctgaggccctgtaataaaggtctcgcgaaatttgttctagaggtccaagtttgcttcttagcttactccaccccacccccaacctgtccctccttttctttccaagtcacaaaattctcccctcccctaccccggagtttacggccctcctcctgtttccgatttcagcccggaaccggaagtgtagtgggcggggcccgtcggcggaaaacgcagcggagccagagccggacacggctgtggccgctgcctctacccccgccacggatcgccgggtagtaggactgcgcggctccaggctgagggtcggtccggaggcgggtgggcgcgggtctcacccggattgtccgggtggcaccgttcccggccccaccgggcgccgcgagggatcatgtctacagcctctgccgcctcctcctcctcctcgtcttcggccggtgagatgatcgaagccccttcccaggtcctcaactttgaagagatcgactacaaggagatcgaggtggaagaggttgttggaagaggagcctttggagttgtttgcaaagctaagtggagagcaaaagatgttgctattaaacaaatagaaagtgaatctgagaggaaagcgtttattgtagagcttcggcagttatcccgtgtgaaccatcctaatattgtaaagctttatggagcctgcttgaatccagtgtgtcttgtgatggaatatgctgaagggggctctttatataatgtgctgcatggtgctgaaccattgccatattatactgctgcccacgcaatgagttggtgtttacagtgttcccaaggagtggcttatcttcacagcatgcaacccaaagcgctaattcacagggacctgaaaccaccaaacttactgctggttgcaggggggacagttctaaaaatttgtgattttggtacagcctgtgacattcagacacacatgaccaataacaaggggagtgctgcttggatggcacctgaagtttttgaaggtagtaattacagtgaaaaatgtgacgtcttcagctggggtattattctttgggaagtgataacgcgtcggaaaccctttgatgagattggtggcccagctttccgaatcatgtgggctgttcataatggtactcgaccaccactgataaaaaatttacctaagcccattgagagcctgatgactcgttgttggtctaaagatccttcccagcgcccttcaatggaggaaattgtgaaaataatgactcacttgatgcgggtataatccttcttttgaggggctttggatttaggggaatttaatatgtgctgagttttaatggaattttaaaagggatgttattactatattctgctttatatattgctatgttttctaagtgagaatgggcatttattactcatagtcagaagaggaaacatttcgagagggaaaatctagttctttatcactggaaagatggctagactaggtttctagacttgcttttttctttttgcttacattagtggacaagtatgtttgtctctgggcctgttgcctcatttgtaatgtgggagaaactgaaatagatagtctctaaagccatcacaggacttggatatattaatattatgacttcaatacatgataaactaaattttacatttttctgataccaattttcatcaagcatttagtcatttatgcaaggcaataggttgcattctcagacacatttatttgagtgacttttactatttggcctattttcaggtttttatatcccagtaaaaagttaaactttcttctatttagaagaacccttttaaatgattatcaaattttcctagtctgtgaatcaagcgcctttagaattatttggaatattttacgcctctggtttttggtacattaacaaaaactgtgaagtggtatcttggctttaaaaagttcaaatatctatgaaagtgcctgaattttgaaacagtttgttcagtagaagaatcttacaatctccttaaatatagactaagtaatttcctaaatggtaaaacgttgtttattcaatctattgaaaatttcttacgcaaagcagcttgaactaatctactaaaagtttaccatcgtatttggataccagtcatatatagaagcctaggccttaaaggtgtgtgcataagaaaacaacttagtctctgtagtcagattacttaaaactttaggatatataagttattgcagttgtaattttgcttctctgttccttgtctaatttgaggagaatacgtttcctttttttctctaaattctaacatttttgtccagcagatactttgagtattatgcctccagtttgtagaaagacattcataatctatcctcttaatatttaaaatgttctaacaattattctatggtatactagtctcagtcttcagactaacagtcactggaagtttacatcactactgtaagaacatgagtatgttttacataattatgagaaatgatactattttatttcatatgtttctctagagaaatatttgctgttttcttcaagactatctagactccaatgtaagctagattcttaggtaggtgcatggcattgatcaaagttgaaatccaagagtacattattgtaatctttgtaaaataaaaaacttaggcacctacaaatttagtatataacttagggaaaataaaacattaatcaggatttaatttgtattaaggaaattttaagctgtggtttacttttttatatatagtactttccaggagcagatgagccattacagtatccttgtcagtattcagatgaaggacagagcaactctgccaccagtacaggctcattcatggacattgcttctacaaatacgagtaacaaaagtgacactaatatggagcaagttcctgccacaaatgatactattaagcgcttagaatcaaaattgttgaaaaatcaggcaaagcaacagagtgaatctggacgtttaagcttgggagcctcccgtgggagcagtgtggagagcttgcccccaacctctgagggcaagaggatgagtgctgacatgtctgaaatagaagctaggatcgccgcaaccacagcctattccaagcctaaacggggccaccgtaaaactgcttcatttggcaacattctggatgtccctgagatcgtcatatcaggcaacggacagccaagacgtagatccatccaagacttgactgtaactggaacagaacctggtcaggtgagcagtaggtcatccagtcccagtgtcagaatgattactacctcaggaccaacctcagaaaagccaactcgaagtcatccatggacccctgatgattccacagataccaatggatcagataactccatcccaatggcttatcttacactggatcaccaactacaggcaagaactagttgcagaactggaccaggatgaaaaggaccagcaaaatacatctcgcctggtacaggaacataaaaagcttttagatgaaaacaaaagcctttctacttactaccagcaatgcaaaaaacaactagaggtcatcagaagtcagcagcagaaacgacaaggcacttcatgattctctgggaccgttacattttgaaatatgcaaagaaagactttttttttaaggaaaggaaaaccttataatgacgattcatgagtgttagctttttggcgtgttctgaatgccaactgcctatatttgctgcatttttttcattgtttattttccttttctcatggtggacatacaattttactgtttcattgcataacatggtagcatctgtgacttgaatgagcagcactttgcaacttcaaaacagatgcagtgaactgtggctgtatatgcatgctcattgtgtgaaggctagcctaacagaacaggaggtatcaaactagctgctatgtgcaaacagcgtccattttttcatattagaggtggaacctcaagaatgactttattcttgtatctcatctcaaaatattaataatttttttcccaaaagatggtatataccaagttaaagacagggtattataaatttagagtgattggtggtatattacggaaatacggaacctttagggatagttccgtgtaagggctttgatgccagcatccttggatcagtactgaactcagttccatccgtaaaatatgtaaaggtaagtggcagctgctctatttaatgaaagcagttttaccggattttgttagactaaaatttgattgtgatacattgaacaaaatggaactcatttttttttaaggagtaaagatttttaattctgtgattgtgtgtatgtgtgttgaaactgtaaagcttttatgactctaatattaatctcttaaatgaaattaaaaggcaaaagaacatgattgagcttaaatgatcatttcttcctgcagtgattcttggattgttttctcatgtatttgaaaaaaaaaaaatgaagaaaaataatggaaaatggaagtaattactccagctaaaaaaagcttggacttagatttctttttatgataccaaatgagaaataaaccaggcaaatcagaaggaagttaaagaagcaaatataaattcaacaagtgtcctaattatcctggatattggaatatttgattttccttacaatcccgttctagaatgcctgccgcctttcaacactttcaagagaatttcaacacttacagagtatttatattgttaacagtaattttgctaccaaaaccttcagaataactttaataataaaatgacactgaaataatagactatacaaactctatattttttcagttggtgttaaaataagtcacattttgataccagtacaagatgtcttttaaataaggatgtcatcagtctgatttttatagcattaatgttttatgaagaaaaagttcaaaatgaaagcattaattgctgtgattattagaattctatcatgactgtattgtagtttttgctctatttcagataagcaagatctaagaagttatcaaaactattctttaaaatgctaaagcaggtaactttttcttccattattttttcctcctaccactgagttttgtaatgaattccttgtgtatacaagcaatacaggtgaatactaaactgttatttttagcttcttcaaaagctattttagaaagcttcctggaaataaatgtcttctgtcatttaatttaaataaaaggagtgttaattgttcccaaatttgattacctagctgaaacagatattggattcagcatagtaatagtaaaataaaattggcagagaaaataactgtagactaggataaagcatgactcctccatagcattgttgcttgtatgtacatctgtcactccactgaaagggacctagtcactttaaagaggccttttatctcagcacgagatatccaagcgtgaatgctaaggcttgatgtttccattaggatttagcattcgagatttcagattttatttatagtcattgatgtgttttgctgtattataacacatttaaagggaaattttattatggtttttacatgtagtcatttcataaaaatatccagataggtaaatggaagaaaatagtagattttagtcatggtaccaaatgcaagaggctgttgaacagttgcttgtttgtttacagtaagttccttgagattttcagtactgtagttgccctggacattgagtacagttcagccttactctgtttttaagtagttgtgttgtcaatttcatgcttttaagtcctgatgatccttggagatgggagaaaaagataccagggataattaaaatccacagccagtttcatcagtttcctcatccatcctgcaaataaaaatgttaacaaggagccaaacttattcgttctggttttacaatttattttgaccgttttttgggtgaaaattgcaaacagccaagcaagtggctggaatgccccagtctaagaaattcaaaaacaatcactgagtaagccctaattacattttactcttgactccaggaaaagaaagcaagcttttatctaatctagagggaagtattcgtgagcaataaaaatcacttttttgagttgaataataatcagttaagaatatttaccgcatagcaacacaacatataaagatttgttacaagttgtttacagatgtttgactatttttgctgaagtattttagagtattgaatgtcttctctcttcaagtttctttcatgttcctaatttcagctcctgtagccagagatcacaggtcttccctgtgaaactttggtttctttctataaatgtgtgtggttttcagcgctcaactcctgtcttcaaatggtagtaagttctacttctacttctgtcattcagaacattttatgtcaaatgatgtaatgcagaaattcttgtgcatatttgtaactgaaggaagctttttagatttatttttgtttttaataaaattcagattcctattctaaaaaaaaaaaaaaaaaaaaaaaaaaggggggggcggctaaaaaataacctagagggcaagtttaagcgtaccaggtttttggtcaaaagggccctaaggggggaataaaaggagggaggggcgtacaacgtcggtgggaaacggcgttgggctttggaagagcttcttttggtggcgtttggaatctaagaattagctaggaataatacgttatggtacacgttctgggaatgcgtaa

SEQ ID NO: 735218 - DNA, 7570 bp, Homo sapiens
  misc_feature (6488)..(6488): n is a, c, g, or t
  misc_feature (6495)..(6495): n is a, c, g, or t
  misc_feature (6515)..(6517): n is a, c, g, or t
  misc_feature (6523)..(6523): n is a, c, g, or t
  misc_feature (6528)..(6528): n is a, c, g, or t
  misc_feature (6537)..(6537): n is a, c, g, or t
  misc_feature (6540)..(6541): n is a, c, g, or t
  misc_feature (6546)..(6546): n is a, c, g, or t
  misc_feature (6564)..(6564): n is a, c, g, or t
  misc_feature (6570)..(6571): n is a, c, g, or t
  misc_feature (6576)..(6577): n is a, c, g, or t
  misc_feature (6582)..(6582): n is a, c, g, or t
  misc_feature (6584)..(6584): n is a, c, g, or t
  misc_feature (6599)..(6599): n is a, c, g, or t
  misc_feature (6603)..(6604): n is a, c, g, or t
  misc_feature (6606)..(6607): n is a, c, g, or t
  misc_feature (6613)..(6613): n is a, c, g, or t
  misc_feature (6616)..(6617): n is a, c, g, or t
  misc_feature (6619)..(6620): n is a, c, g, or t
  misc_feature (6623)..(6624): n is a, c, g, or t
  misc_feature (6629)..(6629): n is a, c, g, or t
  misc_feature (6637)..(6637): n is a, c, g, or t
  misc_feature (6639)..(6639): n is a, c, g, or t
  misc_feature (6642)..(6642): n is a, c, g, or t
  misc_feature (6644)..(6644): n is a, c, g, or t
  misc_feature (6646)..(6647): n is a, c, g, or t
  misc_feature (6654)..(6654): n is a, c, g, or t
  misc_feature (6657)..(6657): n is a, c, g, or t
  misc_feature (6659)..(6659): n is a, c, g, or t
  misc_feature (6674)..(6675): n is a, c, g, or t
  misc_feature (6682)..(6682): n is a, c, g, or t
  misc_feature (6685)..(6685): n is a, c, g, or t
  misc_feature (6692)..(6692): n is a, c, g, or t
  misc_feature (6697)..(6697): n is a, c, g, or t
  misc_feature (6700)..(6700): n is a, c, g, or t
  misc_feature (6704)..(6704): n is a, c, g, or t
  misc_feature (6707)..(6707): n is a, c, g, or t
  misc_feature (6711)..(6711): n is a, c, g, or t
  misc_feature (6714)..(6714): n is a, c, g, or t
  misc_feature (6717)..(6717): n is a, c, g, or t
  misc_feature (6721)..(6721): n is a, c, g, or t
  misc_feature (6731)..(6731): n is a, c, g, or t
  misc_feature (6734)..(6734): n is a, c, g, or t
  misc_feature (6737)..(6737): n is a, c, g, or t
  misc_feature (6747)..(6747): n is a, c, g, or t
  misc_feature (6752)..(6752): n is a, c, g, or t
  misc_feature (6756)..(6756): n is a, c, g, or t
  misc_feature (6776)..(6776): n is a, c, g, or t
  misc_feature (6804)..(6804): n is a, c, g, or t
  misc_feature (6827)..(6827): n is a, c, g, or t
  misc_feature (6831)..(6831): n is a, c, g, or t
ctcgtaatccataacttgagatgaacacaccaaattataaatatcttattcacctaatccgtggaaagtttgtaacaccaaaatattaacttctgttcttgatcactcagcctccatagttattcatgttgcatgatctgattcgctcttttagaatttctcatagcgtcaggtactagctcaaaataacaggagcaactgcttctttccatatcccacattgaggaaaacacattttgcaagccgtcttaaagaaacaggtcaacttagtttagggatgaaacttaaaagtaagcttcgtcacaaaaaacacagttcaacaccacctcgcccggctgcaggcagctcagaggacaggaagtgaggccaagacatatttcacgcagcacagactaaaccccagcttttatctttcccgctggtccttaagggaccaaccgtactgattttccgtcatgttccgcgccacttccgttcgcgcactttaattacgtcaggcgtcctctctcgcggtatcatccggttgctgaggccctgtaataaaggtctcgcgaaatttgttctagaggtccaagtttgcttcttagcttactccaccccacccccaacctgtccctccttttctttccaagtcacaaaattctcccctcccctaccccggagtttacggccctcctcctgtttccgatttcagcccggaaccggaagtgtagtgggcggggcccgtcggcggaaaacgcagcggagccagagccggacacggctgtggccgctgcctctacccccgccacggatcgccgggtagtaggactgcgcggctccaggctgagggtcggtccggaggcgggtgggcgcgggtctcacccggattgtccgggtggcaccgttcccggccccaccgggcgccgcgagggatcatgtctacagcctctgccgcctcctcctcctcctcgtcttcggccggtgagatgatcgaagccccttcccaggtcctcaactttgaagagatcgactacaaggagatcgaggtggaagaggttgttggaagaggagcctttggagttgtttgcaaagctaagtggagagcaaaagatgttgctattaaacaaatagaaagtgaatctgagaggaaagcgtttattgtagagcttcggcagttatcccgtgtgaaccatcctaatattgtaaagctttatggagcctgcttgaatccagtgtgtcttgtgatggaatatgctgaagggggctctttatataatgtgctgcatggtgctgaaccattgccatattatactgctgcccacgcaatgagttggtgtttacagtgttcccaaggagtggcttatcttcacagcatgcaacccaaagcgctaattcacagggacctgaaaccaccaaacttactgctggttgcaggggggacagttctaaaaatttgtgattttggtacagcctgtgacattcagacacacatgaccaataacaaggggagtgctgcttggatggcacctgaagtttttgaaggtagtaattacagtgaaaaatgtgacgtcttcagctggggtattattctttgggaagtgataacgcgtcggaaaccctttgatgagattggtggcccagctttccgaatcatgtgggctgttcataatggtactcgaccaccactgataaaaaatttacctaagcccattgagagcctgatgactcgttgttggtctaaagatccttcccagcgcccttcaatggaggaaattgtgaaaataatgactcacttgatgcgggtataatccttcttttgaggggctttggatttaggggaatttaatatgtgctgagttttaatggaattttaaaagggatgttattactatattctgctttatatattgctatgttttctaagtgagaatgggcatttattactcatagtcagaagaggaaacatttcgagagggaaaatctagttctttatcactggaaagatggctagactaggtttctagacttgcttttttctttttgcttacattagtggacaagtatgtttgtctctgggcctgttgcctcatttgtaatgtgggagaaactgaaatagatagtctctaaagccatcacaggacttggatatattaatattatgacttcaatacatgataaactaaattttacatttttctgataccaattttcatcaagcatttagtcatttatgcaaggcaataggttgcattctcagacacatttatttgagtgacttttactatttggcctattttcaggtttttatatcccagtaaaaagttaaactttcttctatttagaagaacccttttaaatgattatcaaattttcctagtctgtgaatcaagcgcctttagaattatttggaatattttacgcctctggtttttggtacattaacaaaaactgtgaagtggtatcttggctttaaaaagttcaaatatctatgaaagtgcctgaattttgaaacagtttgttcagtagaagaatcttacaatctccttaaatatagactaagtaatttcctaaatggtaaaacgttgtttattcaatctattgaaaatttcttacgcaaagcagcttgaactaatctactaaaagtttaccatcgtatttggataccagtcatatatagaagcctaggccttaaaggtgtgtgcataagaaaacaacttagtctctgtagtcagattacttaaaactttaggatatataagttattgcagttgtaattttgcttctctgttccttgtctaatttgaggagaatacgtttcctttttttctctaaattctaacatttttgtccagcagatactttgagtattatgcctccagtttgtagaaagacattcataatctatcctcttaatatttaaaatgttctaacaattattctatggtatactagtctcagtcttcagactaacagtcactggaagtttacatcactactgtaagaacatgagtatgttttacataattatgagaaatgatactattttatttcatatgtttctctagagaaatatttgctgttttcttcaagactatctagactccaatgtaagctagattcttaggtaggtgcatggcattgatcaaagttgaaatccaagagtacattattgtaatctttgtaaaataaaaaacttaggcacctacaaatttagtatataacttagggaaaataaaacattaatcaggatttaatttgtattaaggaaattttaagctgtggtttacttttttatatatagtactttccaggagcagatgagccattacagtatccttgtcagtattcagatgaaggacagagcaactctgccaccagtacaggctcattcatggacattgcttctacaaatacgagtaacaaaagtgacactaatatggagcaagttcctgccacaaatgatactattaagcgcttagaatcaaaattgttgaaaaatcaggcaaagcaacagagtgaatctggacgtttaagcttgggagcctcccgtgggagcagtgtggagagcttgcccccaacctctgagggcaagaggatgagtgctgacatgtctgaaatagaagctaggatcgccgcaaccacagcctattccaagcctaaacggggccaccgtaaaactgcttcatttggcaacattctggatgtccctgagatcgtcatatcaggcaacggacagccaagacgtagatccatccaagacttgactgtaactggaacagaacctggtcaggtgagcagtaggtcatccagtcccagtgtcagaatgattactacctcaggaccaacctcagaaaagccaactcgaagtcatccatggacccctgatgattccacagataccaatggatcagataactccatcccaatggcttatcttacactggatcaccaactacaggcaagaactagttgcagaactggaccaggatgaaaaggaccagcaaaatacatctcgcctggtacaggaacataaaaagcttttagatgaaaacaaaagcctttctacttactaccagcaatgcaaaaaacaactagaggtcatcagaagtcagcagcagaaacgacaaggcacttcatgattctctgggaccgttacattttgaaatatgcaaagaaagactttttttttaaggaaaggaaaaccttataatgacgattcatgagtgttagctttttggcgtgttctgaatgccaactgcctatatttgctgcatttttttcattgtttattttccttttctcatggtggacatacaattttactgtttcattgcataacatggtagcatctgtgacttgaatgagcagcactttgcaacttcaaaacagatgcagtgaactgtggctgtatatgcatgctcattgtgtgaaggctagcctaacagaacaggaggtatcaaactagctgctatgtgcaaacagcgtccattttttcatattagaggtggaacctcaagaatgactttattcttgtatctcatctcaaaatattaataatttttttcccaaaagatggtatataccaagttaaagacagggtattataaatttagagtgattggtggtatattacggaaatacggaacctttagggatagttccgtgtaagggctttgatgccagcatccttggatcagtactgaactcagttccatccgtaaaatatgtaaaggtaagtggcagctgctctatttaatgaaagcagttttaccggattttgttagactaaaatttgattgtgatacattgaacaaaatggaactcatttttttttaaggagtaaagatttttaattctgtgattgtgtgtatgtgtgttgaaactgtaaagcttttatgactctaatattaatctcttaaatgaaattaaaaggcaaaagaacatgattgagcttaaatgatcatttcttcctgcagtgattcttggattgttttctcatgtatttgaaaaaaaaaaaatgaagaaaaataatggaaaatggaagtaattactccagctaaaaaaagcttggacttagatttctttttatgataccaaatgagaaataaaccaggcaaatcagaaggaagttaaagaagcaaatataaattcaacaagtgtcctaattatcctggatattggaatatttgattttccttacaatcccgttctagaatgcctgccgcctttcaacactttcaagagaatttcaacacttacagagtatttatattgttaacagtaattttgctaccaaaaccttcagaataactttaataataaaatgacactgaaataatagactatacaaactctatattttttcagttggtgttaaaataagtcacattttgataccagtacaagatgtcttttaaataaggatgtcatcagtctgatttttatagcattaatgttttatgaagaaaaagttcaaaatgaaagcattaattgctgtgattattagaattctatcatgactgtattgtagtttttgctctatttcagataagcaagatctaagaagttatcaaaactattctttaaaatgctaaagcaggtaactttttcttccattattttttcctcctaccactgagttttgtaatgaattccttgtgtatacaagcaatacaggtgaatactaaactgttatttttagcttcttcaaaagctattttagaaagcttcctggaaataaatgtcttctgtcatttaatttaaataaaaggagtgttaattgttcccaaatttgattacctagctgaaacagatattggattcagcatagtaatagtaaaataaaattggcagagaaaataactgtagactaggataaagcatgactcctccatagcattgttgcttgtatgtacatctgtcactccactgaaagggacctagtcactttaaagaggccttttatctcagcacgagatatccaagcgtgaatgctaaggcttgatgtttccattaggatttagcattcgagatttcagattttatttatagtcattgatgtgttttgctgtattataacacatttaaagggaaattttattatggtttttacatgtagtcatttcataaaaatatccagataggtaaatggaagaaaatagtagattttagtcatggtaccaaatgcaagaggctgttgaacagttgcttgtttgtttacagtaagttccttgagattttcagtactgtagttgccctggacattgagtacagttcagccttactctgtttttaagtagttgtgttgtcaatttcatgcttttaagtcctgatgatccttggagatgggagaaaaagataccagggataattaaaatccacagccagtttcatcagtttcctcatccatcctgcaaataaaaatgttaacaaggagccaaacttattcgttctggttttacaatttattttgaccgttttttgggtgaaaattgcaaacagccacncccgtcncccccccgcccccgcccaannnaccccnacccnacccccgcncannccccnaccccccccccccccccncccccnnccccnnacccncncccccacccaacccngagnnanncacccncgnncnnccnnaaccncccccccnanccnancnncaaccanccnanaacacccaccccacnncaacacnacncacaaanacccnccncaanccncccncanacncccnaccacccccnccnaancaccccagancaccnaacnccccccccccccaagccccntccatgcccccaatcccagcccccgcanccagagaccacaggccccccccncganaccctggcccccccccataaatgtgtgtggttttcagcgctcaactcctgtcttcaaatggtagtaagttctacttctacttctgtcattcagaacattttatgtcaaatgatgtaatgcagaaattcttgtgcatatttgtaactgaaggaagctttttagatttatttttgtttttaataaaattcagattcctattctaaactggtacataaaagtggtgaatgacttgtatcagcaaatgagctgcgaagtgttctgctctagcaccgtgtttaccttacacagaacctactaaaaactgaaatgtcacttttgtacgataatcatggtttttaagaggctgggtaattggccagttaacacatcatctcttgcatttcaaaattttgtgttaaatggagctcttcacaatttcatgagtcctaatttgtgtgaagcacaacacgtcatacattgctaagtgattcttctcatcagaaagctgatttcttagagtatttctaagttaaattaggtatttcattcctttatcaacctgctggctttccaaccctaacatatgcacacattcttataaactctaccttcattttagtaaatccatccattcatttgctcattcttttaataaatatttgtttatcatatattataaactgcactgctattaccaataccaagttacatgtccattccagtcacacagtagtttgatggtattcccatcttacagatg

SEQ ID NO: 735219 - DNA, 7271 bp, Homo sapiens
  misc_feature (6488)..(6488): n is a, c, g, or t
  misc_feature (6495)..(6495): n is a, c, g, or t
  misc_feature (6515)..(6517): n is a, c, g, or t
  misc_feature (6523)..(6523): n is a, c, g, or t
  misc_feature (6528)..(6528): n is a, c, g, or t
  misc_feature (6537)..(6537): n is a, c, g, or t
  misc_feature (6540)..(6541): n is a, c, g, or t
  misc_feature (6546)..(6546): n is a, c, g, or t
  misc_feature (6564)..(6564): n is a, c, g, or t
  misc_feature (6570)..(6571): n is a, c, g, or t
  misc_feature (6576)..(6577): n is a, c, g, or t
  misc_feature (6582)..(6582): n is a, c, g, or t
  misc_feature (6584)..(6584): n is a, c, g, or t
  misc_feature (6599)..(6599): n is a, c, g, or t
  misc_feature (6603)..(6604): n is a, c, g, or t
  misc_feature (6606)..(6607): n is a, c, g, or t
  misc_feature (6613)..(6613): n is a, c, g, or t
  misc_feature (6616)..(6617): n is a, c, g, or t
  misc_feature (6619)..(6620): n is a, c, g, or t
  misc_feature (6623)..(6624): n is a, c, g, or t
  misc_feature (6629)..(6629): n is a, c, g, or t
  misc_feature (6637)..(6637): n is a, c, g, or t
  misc_feature (6639)..(6639): n is a, c, g, or t
  misc_feature (6642)..(6642): n is a, c, g, or t
  misc_feature (6644)..(6644): n is a, c, g, or t
  misc_feature (6646)..(6647): n is a, c, g, or t
  misc_feature (6654)..(6654): n is a, c, g, or t
  misc_feature (6657)..(6657): n is a, c, g, or t
  misc_feature (6659)..(6659): n is a, c, g, or t
  misc_feature (6674)..(6675): n is a, c, g, or t
  misc_feature (6682)..(6682): n is a, c, g, or t
  misc_feature (6685)..(6685): n is a, c, g, or t
  misc_feature (6692)..(6692): n is a, c, g, or t
  misc_feature (6697)..(6697): n is a, c, g, or t
  misc_feature (6700)..(6700): n is a, c, g, or t
  misc_feature (6704)..(6704): n is a, c, g, or t
  misc_feature (6707)..(6707): n is a, c, g, or t
  misc_feature (6711)..(6711): n is a, c, g, or t
  misc_feature (6714)..(6714): n is a, c, g, or t
  misc_feature (6717)..(6717): n is a, c, g, or t
  misc_feature (6721)..(6721): n is a, c, g, or t
  misc_feature (6731)..(6731): n is a, c, g, or t
  misc_feature (6734)..(6734): n is a, c, g, or t
  misc_feature (6737)..(6737): n is a, c, g, or t
  misc_feature (6747)..(6747): n is a, c, g, or t
  misc_feature (6752)..(6752): n is a, c, g, or t
  misc_feature (6756)..(6756): n is a, c, g, or t
  misc_feature (6776)..(6776): n is a, c, g, or t
  misc_feature (6804)..(6804): n is a, c, g, or t
  misc_feature (6827)..(6827): n is a, c, g, or t
  misc_feature (6831)..(6831): n is a, c, g, or t
ctcgtaatccataacttgagatgaacacaccaaattataaatatcttattcacctaatccgtggaaagtttgtaacaccaaaatattaacttctgttcttgatcactcagcctccatagttattcatgttgcatgatctgattcgctcttttagaatttctcatagcgtcaggtactagctcaaaataacaggagcaactgcttctttccatatcccacattgaggaaaacacattttgcaagccgtcttaaagaaacaggtcaacttagtttagggatgaaacttaaaagtaagcttcgtcacaaaaaacacagttcaacaccacctcgcccggctgcaggcagctcagaggacaggaagtgaggccaagacatatttcacgcagcacagactaaaccccagcttttatctttcccgctggtccttaagggaccaaccgtactgattttccgtcatgttccgcgccacttccgttcgcgcactttaattacgtcaggcgtcctctctcgcggtatcatccggttgctgaggccctgtaataaaggtctcgcgaaatttgttctagaggtccaagtttgcttcttagcttactccaccccacccccaacctgtccctccttttctttccaagtcacaaaattctcccctcccctaccccggagtttacggccctcctcctgtttccgatttcagcccggaaccggaagtgtagtgggcggggcccgtcggcggaaaacgcagcggagccagagccggacacggctgtggccgctgcctctacccccgccacggatcgccgggtagtaggactgcgcggctccaggctgagggtcggtccggaggcgggtgggcgcgggtctcacccggattgtccgggtggcaccgttcccggccccaccgggcgccgcgagggatcatgtctacagcctctgccgcctcctcctcctcctcgtcttcggccggtgagatgatcgaagccccttcccaggtcctcaactttgaagagatcgactacaaggagatcgaggtggaagaggttgttggaagaggagcctttggagttgtttgcaaagctaagtggagagcaaaagatgttgctattaaacaaatagaaagtgaatctgagaggaaagcgtttattgtagagcttcggcagttatcccgtgtgaaccatcctaatattgtaaagctttatggagcctgcttgaatccagtgtgtcttgtgatggaatatgctgaagggggctctttatataatgtgctgcatggtgctgaaccattgccatattatactgctgcccacgcaatgagttggtgtttacagtgttcccaaggagtggcttatcttcacagcatgcaacccaaagcgctaattcacagggacctgaaaccaccaaacttactgctggttgcaggggggacagttctaaaaatttgtgattttggtacagcctgtgacattcagacacacatgaccaataacaaggggagtgctgcttggatggcacctgaagtttttgaaggtagtaattacagtgaaaaatgtgacgtcttcagctggggtattattctttgggaagtgataacgcgtcggaaaccctttgatgagattggtggcccagctttccgaatcatgtgggctgttcataatggtactcgaccaccactgataaaaaatttacctaagcccattgagagcctgatgactcgttgttggtctaaagatccttcccagcgcccttcaatggaggaaattgtgaaaataatgactcacttgatgcgggtataatccttcttttgaggggctttggatttaggggaatttaatatgtgctgagttttaatggaattttaaaagggatgttattactatattctgctttatatattgctatgttttctaagtgagaatgggcatttattactcatagtcagaagaggaaacatttcgagagggaaaatctagttctttatcactggaaagatggctagactaggtttctagacttgcttttttctttttgcttacattagtggacaagtatgtttgtctctgggcctgttgcctcatttgtaatgtgggagaaactgaaatagatagtctctaaagccatcacaggacttggatatattaatattatgacttcaatacatgataaactaaattttacatttttctgataccaattttcatcaagcatttagtcatttatgcaaggcaataggttgcattctcagacacatttatttgagtgacttttactatttggcctattttcaggtttttatatcccagtaaaaagttaaactttcttctatttagaagaacccttttaaatgattatcaaattttcctagtctgtgaatcaagcgcctttagaattatttggaatattttacgcctctggtttttggtacattaacaaaaactgtgaagtggtatcttggctttaaaaagttcaaatatctatgaaagtgcctgaattttgaaacagtttgttcagtagaagaatcttacaatctccttaaatatagactaagtaatttcctaaatggtaaaacgttgtttattcaatctattgaaaatttcttacgcaaagcagcttgaactaatctactaaaagtttaccatcgtatttggataccagtcatatatagaagcctaggccttaaaggtgtgtgcataagaaaacaacttagtctctgtagtcagattacttaaaactttaggatatataagttattgcagttgtaattttgcttctctgttccttgtctaatttgaggagaatacgtttcctttttttctctaaattctaacatttttgtccagcagatactttgagtattatgcctccagtttgtagaaagacattcataatctatcctcttaatatttaaaatgttctaacaattattctatggtatactagtctcagtcttcagactaacagtcactggaagtttacatcactactgtaagaacatgagtatgttttacataattatgagaaatgatactattttatttcatatgtttctctagagaaatatttgctgttttcttcaagactatctagactccaatgtaagctagattcttaggtaggtgcatggcattgatcaaagttgaaatccaagagtacattattgtaatctttgtaaaataaaaaacttaggcacctacaaatttagtatataacttagggaaaataaaacattaatcaggatttaatttgtattaaggaaattttaagctgtggtttacttttttatatatagtactttccaggagcagatgagccattacagtatccttgtcagtattcagatgaaggacagagcaactctgccaccagtacaggctcattcatggacattgcttctacaaatacgagtaacaaaagtgacactaatatggagcaagttcctgccacaaatgatactattaagcgcttagaatcaaaattgttgaaaaatcaggcaaagcaacagagtgaatctggacgtttaagcttgggagcctcccgtgggagcagtgtggagagcttgcccccaacctctgagggcaagaggatgagtgctgacatgtctgaaatagaagctaggatcgccgcaaccacagcctattccaagcctaaacggggccaccgtaaaactgcttcatttggcaacattctggatgtccctgagatcgtcatatcaggcaacggacagccaagacgtagatccatccaagacttgactgtaactggaacagaacctggtcaggtgagcagtaggtcatccagtcccagtgtcagaatgattactacctcaggaccaacctcagaaaagccaactcgaagtcatccatggacccctgatgattccacagataccaatggatcagataactccatcccaatggcttatcttacactggatcaccaactacaggcaagaactagttgcagaactggaccaggatgaaaaggaccagcaaaatacatctcgcctggtacaggaacataaaaagcttttagatgaaaacaaaagcctttctacttactaccagcaatgcaaaaaacaactagaggtcatcagaagtcagcagcagaaacgacaaggcacttcatgattctctgggaccgttacattttgaaatatgcaaagaaagactttttttttaaggaaaggaaaaccttataatgacgattcatgagtgttagctttttggcgtgttctgaatgccaactgcctatatttgctgcatttttttcattgtttattttccttttctcatggtggacatacaattttactgtttcattgcataacatggtagcatctgtgacttgaatgagcagcactttgcaacttcaaaacagatgcagtgaactgtggctgtatatgcatgctcattgtgtgaaggctagcctaacagaacaggaggtatcaaactagctgctatgtgcaaacagcgtccattttttcatattagaggtggaacctcaagaatgactttattcttgtatctcatctcaaaatattaataatttttttcccaaaagatggtatataccaagttaaagacagggtattataaatttagagtgattggtggtatattacggaaatacggaacctttagggatagttccgtgtaagggctttgatgccagcatccttggatcagtactgaactcagttccatccgtaaaatatgtaaaggtaagtggcagctgctctatttaatgaaagcagttttaccggattttgttagactaaaatttgattgtgatacattgaacaaaatggaactcatttttttttaaggagtaaagatttttaattctgtgattgtgtgtatgtgtgttgaaactgtaaagcttttatgactctaatattaatctcttaaatgaaattaaaaggcaaaagaacatgattgagcttaaatgatcatttcttcctgcagtgattcttggattgttttctcatgtatttgaaaaaaaaaaaatgaagaaaaataatggaaaatggaagtaattactccagctaaaaaaagcttggacttagatttctttttatgataccaaatgagaaataaaccaggcaaatcagaaggaagttaaagaagcaaatataaattcaacaagtgtcctaattatcctggatattggaatatttgattttccttacaatcccgttctagaatgcctgccgcctttcaacactttcaagagaatttcaacacttacagagtatttatattgttaacagtaattttgctaccaaaaccttcagaataactttaataataaaatgacactgaaataatagactatacaaactctatattttttcagttggtgttaaaataagtcacattttgataccagtacaagatgtcttttaaataaggatgtcatcagtctgatttttatagcattaatgttttatgaagaaaaagttcaaaatgaaagcattaattgctgtgattattagaattctatcatgactgtattgtagtttttgctctatttcagataagcaagatctaagaagttatcaaaactattctttaaaatgctaaagcaggtaactttttcttccattattttttcctcctaccactgagttttgtaatgaattccttgtgtatacaagcaatacaggtgaatactaaactgttatttttagcttcttcaaaagctattttagaaagcttcctggaaataaatgtcttctgtcatttaatttaaataaaaggagtgttaattgttcccaaatttgattacctagctgaaacagatattggattcagcatagtaatagtaaaataaaattggcagagaaaataactgtagactaggataaagcatgactcctccatagcattgttgcttgtatgtacatctgtcactccactgaaagggacctagtcactttaaagaggccttttatctcagcacgagatatccaagcgtgaatgctaaggcttgatgtttccattaggatttagcattcgagatttcagattttatttatagtcattgatgtgttttgctgtattataacacatttaaagggaaattttattatggtttttacatgtagtcatttcataaaaatatccagataggtaaatggaagaaaatagtagattttagtcatggtaccaaatgcaagaggctgttgaacagttgcttgtttgtttacagtaagttccttgagattttcagtactgtagttgccctggacattgagtacagttcagccttactctgtttttaagtagttgtgttgtcaatttcatgcttttaagtcctgatgatccttggagatgggagaaaaagataccagggataattaaaatccacagccagtttcatcagtttcctcatccatcctgcaaataaaaatgttaacaaggagccaaacttattcgttctggttttacaatttattttgaccgttttttgggtgaaaattgcaaacagccacncccgtcncccccccgcccccgcccaannnaccccnacccnacccccgcncannccccnaccccccccccccccccncccccnnccccnnacccncncccccacccaacccngagnnanncacccncgnncnnccnnaaccncccccccnanccnancnncaaccanccnanaacacccaccccacnncaacacnacncacaaanacccnccncaanccncccncanacncccnaccacccccnccnaancaccccagancaccnaacnccccccccccccaagccccntccatgcccccaatcccagcccccgcanccagagaccacaggccccccccncganaccctggcccccccccataaatgtgtgtggttttcagcgctcaactcctgtcttcaaatggtagtaagttctacttctacttctgtcattcagaacattttatgtcaaatgatgtaatgcagaaattcttgtgcatatttgtaactgaaggaagctttttagatttatttttgtttttaataaaattcagattcctattctaaaaaaaaaaaaaaaaaaaaaaaaaaggggggggcggctaaaaaataacctagagggcaagtttaagcgtaccaggtttttggtcaaaagggccctaaggggggaataaaaggagggaggggcgtacaacgtcggtgggaaacggcgttgggctttggaagagcttcttttggtggcgtttggaatctaagaattagctaggaataatacgttatggtacacgttctgggaatgcgtaa

SEQ ID NO: 735220 - DNA, 6414 bp, Homo sapiens
ctcgtaatccataacttgagatgaacacaccaaattataaatatcttattcacctaatccgtggaaagtttgtaacaccaaaatattaacttctgttcttgatcactcagcctccatagttattcatgttgcatgatctgattcgctcttttagaatttctcatagcgtcaggtactagctcaaaataacaggagcaactgcttctttccatatcccacattgaggaaaacacattttgcaagccgtcttaaagaaacaggtcaacttagtttagggatgaaacttaaaagtaagcttcgtcacaaaaaacacagttcaacaccacctcgcccggctgcaggcagctcagaggacaggaagtgaggccaagacatatttcacgcagcacagactaaaccccagcttttatctttcccgctggtccttaagggaccaaccgtactgattttccgtcatgttccgcgccacttccgttcgcgcactttaattacgtcaggcgtcctctctcgcggtatcatccggttgctgaggccctgtaataaaggtctcgcgaaatttgttctagaggtccaagtttgcttcttagcttactccaccccacccccaacctgtccctccttttctttccaagtcacaaaattctcccctcccctaccccggagtttacggccctcctcctgtttccgatttcagcccggaaccggaagtgtagtgggcggggcccgtcggcggaaaacgcagcggagccagagccggacacggctgtggccgctgcctctacccccgccacggatcgccgggtagtaggactgcgcggctccaggctgagggtcggtccggaggcgggtgggcgcgggtctcacccggattgtccgggtggcaccgttcccggccccaccgggcgccgcgagggatcatgtctacagcctctgccgcctcctcctcctcctcgtcttcggccggtgagatgatcgaagccccttcccaggtcctcaactttgaagagatcgactacaaggagatcgaggtggaagaggttgttggaagaggagcctttggagttgtttgcaaagctaagtggagagcaaaagatgttgctattaaacaaatagaaagtgaatctgagaggaaagcgtttattgtagagcttcggcagttatcccgtgtgaaccatcctaatattgtaaagctttatggagcctgcttgaatccagtgtgtcttgtgatggaatatgctgaagggggctctttatataatgtgctgcatggtgctgaaccattgccatattatactgctgcccacgcaatgagttggtgtttacagtgttcccaaggagtggcttatcttcacagcatgcaacccaaagcgctaattcacagggacctgaaaccaccaaacttactgctggttgcaggggggacagttctaaaaatttgtgattttggtacagcctgtgacattcagacacacatgaccaataacaaggggagtgctgcttggatggcacctgaagtttttgaaggtagtaattacagtgaaaaatgtgacgtcttcagctggggtattattctttgggaagtgataacgcgtcggaaaccctttgatgagattggtggcccagctttccgaatcatgtgggctgttcataatggtactcgaccaccactgataaaaaatttacctaagcccattgagagcctgatgactcgttgttggtctaaagatccttcccagcgcccttcaatggaggaaattgtgaaaataatgactcacttgatgcgggtataatccttcttttgaggggctttggatttaggggaatttaatatgtgctgagttttaatggaattttaaaagggatgttattactatattctgctttatatattgctatgttttctaagtgagaatgggcatttattactcatagtcagaagaggaaacatttcgagagggaaaatctagttctttatcactggaaagatggctagactaggtttctagacttgcttttttctttttgcttacattagtggacaagtatgtttgtctctgggcctgttgcctcatttgtaatgtgggagaaactgaaatagatagtctctaaagccatcacaggacttggatatattaatattatgacttcaatacatgataaactaaattttacatttttctgataccaattttcatcaagcatttagtcatttatgcaaggcaataggttgcattctcagacacatttatttgagtgacttttactatttggcctattttcaggtttttatatcccagtaaaaagttaaactttcttctatttagaagaacccttttaaatgattatcaaattttcctagtctgtgaatcaagcgcctttagaattatttggaatattttacgcctctggtttttggtacattaacaaaaactgtgaagtggtatcttggctttaaaaagttcaaatatctatgaaagtgcctgaattttgaaacagtttgttcagtagaagaatcttacaatctccttaaatatagactaagtaatttcctaaatggtaaaacgttgtttattcaatctattgaaaatttcttacgcaaagcagcttgaactaatctactaaaagtttaccatcgtatttggataccagtcatatatagaagcctaggccttaaaggtgtgtgcataagaaaacaacttagtctctgtagtcagattacttaaaactttaggatatataagttattgcagttgtaattttgcttctctgttccttgtctaatttgaggagaatacgtttcctttttttctctaaattctaacatttttgtccagcagatactttgagtattatgcctccagtttgtagaaagacattcataatctatcctcttaatatttaaaatgttctaacaattattctatggtatactagtctcagtcttcagactaacagtcactggaagtttacatcactactgtaagaacatgagtatgttttacataattatgagaaatgatactattttatttcatatgtttctctagagaaatatttgctgttttcttcaagactatctagactccaatgtaagctagattcttaggtaggtgcatggcattgatcaaagttgaaatccaagagtacattattgtaatctttgtaaaataaaaaacttaggcacctacaaatttagtatataacttagggaaaataaaacattaatcaggatttaatttgtattaaggaaattttaagctgtggtttacttttttatatatagtactttccaggagcagatgagccattacagtatccttgtcagtattcagatgaaggacagagcaactctgccaccagtacaggctcattcatggacattgcttctacaaatacgagtaacaaaagtgacactaatatggagcaagttcctgccacaaatgatactattaagcgcttagaatcaaaattgttgaaaaatcaggcaaagcaacagagtgaatctggacgtttaagcttgggagcctcccgtgggagcagtgtggagagcttgcccccaacctctgagggcaagaggatgagtgctgacatgtctgaaatagaagctaggatcgccgcaaccacagcctattccaagcctaaacggggccaccgtaaaactgcttcatttggcaacattctggatgtccctgagatcgtcatatcaggcaacggacagccaagacgtagatccatccaagacttgactgtaactggaacagaacctggtcaggtgagcagtaggtcatccagtcccagtgtcagaatgattactacctcaggaccaacctcagaaaagccaactcgaagtcatccatggacccctgatgattccacagataccaatggatcagataactccatcccaatggcttatcttacactggatcaccaactacaggcaagaactagttgcagaactggaccaggatgaaaaggaccagcaaaatacatctcgcctggtacaggaacataaaaagcttttagatgaaaacaaaagcctttctacttactaccagcaatgcaaaaaacaactagaggtcatcagaagtcagcagcagaaacgacaaggcacttcatgattctctgggaccgttacattttgaaatatgcaaagaaagactttttttttaaggaaaggaaaaccttataatgacgattcatgagtgttagctttttggcgtgttctgaatgccaactgcctatatttgctgcatttttttcattgtttattttccttttctcatggtggacatacaattttactgtttcattgcataacatggtagcatctgtgacttgaatgagcagcactttgcaacttcaaaacagatgcagtgaactgtggctgtatatgcatgctcattgtgtgaaggctagcctaacagaacaggaggtatcaaactagctgctatgtgcaaacagcgtccattttttcatattagaggtggaacctcaagaatgactttattcttgtatctcatctcaaaatattaataatttttttcccaaaagatggtatataccaagttaaagacagggtattataaatttagagtgattggtggtatattacggaaatacggaacctttagggatagttccgtgtaagggctttgatgccagcatccttggatcagtactgaactcagttccatccgtaaaatatgtaaaggtaagtggcagctgctctatttaatgaaagcagttttaccggattttgttagactaaaatttgattgtgatacattgaacaaaatggaactcatttttttttaaggagtaaagatttttaattctgtgattgtgtgtatgtgtgttgaaactgtaaagcttttatgactctaatattaatctcttaaatgaaattaaaaggcaaaagaacatgattgagcttaaatgatcatttcttcctgcagtgattcttggattgttttctcatgtatttgaaaaaaaaaaaatgaagaaaaataatggaaaatggaagtaattactccagctaaaaaaagcttggacttagatttctttttatgataccaaatgagaaataaaccaggcaaatcagaaggaagttaaagaagcaaatataaattcaacaagtgtcctaattatcctggatattggaatatttgattttccttacaatcccgttctagaatgcctgccgcctttcaacactttcaagagaatttcaacacttacagagtatttatattgttaacagtaattttgctaccaaaaccttcagaataactttaataataaaatgacactgaaataatagactatacaaactctatattttttcagttggtgttaaaataagtcacattttgataccagtacaagatgtcttttaaataaggatgtcatcagtctgatttttatagcattaatgttttatgaagaaaaagttcaaaatgaaagcattaattgctgtgattattagaattctatcatgactgtattgtagtttttgctctatttcagataagcaagatctaagaagttatcaaaactattctttaaaatgctaaagcaggtaactttttcttccattattttttcctcctaccactgagttttgtaatgaattccttgtgtatacaagcaatacaggtgaatactaaactgttatttttagcttcttcaaaagctattttagaaagcttcctggaaataaatgtcttctgtcatttaatttaaataaaaggagtgttaattgttcccaaatttgattacctagctgaaacagatattggattcagcatagtaatagtaaaataaaattggcagagaaaataactgtagactaggataaagcatgactcctccatagcattgttgcttgtatgtacatctgtcactccactgaaagggacctagtcactttaaagaggccttttatctcagcacgagatatccaagcgtgaatgctaaggcttgatgtttccattaggatttagcattcgagatttcagattttatttatagtcattgatgtgttttgctgtattataacacatttaaagggaaattttattatggtttttacatgtagtcatttcataaaaatatccagataggtaaatggaagaaaatagtagattttagtcatggtaccaaatgcaagaggctgttgaacagttgcttgtttgtttacagtaagttccttgagattttcagtactgtagttgccctggacattgagtacagttcagccttactctgtttttaagtagttgtgttgtcaatttcatgcttttaagtcctgatgatccttggagatgggagaaaaagataccagggataattaaaatccacagccagtttcatcagtttcctcatccatccgtcgacgcggccgcgaattta

SEQ ID NO: 735221 - DNA, 7516 bp, Homo sapiens
ctcgtaatccataacttgagatgaacacaccaaattataaatatcttattcacctaatccgtggaaagtttgtaacaccaaaatattaacttctgttcttgatcactcagcctccatagttattcatgttgcatgatctgattcgctcttttagaatttctcatagcgtcaggtactagctcaaaataacaggagcaactgcttctttccatatcccacattgaggaaaacacattttgcaagccgtcttaaagaaacaggtcaacttagtttagggatgaaacttaaaagtaagcttcgtcacaaaaaacacagttcaacaccacctcgcccggctgcaggcagctcagaggacaggaagtgaggccaagacatatttcacgcagcacagactaaaccccagcttttatctttcccgctggtccttaagggaccaaccgtactgattttccgtcatgttccgcgccacttccgttcgcgcactttaattacgtcaggcgtcctctctcgcggtatcatccggttgctgaggccctgtaataaaggtctcgcgaaatttgttctagaggtccaagtttgcttcttagcttactccaccccacccccaacctgtccctccttttctttccaagtcacaaaattctcccctcccctaccccggagtttacggccctcctcctgtttccgatttcagcccggaaccggaagtgtagtgggcggggcccgtcggcggaaaacgcagcggagccagagccggacacggctgtggccgctgcctctacccccgccacggatcgccgggtagtaggactgcgcggctccaggctgagggtcggtccggaggcgggtgggcgcgggtctcacccggattgtccgggtggcaccgttcccggccccaccgggcgccgcgagggatcatgtctacagcctctgccgcctcctcctcctcctcgtcttcggccggtgagatgatcgaagccccttcccaggtcctcaactttgaagagatcgactacaaggagatcgaggtggaagaggttgttggaagaggagcctttggagttgtttgcaaagctaagtggagagcaaaagatgttgctattaaacaaatagaaagtgaatctgagaggaaagcgtttattgtagagcttcggcagttatcccgtgtgaaccatcctaatattgtaaagctttatggagcctgcttgaatccagtgtgtcttgtgatggaatatgctgaagggggctctttatataatgtgctgcatggtgctgaaccattgccatattatactgctgcccacgcaatgagttggtgtttacagtgttcccaaggagtggcttatcttcacagcatgcaacccaaagcgctaattcacagggacctgaaaccaccaaacttactgctggttgcaggggggacagttctaaaaatttgtgattttggtacagcctgtgacattcagacacacatgaccaataacaaggggagtgctgcttggatggcacctgaagtttttgaaggtagtaattacagtgaaaaatgtgacgtcttcagctggggtattattctttgggaagtgataacgcgtcggaaaccctttgatgagattggtggcccagctttccgaatcatgtgggctgttcataatggtactcgaccaccactgataaaaaatttacctaagcccattgagagcctgatgactcgttgttggtctaaagatccttcccagcgcccttcaatggaggaaattgtgaaaataatgactcacttgatgcgggtataatccttcttttgaggggctttggatttaggggaatttaatatgtgctgagttttaatggaattttaaaagggatgttattactatattctgctttatatattgctatgttttctaagtgagaatgggcatttattactcatagtcagaagaggaaacatttcgagagggaaaatctagttctttatcactggaaagatggctagactaggtttctagacttgcttttttctttttgcttacattagtggacaagtatgtttgtctctgggcctgttgcctcatttgtaatgtgggagaaactgaaatagatagtctctaaagccatcacaggacttggatatattaatattatgacttcaatacatgataaactaaattttacatttttctgataccaattttcatcaagcatttagtcatttatgcaaggcaataggttgcattctcagacacatttatttgagtgacttttactatttggcctattttcaggtttttatatcccagtaaaaagttaaactttcttctatttagaagaacccttttaaatgattatcaaattttcctagtctgtgaatcaagcgcctttagaattatttggaatattttacgcctctggtttttggtacattaacaaaaactgtgaagtggtatcttggctttaaaaagttcaaatatctatgaaagtgcctgaattttgaaacagtttgttcagtagaagaatcttacaatctccttaaatatagactaagtaatttcctaaatggtaaaacgttgtttattcaatctattgaaaatttcttacgcaaagcagcttgaactaatctactaaaagtttaccatcgtatttggataccagtcatatatagaagcctaggccttaaaggtgtgtgcataagaaaacaacttagtctctgtagtcagattacttaaaactttaggatatataagttattgcagttgtaattttgcttctctgttccttgtctaatttgaggagaatacgtttcctttttttctctaaattctaacatttttgtccagcagatactttgagtattatgcctccagtttgtagaaagacattcataatctatcctcttaatatttaaaatgttctaacaattattctatggtatactagtctcagtcttcagactaacagtcactggaagtttacatcactactgtaagaacatgagtatgttttacataattatgagaaatgatactattttatttcatatgtttctctagagaaatatttgctgttttcttcaagactatctagactccaatgtaagctagattcttaggtaggtgcatggcattgatcaaagttgaaatccaagagtacattattgtaatctttgtaaaataaaaaacttaggcacctacaaatttagtatataacttagggaaaataaaacattaatcaggatttaatttgtattaaggaaattttaagctgtggtttacttttttatatatagtactttccaggagcagatgagccattacagtatccttgtcagtattcagatgaaggacagagcaactctgccaccagtacaggctcattcatggacattgcttctacaaatacgagtaacaaaagtgacactaatatggagcaagttcctgccacaaatgatactattaagcgcttagaatcaaaattgttgaaaaatcaggcaaagcaacagagtgaatctggacgtttaagcttgggagcctcccgtgggagcagtgtggagagcttgcccccaacctctgagggcaagaggatgagtgctgacatgtctgaaatagaagctaggatcgccgcaaccacagcctattccaagcctaaacggggccaccgtaaaactgcttcatttggcaacattctggatgtccctgagatcgtcatatcaggcaacggacagccaagacgtagatccatccaagacttgactgtaactggaacagaacctggtcaggtgagcagtaggtcatccagtcccagtgtcagaatgattactacctcaggaccaacctcagaaaagccaactcgaagtcatccatggacccctgatgattccacagataccaatggatcagataactccatcccaatggcttatcttacactggatcaccaactacaggcaagaactagttgcagaactggaccaggatgaaaaggaccagcaaaatacatctcgcctggtacaggaacataaaaagcttttagatgaaaacaaaagcctttctacttactaccagcaatgcaaaaaacaactagaggtcatcagaagtcagcagcagaaacgacaaggcacttcatgattctctgggaccgttacattttgaaatatgcaaagaaagactttttttttaaggaaaggaaaaccttataatgacgattcatgagtgttagctttttggcgtgttctgaatgccaactgcctatatttgctgcatttttttcattgtttattttccttttctcatggtggacatacaattttactgtttcattgcataacatggtagcatctgtgacttgaatgagcagcactttgcaacttcaaaacagatgcagtgaactgtggctgtatatgcatgctcattgtgtgaaggctagcctaacagaacaggaggtatcaaactagctgctatgtgcaaacagcgtccattttttcatattagaggtggaacctcaagaatgactttattcttgtatctcatctcaaaatattaataatttttttcccaaaagatggtatataccaagttaaagacagggtattataaatttagagtgattggtggtatattacggaaatacggaacctttagggatagttccgtgtaagggctttgatgccagcatccttggatcagtactgaactcagttccatccgtaaaatatgtaaaggtaagtggcagctgctctatttaatgaaagcagttttaccggattttgttagactaaaatttgattgtgatacattgaacaaaatggaactcatttttttttaaggagtaaagatttttaattctgtgattgtgtgtatgtgtgttgaaactgtaaagcttttatgactctaatattaatctcttaaatgaaattaaaaggcaaaagaacatgattgagcttaaatgatcatttcttcctgcagtgattcttggattgttttctcatgtatttgaaaaaaaaaaaatgaagaaaaataatggaaaatggaagtaattactccagctaaaaaaagcttggacttagatttctttttatgataccaaatgagaaataaaccaggcaaatcagaaggaagttaaagaagcaaatataaattcaacaagtgtcctaattatcctggatattggaatatttgattttccttacaatcccgttctagaatgcctgccgcctttcaacactttcaagagaatttcaacacttacagagtatttatattgttaacagtaattttgctaccaaaaccttcagaataactttaataataaaatgacactgaaataatagactatacaaactctatattttttcagttggtgttaaaataagtcacattttgataccagtacaagatgtcttttaaataaggatgtcatcagtctgatttttatagcattaatgttttatgaagaaaaagttcaaaatgaaagcattaattgctgtgattattagaattctatcatgactgtattgtagtttttgctctatttcagataagcaagatctaagaagttatcaaaactattctttaaaatgctaaagcaggtaactttttcttccattattttttcctcctaccactgagttttgtaatgaattccttgtgtatacaagcaatacaggtgaatactaaactgttatttttagcttcttcaaaagctattttagaaagcttcctggaaataaatgtcttctgtcatttaatttaaataaaaggagtgttaattgttcccaaatttgattacctagctgaaacagatattggattcagcatagtaatagtaaaataaaattggcagagaaaataactgtagactaggataaagcatgactcctccatagcattgttgcttgtatgtacatctgtcactccactgaaagggacctagtcactttaaagaggccttttatctcagcacgagatatccaagcgtgaatgctaaggcttgatgtttccattaggatttagcattcgagatttcagattttatttatagtcattgatgtgttttgctgtattataacacatttaaagggaaattttattatggtttttacatgtagtcatttcataaaaatatccagataggtaaatggaagttgtttgtttacagtaagttccttgagattttcagtactgtagttgccctggacattgagtacagttcagccttactctgtttttaagtagttgtgttgtcaatttcatgcttttaagtcctgatgatccttggagatgggagaaaaagataccagggataattaaaatccacagccagtttcatcagtttcctcatccatcctgcaaataaaaatgttaacaaggagccaaacttattcgttctggttttacaatttattttgaccgttttttgggtgaaaattgcaaacagccaagcaagtggctggaatgccccagtctaagaaattcaaaaacaatcactgagtaagccctaattacattttactcttgactccaggaaaagaaagcaagcttttatctaatctagagggaagtattcgtgagcaataaaaatcacttttttgagttgaataataatcagttaagaatatttaccgcatagcaacacaacatataaagatttgttacaagttgtttacagatgtttgactatttttgctgaagtattttagagtattgaatgtcttctctcttcaagtttctttcatgttcctaatttcagctcctgtagccagagatcacaggtcttccctgtgaaactttggtttctttctataaatgtgtgtggttttcagcgctcaactcctgtcttcaaatggtagtaagttctacttctacttctgtcattcagaacattttatgtcaaatgatgtaatgcagaaattcttgtgcatatttgtaactgaaggaagctttttagatttatttttgtttttaataaaattcagattcctattctaaactggtacataaaagtggtgaatgacttgtatcagcaaatgagctgcgaagtgttctgctctagcaccgtgtttaccttacacagaacctactaaaaactgaaatgtcacttttgtacgataatcatggtttttaagaggctgggtaattggccagttaacacatcatctcttgcatttcaaaattttgtgttaaatggagctcttcacaatttcatgagtcctaatttgtgtgaagcacaacacgtcatacattgctaagtgattcttctcatcagaaagctgatttcttagagtatttctaagttaaattaggtatttcattcctttatcaacctgctggctttccaaccctaacatatgcacacattcttataaactctaccttcattttagtaaatccatccattcatttgctcattcttttaataaatatttgtttatcatatattataaactgcactgctattaccaataccaagttacatgtccattccagtcacacagtagtttgatggtattcccatcttacagatg

SEQ ID NO: 735222 - DNA, 7217 bp, Homo sapiens
ctcgtaatccataacttgagatgaacacaccaaattataaatatcttattcacctaatccgtggaaagtttgtaacaccaaaatattaacttctgttcttgatcactcagcctccatagttattcatgttgcatgatctgattcgctcttttagaatttctcatagcgtcaggtactagctcaaaataacaggagcaactgcttctttccatatcccacattgaggaaaacacattttgcaagccgtcttaaagaaacaggtcaacttagtttagggatgaaacttaaaagtaagcttcgtcacaaaaaacacagttcaacaccacctcgcccggctgcaggcagctcagaggacaggaagtgaggccaagacatatttcacgcagcacagactaaaccccagcttttatctttcccgctggtccttaagggaccaaccgtactgattttccgtcatgttccgcgccacttccgttcgcgcactttaattacgtcaggcgtcctctctcgcggtatcatccggttgctgaggccctgtaataaaggtctcgcgaaatttgttctagaggtccaagtttgcttcttagcttactccaccccacccccaacctgtccctccttttctttccaagtcacaaaattctcccctcccctaccccggagtttacggccctcctcctgtttccgatttcagcccggaaccggaagtgtagtgggcggggcccgtcggcggaaaacgcagcggagccagagccggacacggctgtggccgctgcctctacccccgccacggatcgccgggtagtaggactgcgcggctccaggctgagggtcggtccggaggcgggtgggcgcgggtctcacccggattgtccgggtggcaccgttcccggccccaccgggcgccgcgagggatcatgtctacagcctctgccgcctcctcctcctcctcgtcttcggccggtgagatgatcgaagccccttcccaggtcctcaactttgaagagatcgactacaaggagatcgaggtggaagaggttgttggaagaggagcctttggagttgtttgcaaagctaagtggagagcaaaagatgttgctattaaacaaatagaaagtgaatctgagaggaaagcgtttattgtagagcttcggcagttatcccgtgtgaaccatcctaatattgtaaagctttatggagcctgcttgaatccagtgtgtcttgtgatggaatatgctgaagggggctctttatataatgtgctgcatggtgctgaaccattgccatattatactgctgcccacgcaatgagttggtgtttacagtgttcccaaggagtggcttatcttcacagcatgcaacccaaagcgctaattcacagggacctgaaaccaccaaacttactgctggttgcaggggggacagttctaaaaatttgtgattttggtacagcctgtgacattcagacacacatgaccaataacaaggggagtgctgcttggatggcacctgaagtttttgaaggtagtaattacagtgaaaaatgtgacgtcttcagctggggtattattctttgggaagtgataacgcgtcggaaaccctttgatgagattggtggcccagctttccgaatcatgtgggctgttcataatggtactcgaccaccactgataaaaaatttacctaagcccattgagagcctgatgactcgttgttggtctaaagatccttcccagcgcccttcaatggaggaaattgtgaaaataatgactcacttgatgcgggtataatccttcttttgaggggctttggatttaggggaatttaatatgtgctgagttttaatggaattttaaaagggatgttattactatattctgctttatatattgctatgttttctaagtgagaatgggcatttattactcatagtcagaagaggaaacatttcgagagggaaaatctagttctttatcactggaaagatggctagactaggtttctagacttgcttttttctttttgcttacattagtggacaagtatgtttgtctctgggcctgttgcctcatttgtaatgtgggagaaactgaaatagatagtctctaaagccatcacaggacttggatatattaatattatgacttcaatacatgataaactaaattttacatttttctgataccaattttcatcaagcatttagtcatttatgcaaggcaataggttgcattctcagacacatttatttgagtgacttttactatttggcctattttcaggtttttatatcccagtaaaaagttaaactttcttctatttagaagaacccttttaaatgattatcaaattttcctagtctgtgaatcaagcgcctttagaattatttggaatattttacgcctctggtttttggtacattaacaaaaactgtgaagtggtatcttggctttaaaaagttcaaatatctatgaaagtgcctgaattttgaaacagtttgttcagtagaagaatcttacaatctccttaaatatagactaagtaatttcctaaatggtaaaacgttgtttattcaatctattgaaaatttcttacgcaaagcagcttgaactaatctactaaaagtttaccatcgtatttggataccagtcatatatagaagcctaggccttaaaggtgtgtgcataagaaaacaacttagtctctgtagtcagattacttaaaactttaggatatataagttattgcagttgtaattttgcttctctgttccttgtctaatttgaggagaatacgtttcctttttttctctaaattctaacatttttgtccagcagatactttgagtattatgcctccagtttgtagaaagacattcataatctatcctcttaatatttaaaatgttctaacaattattctatggtatactagtctcagtcttcagactaacagtcactggaagtttacatcactactgtaagaacatgagtatgttttacataattatgagaaatgatactattttatttcatatgtttctctagagaaatatttgctgttttcttcaagactatctagactccaatgtaagctagattcttaggtaggtgcatggcattgatcaaagttgaaatccaagagtacattattgtaatctttgtaaaataaaaaacttaggcacctacaaatttagtatataacttagggaaaataaaacattaatcaggatttaatttgtattaaggaaattttaagctgtggtttacttttttatatatagtactttccaggagcagatgagccattacagtatccttgtcagtattcagatgaaggacagagcaactctgccaccagtacaggctcattcatggacattgcttctacaaatacgagtaacaaaagtgacactaatatggagcaagttcctgccacaaatgatactattaagcgcttagaatcaaaattgttgaaaaatcaggcaaagcaacagagtgaatctggacgtttaagcttgggagcctcccgtgggagcagtgtggagagcttgcccccaacctctgagggcaagaggatgagtgctgacatgtctgaaatagaagctaggatcgccgcaaccacagcctattccaagcctaaacggggccaccgtaaaactgcttcatttggcaacattctggatgtccctgagatcgtcatatcaggcaacggacagccaagacgtagatccatccaagacttgactgtaactggaacagaacctggtcaggtgagcagtaggtcatccagtcccagtgtcagaatgattactacctcaggaccaacctcagaaaagccaactcgaagtcatccatggacccctgatgattccacagataccaatggatcagataactccatcccaatggcttatcttacactggatcaccaactacaggcaagaactagttgcagaactggaccaggatgaaaaggaccagcaaaatacatctcgcctggtacaggaacataaaaagcttttagatgaaaacaaaagcctttctacttactaccagcaatgcaaaaaacaactagaggtcatcagaagtcagcagcagaaacgacaaggcacttcatgattctctgggaccgttacattttgaaatatgcaaagaaagactttttttttaaggaaaggaaaaccttataatgacgattcatgagtgttagctttttggcgtgttctgaatgccaactgcctatatttgctgcatttttttcattgtttattttccttttctcatggtggacatacaattttactgtttcattgcataacatggtagcatctgtgacttgaatgagcagcactttgcaacttcaaaacagatgcagtgaactgtggctgtatatgcatgctcattgtgtgaaggctagcctaacagaacaggaggtatcaaactagctgctatgtgcaaacagcgtccattttttcatattagaggtggaacctcaagaatgactttattcttgtatctcatctcaaaatattaataatttttttcccaaaagatggtatataccaagttaaagacagggtattataaatttagagtgattggtggtatattacggaaatacggaacctttagggatagttccgtgtaagggctttgatgccagcatccttggatcagtactgaactcagttccatccgtaaaatatgtaaaggtaagtggcagctgctctatttaatgaaagcagttttaccggattttgttagactaaaatttgattgtgatacattgaacaaaatggaactcatttttttttaaggagtaaagatttttaattctgtgattgtgtgtatgtgtgttgaaactgtaaagcttttatgactctaatattaatctcttaaatgaaattaaaaggcaaaagaacatgattgagcttaaatgatcatttcttcctgcagtgattcttggattgttttctcatgtatttgaaaaaaaaaaaatgaagaaaaataatggaaaatggaagtaattactccagctaaaaaaagcttggacttagatttctttttatgataccaaatgagaaataaaccaggcaaatcagaaggaagttaaagaagcaaatataaattcaacaagtgtcctaattatcctggatattggaatatttgattttccttacaatcccgttctagaatgcctgccgcctttcaacactttcaagagaatttcaacacttacagagtatttatattgttaacagtaattttgctaccaaaaccttcagaataactttaataataaaatgacactgaaataatagactatacaaactctatattttttcagttggtgttaaaataagtcacattttgataccagtacaagatgtcttttaaataaggatgtcatcagtctgatttttatagcattaatgttttatgaagaaaaagttcaaaatgaaagcattaattgctgtgattattagaattctatcatgactgtattgtagtttttgctctatttcagataagcaagatctaagaagttatcaaaactattctttaaaatgctaaagcaggtaactttttcttccattattttttcctcctaccactgagttttgtaatgaattccttgtgtatacaagcaatacaggtgaatactaaactgttatttttagcttcttcaaaagctattttagaaagcttcctggaaataaatgtcttctgtcatttaatttaaataaaaggagtgttaattgttcccaaatttgattacctagctgaaacagatattggattcagcatagtaatagtaaaataaaattggcagagaaaataactgtagactaggataaagcatgactcctccatagcattgttgcttgtatgtacatctgtcactccactgaaagggacctagtcactttaaagaggccttttatctcagcacgagatatccaagcgtgaatgctaaggcttgatgtttccattaggatttagcattcgagatttcagattttatttatagtcattgatgtgttttgctgtattataacacatttaaagggaaattttattatggtttttacatgtagtcatttcataaaaatatccagataggtaaatggaagttgtttgtttacagtaagttccttgagattttcagtactgtagttgccctggacattgagtacagttcagccttactctgtttttaagtagttgtgttgtcaatttcatgcttttaagtcctgatgatccttggagatgggagaaaaagataccagggataattaaaatccacagccagtttcatcagtttcctcatccatcctgcaaataaaaatgttaacaaggagccaaacttattcgttctggttttacaatttattttgaccgttttttgggtgaaaattgcaaacagccaagcaagtggctggaatgccccagtctaagaaattcaaaaacaatcactgagtaagccctaattacattttactcttgactccaggaaaagaaagcaagcttttatctaatctagagggaagtattcgtgagcaataaaaatcacttttttgagttgaataataatcagttaagaatatttaccgcatagcaacacaacatataaagatttgttacaagttgtttacagatgtttgactatttttgctgaagtattttagagtattgaatgtcttctctcttcaagtttctttcatgttcctaatttcagctcctgtagccagagatcacaggtcttccctgtgaaactttggtttctttctataaatgtgtgtggttttcagcgctcaactcctgtcttcaaatggtagtaagttctacttctacttctgtcattcagaacattttatgtcaaatgatgtaatgcagaaattcttgtgcatatttgtaactgaaggaagctttttagatttatttttgtttttaataaaattcagattcctattctaaaaaaaaaaaaaaaaaaaaaaaaaaggggggggcggctaaaaaataacctagagggcaagtttaagcgtaccaggtttttggtcaaaagggccctaaggggggaataaaaggagggaggggcgtacaacgtcggtgggaaacggcgttgggctttggaagagcttcttttggtggcgtttggaatctaagaattagctaggaataatacgttatggtacacgttctgggaatgcgtaa

SEQ ID NO: 735223 - DNA, 7516 bp, Homo sapiens
  misc_feature (6434)..(6434): n is a, c, g, or t
  misc_feature (6441)..(6441): n is a, c, g, or t
  misc_feature (6461)..(6463): n is a, c, g, or t
  misc_feature (6469)..(6469): n is a, c, g, or t
  misc_feature (6474)..(6474): n is a, c, g, or t
  misc_feature (6483)..(6483): n is a, c, g, or t
  misc_feature (6486)..(6487): n is a, c, g, or t
  misc_feature (6492)..(6492): n is a, c, g, or t
  misc_feature (6510)..(6510): n is a, c, g, or t
  misc_feature (6516)..(6517): n is a, c, g, or t
  misc_feature (6522)..(6523): n is a, c, g, or t
  misc_feature (6528)..(6528): n is a, c, g, or t
  misc_feature (6530)..(6530): n is a, c, g, or t
  misc_feature (6545)..(6545): n is a, c, g, or t
  misc_feature (6549)..(6550): n is a, c, g, or t
  misc_feature (6552)..(6553): n is a, c, g, or t
  misc_feature (6559)..(6559): n is a, c, g, or t
  misc_feature (6562)..(6563): n is a, c, g, or t
  misc_feature (6565)..(6566): n is a, c, g, or t
  misc_feature (6569)..(6570): n is a, c, g, or t
  misc_feature (6575)..(6575): n is a, c, g, or t
  misc_feature (6583)..(6583): n is a, c, g, or t
  misc_feature (6585)..(6585): n is a, c, g, or t
  misc_feature (6588)..(6588): n is a, c, g, or t
  misc_feature (6590)..(6590): n is a, c, g, or t
  misc_feature (6592)..(6593): n is a, c, g, or t
  misc_feature (6600)..(6600): n is a, c, g, or t
  misc_feature (6603)..(6603): n is a, c, g, or t
  misc_feature (6605)..(6605): n is a, c, g, or t
  misc_feature (6620)..(6621): n is a, c, g, or t
  misc_feature (6628)..(6628): n is a, c, g, or t
  misc_feature (6631)..(6631): n is a, c, g, or t
  misc_feature (6638)..(6638): n is a, c, g, or t
  misc_feature (6643)..(6643): n is a, c, g, or t
  misc_feature (6646)..(6646): n is a, c, g, or t
  misc_feature (6650)..(6650): n is a, c, g, or t
  misc_feature (6653)..(6653): n is a, c, g, or t
  misc_feature (6657)..(6657): n is a, c, g, or t
  misc_feature (6660)..(6660): n is a, c, g, or t
  misc_feature (6663)..(6663): n is a, c, g, or t
  misc_feature (6667)..(6667): n is a, c, g, or t
  misc_feature (6677)..(6677): n is a, c, g, or t
  misc_feature (6680)..(6680): n is a, c, g, or t
  misc_feature (6683)..(6683): n is a, c, g, or t
  misc_feature (6693)..(6693): n is a, c, g, or t
  misc_feature (6698)..(6698): n is a, c, g, or t
  misc_feature (6702)..(6702): n is a, c, g, or t
  misc_feature (6722)..(6722): n is a, c, g, or t
  misc_feature (6750)..(6750): n is a, c, g, or t
  misc_feature (6773)..(6773): n is a, c, g, or t
  misc_feature (6777)..(6777): n is a, c, g, or t
ctcgtaatccataacttgagatgaacacaccaaattataaatatcttattcacctaatccgtggaaagtttgtaacaccaaaatattaacttctgttcttgatcactcagcctccatagttattcatgttgcatgatctgattcgctcttttagaatttctcatagcgtcaggtactagctcaaaataacaggagcaactgcttctttccatatcccacattgaggaaaacacattttgcaagccgtcttaaagaaacaggtcaacttagtttagggatgaaacttaaaagtaagcttcgtcacaaaaaacacagttcaacaccacctcgcccggctgcaggcagctcagaggacaggaagtgaggccaagacatatttcacgcagcacagactaaaccccagcttttatctttcccgctggtccttaagggaccaaccgtactgattttccgtcatgttccgcgccacttccgttcgcgcactttaattacgtcaggcgtcctctctcgcggtatcatccggttgctgaggccctgtaataaaggtctcgcgaaatttgttctagaggtccaagtttgcttcttagcttactccaccccacccccaacctgtccctccttttctttccaagtcacaaaattctcccctcccctaccccggagtttacggccctcctcctgtttccgatttcagcccggaaccggaagtgtagtgggcggggcccgtcggcggaaaacgcagcggagccagagccggacacggctgtggccgctgcctctacccccgccacggatcgccgggtagtaggactgcgcggctccaggctgagggtcggtccggaggcgggtgggcgcgggtctcacccggattgtccgggtggcaccgttcccggccccaccgggcgccgcgagggatcatgtctacagcctctgccgcctcctcctcctcctcgtcttcggccggtgagatgatcgaagccccttcccaggtcctcaactttgaagagatcgactacaaggagatcgaggtggaagaggttgttggaagaggagcctttggagttgtttgcaaagctaagtggagagcaaaagatgttgctattaaacaaatagaaagtgaatctgagaggaaagcgtttattgtagagcttcggcagttatcccgtgtgaaccatcctaatattgtaaagctttatggagcctgcttgaatccagtgtgtcttgtgatggaatatgctgaagggggctctttatataatgtgctgcatggtgctgaaccattgccatattatactgctgcccacgcaatgagttggtgtttacagtgttcccaaggagtggcttatcttcacagcatgcaacccaaagcgctaattcacagggacctgaaaccaccaaacttactgctggttgcaggggggacagttctaaaaatttgtgattttggtacagcctgtgacattcagacacacatgaccaataacaaggggagtgctgcttggatggcacctgaagtttttgaaggtagtaattacagtgaaaaatgtgacgtcttcagctggggtattattctttgggaagtgataacgcgtcggaaaccctttgatgagattggtggcccagctttccgaatcatgtgggctgttcataatggtactcgaccaccactgataaaaaatttacctaagcccattgagagcctgatgactcgttgttggtctaaagatccttcccagcgcccttcaatggaggaaattgtgaaaataatgactcacttgatgcgggtataatccttcttttgaggggctttggatttaggggaatttaatatgtgctgagttttaatggaattttaaaagggatgttattactatattctgctttatatattgctatgttttctaagtgagaatgggcatttattactcatagtcagaagaggaaacatttcgagagggaaaatctagttctttatcactggaaagatggctagactaggtttctagacttgcttttttctttttgcttacattagtggacaagtatgtttgtctctgggcctgttgcctcatttgtaatgtgggagaaactgaaatagatagtctctaaagccatcacaggacttggatatattaatattatgacttcaatacatgataaactaaattttacatttttctgataccaattttcatcaagcatttagtcatttatgcaaggcaataggttgcattctcagacacatttatttgagtgacttttactatttggcctattttcaggtttttatatcccagtaaaaagttaaactttcttctatttagaagaacccttttaaatgattatcaaattttcctagtctgtgaatcaagcgcctttagaattatttggaatattttacgcctctggtttttggtacattaacaaaaactgtgaagtggtatcttggctttaaaaagttcaaatatctatgaaagtgcctgaattttgaaacagtttgttcagtagaagaatcttacaatctccttaaatatagactaagtaatttcctaaatggtaaaacgttgtttattcaatctattgaaaatttcttacgcaaagcagcttgaactaatctactaaaagtttaccatcgtatttggataccagtcatatatagaagcctaggccttaaaggtgtgtgcataagaaaacaacttagtctctgtagtcagattacttaaaactttaggatatataagttattgcagttgtaattttgcttctctgttccttgtctaatttgaggagaatacgtttcctttttttctctaaattctaacatttttgtccagcagatactttgagtattatgcctccagtttgtagaaagacattcataatctatcctcttaatatttaaaatgttctaacaattattctatggtatactagtctcagtcttcagactaacagtcactggaagtttacatcactactgtaagaacatgagtatgttttacataattatgagaaatgatactattttatttcatatgtttctctagagaaatatttgctgttttcttcaagactatctagactccaatgtaagctagattcttaggtaggtgcatggcattgatcaaagttgaaatccaagagtacattattgtaatctttgtaaaataaaaaacttaggcacctacaaatttagtatataacttagggaaaataaaacattaatcaggatttaatttgtattaaggaaattttaagctgtggtttacttttttatatatagtactttccaggagcagatgagccattacagtatccttgtcagtattcagatgaaggacagagcaactctgccaccagtacaggctcattcatggacattgcttctacaaatacgagtaacaaaagtgacactaatatggagcaagttcctgccacaaatgatactattaagcgcttagaatcaaaattgttgaaaaatcaggcaaagcaacagagtgaatctggacgtttaagcttgggagcctcccgtgggagcagtgtggagagcttgcccccaacctctgagggcaagaggatgagtgctgacatgtctgaaatagaagctaggatcgccgcaaccacagcctattccaagcctaaacggggccaccgtaaaactgcttcatttggcaacattctggatgtccctgagatcgtcatatcaggcaacggacagccaagacgtagatccatccaagacttgactgtaactggaacagaacctggtcaggtgagcagtaggtcatccagtcccagtgtcagaatgattactacctcaggaccaacctcagaaaagccaactcgaagtcatccatggacccctgatgattccacagataccaatggatcagataactccatcccaatggcttatcttacactggatcaccaactacaggcaagaactagttgcagaactggaccaggatgaaaaggaccagcaaaatacatctcgcctggtacaggaacataaaaagcttttagatgaaaacaaaagcctttctacttactaccagcaatgcaaaaaacaactagaggtcatcagaagtcagcagcagaaacgacaaggcacttcatgattctctgggaccgttacattttgaaatatgcaaagaaagactttttttttaaggaaaggaaaaccttataatgacgattcatgagtgttagctttttggcgtgttctgaatgccaactgcctatatttgctgcatttttttcattgtttattttccttttctcatggtggacatacaattttactgtttcattgcataacatggtagcatctgtgacttgaatgagcagcactttgcaacttcaaaacagatgcagtgaactgtggctgtatatgcatgctcattgtgtgaaggctagcctaacagaacaggaggtatcaaactagctgctatgtgcaaacagcgtccattttttcatattagaggtggaacctcaagaatgactttattcttgtatctcatctcaaaatattaataatttttttcccaaaagatggtatataccaagttaaagacagggtattataaatttagagtgattggtggtatattacggaaatacggaacctttagggatagttccgtgtaagggctttgatgccagcatccttggatcagtactgaactcagttccatccgtaaaatatgtaaaggtaagtggcagctgctctatttaatgaaagcagttttaccggattttgttagactaaaatttgattgtgatacattgaacaaaatggaactcatttttttttaaggagtaaagatttttaattctgtgattgtgtgtatgtgtgttgaaactgtaaagcttttatgactctaatattaatctcttaaatgaaattaaaaggcaaaagaacatgattgagcttaaatgatcatttcttcctgcagtgattcttggattgttttctcatgtatttgaaaaaaaaaaaatgaagaaaaataatggaaaatggaagtaattactccagctaaaaaaagcttggacttagatttctttttatgataccaaatgagaaataaaccaggcaaatcagaaggaagttaaagaagcaaatataaattcaacaagtgtcctaattatcctggatattggaatatttgattttccttacaatcccgttctagaatgcctgccgcctttcaacactttcaagagaatttcaacacttacagagtatttatattgttaacagtaattttgctaccaaaaccttcagaataactttaataataaaatgacactgaaataatagactatacaaactctatattttttcagttggtgttaaaataagtcacattttgataccagtacaagatgtcttttaaataaggatgtcatcagtctgatttttatagcattaatgttttatgaagaaaaagttcaaaatgaaagcattaattgctgtgattattagaattctatcatgactgtattgtagtttttgctctatttcagataagcaagatctaagaagttatcaaaactattctttaaaatgctaaagcaggtaactttttcttccattattttttcctcctaccactgagttttgtaatgaattccttgtgtatacaagcaatacaggtgaatactaaactgttatttttagcttcttcaaaagctattttagaaagcttcctggaaataaatgtcttctgtcatttaatttaaataaaaggagtgttaattgttcccaaatttgattacctagctgaaacagatattggattcagcatagtaatagtaaaataaaattggcagagaaaataactgtagactaggataaagcatgactcctccatagcattgttgcttgtatgtacatctgtcactccactgaaagggacctagtcactttaaagaggccttttatctcagcacgagatatccaagcgtgaatgctaaggcttgatgtttccattaggatttagcattcgagatttcagattttatttatagtcattgatgtgttttgctgtattataacacatttaaagggaaattttattatggtttttacatgtagtcatttcataaaaatatccagataggtaaatggaagttgtttgtttacagtaagttccttgagattttcagtactgtagttgccctggacattgagtacagttcagccttactctgtttttaagtagttgtgttgtcaatttcatgcttttaagtcctgatgatccttggagatgggagaaaaagataccagggataattaaaatccacagccagtttcatcagtttcctcatccatcctgcaaataaaaatgttaacaaggagccaaacttattcgttctggttttacaatttattttgaccgttttttgggtgaaaattgcaaacagccacncccgtcncccccccgcccccgcccaannnaccccnacccnacccccgcncannccccnaccccccccccccccccncccccnnccccnnacccncncccccacccaacccngagnnanncacccncgnncnnccnnaaccncccccccnanccnancnncaaccanccnanaacacccaccccacnncaacacnacncacaaanacccnccncaanccncccncanacncccnaccacccccnccnaancaccccagancaccnaacnccccccccccccaagccccntccatgcccccaatcccagcccccgcanccagagaccacaggccccccccncganaccctggcccccccccataaatgtgtgtggttttcagcgctcaactcctgtcttcaaatggtagtaagttctacttctacttctgtcattcagaacattttatgtcaaatgatgtaatgcagaaattcttgtgcatatttgtaactgaaggaagctttttagatttatttttgtttttaataaaattcagattcctattctaaactggtacataaaagtggtgaatgacttgtatcagcaaatgagctgcgaagtgttctgctctagcaccgtgtttaccttacacagaacctactaaaaactgaaatgtcacttttgtacgataatcatggtttttaagaggctgggtaattggccagttaacacatcatctcttgcatttcaaaattttgtgttaaatggagctcttcacaatttcatgagtcctaatttgtgtgaagcacaacacgtcatacattgctaagtgattcttctcatcagaaagctgatttcttagagtatttctaagttaaattaggtatttcattcctttatcaacctgctggctttccaaccctaacatatgcacacattcttataaactctaccttcattttagtaaatccatccattcatttgctcattcttttaataaatatttgtttatcatatattataaactgcactgctattaccaataccaagttacatgtccattccagtcacacagtagtttgatggtattcccatcttacagatg

SEQ ID NO: 735224 - DNA, 7217 bp, Homo sapiens
  misc_feature (6434)..(6434): n is a, c, g, or t
  misc_feature (6441)..(6441): n is a, c, g, or t
  misc_feature (6461)..(6463): n is a, c, g, or t
  misc_feature (6469)..(6469): n is a, c, g, or t
  misc_feature (6474)..(6474): n is a, c, g, or t
  misc_feature (6483)..(6483): n is a, c, g, or t
  misc_feature (6486)..(6487): n is a, c, g, or t
  misc_feature (6492)..(6492): n is a, c, g, or t
  misc_feature (6510)..(6510): n is a, c, g, or t
  misc_feature (6516)..(6517): n is a, c, g, or t
  misc_feature (6522)..(6523): n is a, c, g, or t
  misc_feature (6528)..(6528): n is a, c, g, or t
  misc_feature (6530)..(6530): n is a, c, g, or t
  misc_feature (6545)..(6545): n is a, c, g, or t
  misc_feature (6549)..(6550): n is a, c, g, or t
  misc_feature (6552)..(6553): n is a, c, g, or t
  misc_feature (6559)..(6559): n is a, c, g, or t
  misc_feature (6562)..(6563): n is a, c, g, or t
  misc_feature (6565)..(6566): n is a, c, g, or t
  misc_feature (6569)..(6570): n is a, c, g, or t
  misc_feature (6575)..(6575): n is a, c, g, or t
  misc_feature (6583)..(6583): n is a, c, g, or t
  misc_feature (6585)..(6585): n is a, c, g, or t
  misc_feature (6588)..(6588): n is a, c, g, or t
  misc_feature (6590)..(6590): n is a, c, g, or t
  misc_feature (6592)..(6593): n is a, c, g, or t
  misc_feature (6600)..(6600): n is a, c, g, or t
  misc_feature (6603)..(6603): n is a, c, g, or t
  misc_feature (6605)..(6605): n is a, c, g, or t
  misc_feature (6620)..(6621): n is a, c, g, or t
  misc_feature (6628)..(6628): n is a, c, g, or t
  misc_feature (6631)..(6631): n is a, c, g, or t
  misc_feature (6638)..(6638): n is a, c, g, or t
  misc_feature (6643)..(6643): n is a, c, g, or t
  misc_feature (6646)..(6646): n is a, c, g, or t
  misc_feature (6650)..(6650): n is a, c, g, or t
  misc_feature (6653)..(6653): n is a, c, g, or t
  misc_feature (6657)..(6657): n is a, c, g, or t
  misc_feature (6660)..(6660): n is a, c, g, or t
  misc_feature (6663)..(6663): n is a, c, g, or t
  misc_feature (6667)..(6667): n is a, c, g, or t
  misc_feature (6677)..(6677): n is a, c, g, or t
  misc_feature (6680)..(6680): n is a, c, g, or t
  misc_feature (6683)..(6683): n is a, c, g, or t
  misc_feature (6693)..(6693): n is a, c, g, or t
  misc_feature (6698)..(6698): n is a, c, g, or t
  misc_feature (6702)..(6702): n is a, c, g, or t
  misc_feature (6722)..(6722): n is a, c, g, or t
  misc_feature (6750)..(6750): n is a, c, g, or t
  misc_feature (6773)..(6773): n is a, c, g, or t
  misc_feature (6777)..(6777): n is a, c, g, or t
ctcgtaatccataacttgagatgaacacaccaaattataaatatcttattcacctaatccgtggaaagtttgtaacaccaaaatattaacttctgttcttgatcactcagcctccatagttattcatgttgcatgatctgattcgctcttttagaatttctcatagcgtcaggtactagctcaaaataacaggagcaactgcttctttccatatcccacattgaggaaaacacattttgcaagccgtcttaaagaaacaggtcaacttagtttagggatgaaacttaaaagtaagcttcgtcacaaaaaacacagttcaacaccacctcgcccggctgcaggcagctcagaggacaggaagtgaggccaagacatatttcacgcagcacagactaaaccccagcttttatctttcccgctggtccttaagggaccaaccgtactgattttccgtcatgttccgcgccacttccgttcgcgcactttaattacgtcaggcgtcctctctcgcggtatcatccggttgctgaggccctgtaataaaggtctcgcgaaatttgttctagaggtccaagtttgcttcttagcttactccaccccacccccaacctgtccctccttttctttccaagtcacaaaattctcccctcccctaccccggagtttacggccctcctcctgtttccgatttcagcccggaaccggaagtgtagtgggcggggcccgtcggcggaaaacgcagcggagccagagccggacacggctgtggccgctgcctctacccccgccacggatcgccgggtagtaggactgcgcggctccaggctgagggtcggtccggaggcgggtgggcgcgggtctcacccggattgtccgggtggcaccgttcccggccccaccgggcgccgcgagggatcatgtctacagcctctgccgcctcctcctcctcctcgtcttcggccggtgagatgatcgaagccccttcccaggtcctcaactttgaagagatcgactacaaggagatcgaggtggaagaggttgttggaagaggagcctttggagttgtttgcaaagctaagtggagagcaaaagatgttgctattaaacaaatagaaagtgaatctgagaggaaagcgtttattgtagagcttcggcagttatcccgtgtgaaccatcctaatattgtaaagctttatggagcctgcttgaatccagtgtgtcttgtgatggaatatgctgaagggggctctttatataatgtgctgcatggtgctgaaccattgccatattatactgctgcccacgcaatgagttggtgtttacagtgttcccaaggagtggcttatcttcacagcatgcaacccaaagcgctaattcacagggacctgaaaccaccaaacttactgctggttgcaggggggacagttctaaaaatttgtgattttggtacagcctgtgacattcagacacacatgaccaataacaaggggagtgctgcttggatggcacctgaagtttttgaaggtagtaattacagtgaaaaatgtgacgtcttcagctggggtattattctttgggaagtgataacgcgtcggaaaccctttgatgagattggtggcccagctttccgaatcatgtgggctgttcataatggtactcgaccaccactgataaaaaatttacctaagcccattgagagcctgatgactcgttgttggtctaaagatccttcccagcgcccttcaatggaggaaattgtgaaaataatgactcacttgatgcgggtataatccttcttttgaggggctttggatttaggggaatttaatatgtgctgagttttaatggaattttaaaagggatgttattactatattctgctttatatattgctatgttttctaagtgagaatgggcatttattactcatagtcagaagaggaaacatttcgagagggaaaatctagttctttatcactggaaagatggctagactaggtttctagacttgcttttttctttttgcttacattagtggacaagtatgtttgtctctgggcctgttgcctcatttgtaatgtgggagaaactgaaatagatagtctctaaagccatcacaggacttggatatattaatattatgacttcaatacatgataaactaaattttacatttttctgataccaattttcatcaagcatttagtcatttatgcaaggcaataggttgcattctcagacacatttatttgagtgacttttactatttggcctattttcaggtttttatatcccagtaaaaagttaaactttcttctatttagaagaacccttttaaatgattatcaaattttcctagtctgtgaatcaagcgcctttagaattatttggaatattttacgcctctggtttttggtacattaacaaaaactgtgaagtggtatcttggctttaaaaagttcaaatatctatgaaagtgcctgaattttgaaacagtttgttcagtagaagaatcttacaatctccttaaatatagactaagtaatttcctaaatggtaaaacgttgtttattcaatctattgaaaatttcttacgcaaagcagcttgaactaatctactaaaagtttaccatcgtatttggataccagtcatatatagaagcctaggccttaaaggtgtgtgcataagaaaacaacttagtctctgtagtcagattacttaaaactttaggatatataagttattgcagttgtaattttgcttctctgttccttgtctaatttgaggagaatacgtttcctttttttctctaaattctaacatttttgtccagcagatactttgagtattatgcctccagtttgtagaaagacattcataatctatcctcttaatatttaaaatgttctaacaattattctatggtatactagtctcagtcttcagactaacagtcactggaagtttacatcactactgtaagaacatgagtatgttttacataattatgagaaatgatactattttatttcatatgtttctctagagaaatatttgctgttttcttcaagactatctagactccaatgtaagctagattcttaggtaggtgcatggcattgatcaaagttgaaatccaagagtacattattgtaatctttgtaaaataaaaaacttaggcacctacaaatttagtatataacttagggaaaataaaacattaatcaggatttaatttgtattaaggaaattttaagctgtggtttacttttttatatatagtactttccaggagcagatgagccattacagtatccttgtcagtattcagatgaaggacagagcaactctgccaccagtacaggctcattcatggacattgcttctacaaatacgagtaacaaaagtgacactaatatggagcaagttcctgccacaaatgatactattaagcgcttagaatcaaaattgttgaaaaatcaggcaaagcaacagagtgaatctggacgtttaagcttgggagcctcccgtgggagcagtgtggagagcttgcccccaacctctgagggcaagaggatgagtgctgacatgtctgaaatagaagctaggatcgccgcaaccacagcctattccaagcctaaacggggccaccgtaaaactgcttcatttggcaacattctggatgtccctgagatcgtcatatcaggcaacggacagccaagacgtagatccatccaagacttgactgtaactggaacagaacctggtcaggtgagcagtaggtcatccagtcccagtgtcagaatgattactacctcaggaccaacctcagaaaagccaactcgaagtcatccatggacccctgatgattccacagataccaatggatcagataactccatcccaatggcttatcttacactggatcaccaactacaggcaagaactagttgcagaactggaccaggatgaaaaggaccagcaaaatacatctcgcctggtacaggaacataaaaagcttttagatgaaaacaaaagcctttctacttactaccagcaatgcaaaaaacaactagaggtcatcagaagtcagcagcagaaacgacaaggcacttcatgattctctgggaccgttacattttgaaatatgcaaagaaagactttttttttaaggaaaggaaaaccttataatgacgattcatgagtgttagctttttggcgtgttctgaatgccaactgcctatatttgctgcatttttttcattgtttattttccttttctcatggtggacatacaattttactgtttcattgcataacatggtagcatctgtgacttgaatgagcagcactttgcaacttcaaaacagatgcagtgaactgtggctgtatatgcatgctcattgtgtgaaggctagcctaacagaacaggaggtatcaaactagctgctatgtgcaaacagcgtccattttttcatattagaggtggaacctcaagaatgactttattcttgtatctcatctcaaaatattaataatttttttcccaaaagatggtatataccaagttaaagacagggtattataaatttagagtgattggtggtatattacggaaatacggaacctttagggatagttccgtgtaagggctttgatgccagcatccttggatcagtactgaactcagttccatccgtaaaatatgtaaaggtaagtggcagctgctctatttaatgaaagcagttttaccggattttgttagactaaaatttgattgtgatacattgaacaaaatggaactcatttttttttaaggagtaaagatttttaattctgtgattgtgtgtatgtgtgttgaaactgtaaagcttttatgactctaatattaatctcttaaatgaaattaaaaggcaaaagaacatgattgagcttaaatgatcatttcttcctgcagtgattcttggattgttttctcatgtatttgaaaaaaaaaaaatgaagaaaaataatggaaaatggaagtaattactccagctaaaaaaagcttggacttagatttctttttatgataccaaatgagaaataaaccaggcaaatcagaaggaagttaaagaagcaaatataaattcaacaagtgtcctaattatcctggatattggaatatttgattttccttacaatcccgttctagaatgcctgccgcctttcaacactttcaagagaatttcaacacttacagagtatttatattgttaacagtaattttgctaccaaaaccttcagaataactttaataataaaatgacactgaaataatagactatacaaactctatattttttcagttggtgttaaaataagtcacattttgataccagtacaagatgtcttttaaataaggatgtcatcagtctgatttttatagcattaatgttttatgaagaaaaagttcaaaatgaaagcattaattgctgtgattattagaattctatcatgactgtattgtagtttttgctctatttcagataagcaagatctaagaagttatcaaaactattctttaaaatgctaaagcaggtaactttttcttccattattttttcctcctaccactgagttttgtaatgaattccttgtgtatacaagcaatacaggtgaatactaaactgttatttttagcttcttcaaaagctattttagaaagcttcctggaaataaatgtcttctgtcatttaatttaaataaaaggagtgttaattgttcccaaatttgattacctagctgaaacagatattggattcagcatagtaatagtaaaataaaattggcagagaaaataactgtagactaggataaagcatgactcctccatagcattgttgcttgtatgtacatctgtcactccactgaaagggacctagtcactttaaagaggccttttatctcagcacgagatatccaagcgtgaatgctaaggcttgatgtttccattaggatttagcattcgagatttcagattttatttatagtcattgatgtgttttgctgtattataacacatttaaagggaaattttattatggtttttacatgtagtcatttcataaaaatatccagataggtaaatggaagttgtttgtttacagtaagttccttgagattttcagtactgtagttgccctggacattgagtacagttcagccttactctgtttttaagtagttgtgttgtcaatttcatgcttttaagtcctgatgatccttggagatgggagaaaaagataccagggataattaaaatccacagccagtttcatcagtttcctcatccatcctgcaaataaaaatgttaacaaggagccaaacttattcgttctggttttacaatttattttgaccgttttttgggtgaaaattgcaaacagccacncccgtcncccccccgcccccgcccaannnaccccnacccnacccccgcncannccccnaccccccccccccccccncccccnnccccnnacccncncccccacccaacccngagnnanncacccncgnncnnccnnaaccncccccccnanccnancnncaaccanccnanaacacccaccccacnncaacacnacncacaaanacccnccncaanccncccncanacncccnaccacccccnccnaancaccccagancaccnaacnccccccccccccaagccccntccatgcccccaatcccagcccccgcanccagagaccacaggccccccccncganaccctggcccccccccataaatgtgtgtggttttcagcgctcaactcctgtcttcaaatggtagtaagttctacttctacttctgtcattcagaacattttatgtcaaatgatgtaatgcagaaattcttgtgcatatttgtaactgaaggaagctttttagatttatttttgtttttaataaaattcagattcctattctaaaaaaaaaaaaaaaaaaaaaaaaaaggggggggcggctaaaaaataacctagagggcaagtttaagcgtaccaggtttttggtcaaaagggccctaaggggggaataaaaggagggaggggcgtacaacgtcggtgggaaacggcgttgggctttggaagagcttcttttggtggcgtttggaatctaagaattagctaggaataatacgttatggtacacgttctgggaatgcgtaa

SEQ ID NO: 735225 - DNA, 6360 bp, Homo sapiens
ctcgtaatccataacttgagatgaacacaccaaattataaatatcttattcacctaatccgtggaaagtttgtaacaccaaaatattaacttctgttcttgatcactcagcctccatagttattcatgttgcatgatctgattcgctcttttagaatttctcatagcgtcaggtactagctcaaaataacaggagcaactgcttctttccatatcccacattgaggaaaacacattttgcaagccgtcttaaagaaacaggtcaacttagtttagggatgaaacttaaaagtaagcttcgtcacaaaaaacacagttcaacaccacctcgcccggctgcaggcagctcagaggacaggaagtgaggccaagacatatttcacgcagcacagactaaaccccagcttttatctttcccgctggtccttaagggaccaaccgtactgattttccgtcatgttccgcgccacttccgttcgcgcactttaattacgtcaggcgtcctctctcgcggtatcatccggttgctgaggccctgtaataaaggtctcgcgaaatttgttctagaggtccaagtttgcttcttagcttactccaccccacccccaacctgtccctccttttctttccaagtcacaaaattctcccctcccctaccccggagtttacggccctcctcctgtttccgatttcagcccggaaccggaagtgtagtgggcggggcccgtcggcggaaaacgcagcggagccagagccggacacggctgtggccgctgcctctacccccgccacggatcgccgggtagtaggactgcgcggctccaggctgagggtcggtccggaggcgggtgggcgcgggtctcacccggattgtccgggtggcaccgttcccggccccaccgggcgccgcgagggatcatgtctacagcctctgccgcctcctcctcctcctcgtcttcggccggtgagatgatcgaagccccttcccaggtcctcaactttgaagagatcgactacaaggagatcgaggtggaagaggttgttggaagaggagcctttggagttgtttgcaaagctaagtggagagcaaaagatgttgctattaaacaaatagaaagtgaatctgagaggaaagcgtttattgtagagcttcggcagttatcccgtgtgaaccatcctaatattgtaaagctttatggagcctgcttgaatccagtgtgtcttgtgatggaatatgctgaagggggctctttatataatgtgctgcatggtgctgaaccattgccatattatactgctgcccacgcaatgagttggtgtttacagtgttcccaaggagtggcttatcttcacagcatgcaacccaaagcgctaattcacagggacctgaaaccaccaaacttactgctggttgcaggggggacagttctaaaaatttgtgattttggtacagcctgtgacattcagacacacatgaccaataacaaggggagtgctgcttggatggcacctgaagtttttgaaggtagtaattacagtgaaaaatgtgacgtcttcagctggggtattattctttgggaagtgataacgcgtcggaaaccctttgatgagattggtggcccagctttccgaatcatgtgggctgttcataatggtactcgaccaccactgataaaaaatttacctaagcccattgagagcctgatgactcgttgttggtctaaagatccttcccagcgcccttcaatggaggaaattgtgaaaataatgactcacttgatgcgggtataatccttcttttgaggggctttggatttaggggaatttaatatgtgctgagttttaatggaattttaaaagggatgttattactatattctgctttatatattgctatgttttctaagtgagaatgggcatttattactcatagtcagaagaggaaacatttcgagagggaaaatctagttctttatcactggaaagatggctagactaggtttctagacttgcttttttctttttgcttacattagtggacaagtatgtttgtctctgggcctgttgcctcatttgtaatgtgggagaaactgaaatagatagtctctaaagccatcacaggacttggatatattaatattatgacttcaatacatgataaactaaattttacatttttctgataccaattttcatcaagcatttagtcatttatgcaaggcaataggttgcattctcagacacatttatttgagtgacttttactatttggcctattttcaggtttttatatcccagtaaaaagttaaactttcttctatttagaagaacccttttaaatgattatcaaattttcctagtctgtgaatcaagcgcctttagaattatttggaatattttacgcctctggtttttggtacattaacaaaaactgtgaagtggtatcttggctttaaaaagttcaaatatctatgaaagtgcctgaattttgaaacagtttgttcagtagaagaatcttacaatctccttaaatatagactaagtaatttcctaaatggtaaaacgttgtttattcaatctattgaaaatttcttacgcaaagcagcttgaactaatctactaaaagtttaccatcgtatttggataccagtcatatatagaagcctaggccttaaaggtgtgtgcataagaaaacaacttagtctctgtagtcagattacttaaaactttaggatatataagttattgcagttgtaattttgcttctctgttccttgtctaatttgaggagaatacgtttcctttttttctctaaattctaacatttttgtccagcagatactttgagtattatgcctccagtttgtagaaagacattcataatctatcctcttaatatttaaaatgttctaacaattattctatggtatactagtctcagtcttcagactaacagtcactggaagtttacatcactactgtaagaacatgagtatgttttacataattatgagaaatgatactattttatttcatatgtttctctagagaaatatttgctgttttcttcaagactatctagactccaatgtaagctagattcttaggtaggtgcatggcattgatcaaagttgaaatccaagagtacattattgtaatctttgtaaaataaaaaacttaggcacctacaaatttagtatataacttagggaaaataaaacattaatcaggatttaatttgtattaaggaaattttaagctgtggtttacttttttatatatagtactttccaggagcagatgagccattacagtatccttgtcagtattcagatgaaggacagagcaactctgccaccagtacaggctcattcatggacattgcttctacaaatacgagtaacaaaagtgacactaatatggagcaagttcctgccacaaatgatactattaagcgcttagaatcaaaattgttgaaaaatcaggcaaagcaacagagtgaatctggacgtttaagcttgggagcctcccgtgggagcagtgtggagagcttgcccccaacctctgagggcaagaggatgagtgctgacatgtctgaaatagaagctaggatcgccgcaaccacagcctattccaagcctaaacggggccaccgtaaaactgcttcatttggcaacattctggatgtccctgagatcgtcatatcaggcaacggacagccaagacgtagatccatccaagacttgactgtaactggaacagaacctggtcaggtgagcagtaggtcatccagtcccagtgtcagaatgattactacctcaggaccaacctcagaaaagccaactcgaagtcatccatggacccctgatgattccacagataccaatggatcagataactccatcccaatggcttatcttacactggatcaccaactacaggcaagaactagttgcagaactggaccaggatgaaaaggaccagcaaaatacatctcgcctggtacaggaacataaaaagcttttagatgaaaacaaaagcctttctacttactaccagcaatgcaaaaaacaactagaggtcatcagaagtcagcagcagaaacgacaaggcacttcatgattctctgggaccgttacattttgaaatatgcaaagaaagactttttttttaaggaaaggaaaaccttataatgacgattcatgagtgttagctttttggcgtgttctgaatgccaactgcctatatttgctgcatttttttcattgtttattttccttttctcatggtggacatacaattttactgtttcattgcataacatggtagcatctgtgacttgaatgagcagcactttgcaacttcaaaacagatgcagtgaactgtggctgtatatgcatgctcattgtgtgaaggctagcctaacagaacaggaggtatcaaactagctgctatgtgcaaacagcgtccattttttcatattagaggtggaacctcaagaatgactttattcttgtatctcatctcaaaatattaataatttttttcccaaaagatggtatataccaagttaaagacagggtattataaatttagagtgattggtggtatattacggaaatacggaacctttagggatagttccgtgtaagggctttgatgccagcatccttggatcagtactgaactcagttccatccgtaaaatatgtaaaggtaagtggcagctgctctatttaatgaaagcagttttaccggattttgttagactaaaatttgattgtgatacattgaacaaaatggaactcatttttttttaaggagtaaagatttttaattctgtgattgtgtgtatgtgtgttgaaactgtaaagcttttatgactctaatattaatctcttaaatgaaattaaaaggcaaaagaacatgattgagcttaaatgatcatttcttcctgcagtgattcttggattgttttctcatgtatttgaaaaaaaaaaaatgaagaaaaataatggaaaatggaagtaattactccagctaaaaaaagcttggacttagatttctttttatgataccaaatgagaaataaaccaggcaaatcagaaggaagttaaagaagcaaatataaattcaacaagtgtcctaattatcctggatattggaatatttgattttccttacaatcccgttctagaatgcctgccgcctttcaacactttcaagagaatttcaacacttacagagtatttatattgttaacagtaattttgctaccaaaaccttcagaataactttaataataaaatgacactgaaataatagactatacaaactctatattttttcagttggtgttaaaataagtcacattttgataccagtacaagatgtcttttaaataaggatgtcatcagtctgatttttatagcattaatgttttatgaagaaaaagttcaaaatgaaagcattaattgctgtgattattagaattctatcatgactgtattgtagtttttgctctatttcagataagcaagatctaagaagttatcaaaactattctttaaaatgctaaagcaggtaactttttcttccattattttttcctcctaccactgagttttgtaatgaattccttgtgtatacaagcaatacaggtgaatactaaactgttatttttagcttcttcaaaagctattttagaaagcttcctggaaataaatgtcttctgtcatttaatttaaataaaaggagtgttaattgttcccaaatttgattacctagctgaaacagatattggattcagcatagtaatagtaaaataaaattggcagagaaaataactgtagactaggataaagcatgactcctccatagcattgttgcttgtatgtacatctgtcactccactgaaagggacctagtcactttaaagaggccttttatctcagcacgagatatccaagcgtgaatgctaaggcttgatgtttccattaggatttagcattcgagatttcagattttatttatagtcattgatgtgttttgctgtattataacacatttaaagggaaattttattatggtttttacatgtagtcatttcataaaaatatccagataggtaaatggaagttgtttgtttacagtaagttccttgagattttcagtactgtagttgccctggacattgagtacagttcagccttactctgtttttaagtagttgtgttgtcaatttcatgcttttaagtcctgatgatccttggagatgggagaaaaagataccagggataattaaaatccacagccagtttcatcagtttcctcatccatccgtcgacgcggccgcgaattta

SEQ ID NO: 735226 - DNA, 6356 bp, Homo sapiens
ctcgtaatccataacttgagatgaacacaccaaattataaatatcttattcacctaatccgtggaaagtttgtaacaccaaaatattaacttctgttcttgatcactcagcctccatagttattcatgttgcatgatctgattcgctcttttagaatttctcatagcgtcaggtactagctcaaaataacaggagcaactgcttctttccatatcccacattgaggaaaacacattttgcaagccgtcttaaagaaacaggtcaacttagtttagggatgaaacttaaaagtaagcttcgtcacaaaaaacacagttcaacaccacctcgcccggctgcaggcagctcagaggacaggaagtgaggccaagacatatttcacgcagcacagactaaaccccagcttttatctttcccgctggtccttaagggaccaaccgtactgattttccgtcatgttccgcgccacttccgttcgcgcactttaattacgtcaggcgtcctctctcgcggtatcatccggttgctgaggccctgtaataaaggtctcgcgaaatttgttctagaggtccaagtttgcttcttagcttactccaccccacccccaacctgtccctccttttctttccaagtcacaaaattctcccctcccctaccccggagtttacggccctcctcctgtttccgatttcagcccggaaccggaagtgtagtgggcggggcccgtcggcggaaaacgcagcggagccagagccggacacggctgtggccgctgcctctacccccgccacggatcgccgggtagtaggactgcgcggctccaggctgagggtcggtccggaggcgggtgggcgcgggtctcacccggattgtccgggtggcaccgttcccggccccaccgggcgccgcgagggatcatgtctacagcctctgccgcctcctcctcctcctcgtcttcggccggtgagatgatcgaagccccttcccaggtcctcaactttgaagagatcgactacaaggagatcgaggtggaagaggttgttggaagaggagcctttggagttgtttgcaaagctaagtggagagcaaaagatgttgctattaaacaaatagaaagtgaatctgagaggaaagcgtttattgtagagcttcggcagttatcccgtgtgaaccatcctaatattgtaaagctttatggagcctgcttgaatccagtgtgtcttgtgatggaatatgctgaagggggctctttatataatgtgctgcatggtgctgaaccattgccatattatactgctgcccacgcaatgagttggtgtttacagtgttcccaaggagtggcttatcttcacagcatgcaacccaaagcgctaattcacagggacctgaaaccaccaaacttactgctggttgcaggggggacagttctaaaaatttgtgattttggtacagcctgtgacattcagacacacatgaccaataacaaggggagtgctgcttggatggcacctgaagtttttgaaggtagtaattacagtgaaaaatgtgacgtcttcagctggggtattattctttgggaagtgataacgcgtcggaaaccctttgatgagattggtggcccagctttccgaatcatgtgggctgttcataatggtactcgaccaccactgataaaaaatttacctaagcccattgagagcctgatgactcgttgttggtctaaagatccttcccagcgcccttcaatggaggaaattgtgaaaataatgactcacttgatgcgggtataatccttcttttgaggggctttggatttaggggaatttaatatgtgctgagttttaatggaattttaaaagggatgttattactatattctgctttatatattgctatgttttctaagtgagaatgggcatttattactcatagtcagaagaggaaacatttcgagagggaaaatctagttctttatcactggaaagatggctagactaggtttctagacttgcttttttctttttgcttacattagtggacaagtatgtttgtctctgggcctgttgcctcatttgtaatgtgggagaaactgaaatagatagtctctaaagccatcacaggacttggatatattaatattatgacttcaatacatgataaactaaattttacatttttctgataccaattttcatcaagcatttagtcatttatgcaaggcaataggttgcattctcagacacatttatttgagtgacttttactatttggcctattttcaggtttttatatcccagtaaaaagttaaactttcttctatttagaagaacccttttaaatgattatcaaattttcctagtctgtgaatcaagcgcctttagaattatttggaatattttacgcctctggtttttggtacattaacaaaaactgtgaagtggtatcttggctttaaaaagttcaaatatctatgaaagtgcctgaattttgaaacagtttgttcagtagaagaatcttacaatctccttaaatatagactaagtaatttcctaaatggtaaaacgttgtttattcaatctattgaaaatttcttacgcaaagcagcttgaactaatctactaaaagtttaccatcgtatttggataccagtcatatatagaagcctaggccttaaaggtgtgtgcataagaaaacaacttagtctctgtagtcagattacttaaaactttaggatatataagttattgcagttgtaattttgcttctctgttccttgtctaatttgaggagaatacgtttcctttttttctctaaattctaacatttttgtccagcagatactttgagtattatgcctccagtttgtagaaagacattcataatctatcctcttaatatttaaaatgttctaacaattattctatggtatactagtctcagtcttcagactaacagtcactggaagtttacatcactactgtaagaacatgagtatgttttacataattatgagaaatgatactattttatttcatatgtttctctagagaaatatttgctgttttcttcaagactatctagactccaatgtaagctagattcttaggtaggtgcatggcattgatcaaagttgaaatccaagagtacattattgtaatctttgtaaaataaaaaacttaggcacctacaaatttagtatataacttagggaaaataaaacattaatcaggatttaatttgtattaaggaaattttaagctgtggtttacttttttatatatagtactttccaggagcagatgagccattacagtatccttgtcagtattcagatgaaggacagagcaactctgccaccagtacaggctcattcatggacattgcttctacaaatacgagtaacaaaagtgacactaatatggagcaagttcctgccacaaatgatactattaagcgcttagaatcaaaattgttgaaaaatcaggcaaagcaacagagtgaatctggacgtttaagcttgggagcctcccgtgggagcagtgtggagagcttgcccccaacctctgagggcaagaggatgagtgctgacatgtctgaaatagaagctaggatcgccgcaaccacagcctattccaagcctaaacggggccaccgtaaaactgcttcatttggcaacattctggatgtccctgagatcgtcatatcaggcaacggacagccaagacgtagatccatccaagacttgactgtaactggaacagaacctggtcaggtgagcagtaggtcatccagtcccagtgtcagaatgattactacctcaggaccaacctcagaaaagccaactcgaagtcatccatggacccctgatgattccacagataccaatggatcagataactccatcccaatggcttatcttacactggatcaccaactacaggcaagaactagttgcagaactggaccaggatgaaaaggaccagcaaaatacatctcgcctggtacaggaacataaaaagcttttagatgaaaacaaaagcctttctacttactaccagcaatgcaaaaaacaactagaggtcatcagaagtcagcagcagaaacgacaaggcacttcatgattctctgggaccgttacattttgaaatatgcaaagaaagactttttttttaaggaaaggaaaaccttataatgacgattcatgagtgttagctttttggcgtgttctgaatgccaactgcctatatttgctgcatttttttcattgtttattttccttttctcatggtggacatacaattttactgtttcattgcataacatggtagcatctgtgacttgaatgagcagcactttgcaacttcaaaacagatgcagtgaactgtggctgtatatgcatgctcattgtgtgaaggctagcctaacagaacaggaggtatcaaactagctgctatgtgcaaacagcgtccattttttcatattagaggtggaacctcaagaatgactttattcttgtatctcatctcaaaatattaataatttttttcccaaaagatggtatataccaagttaaagacagggtattataaatttagagtgattggtggtatattacggaaatacggaacctttagggatagttccgtgtaagggctttgatgccagcatccttggatcagtactgaactcagttccatccgtaaaatatgtaaaggtaagtggcagctgctctatttaatgaaagcagttttaccggattttgttagactaaaatttgattgtgatacattgaacaaaatggaactcatttttttttaaggagtaaagatttttaattctgtgattgtgtgtatgtgtgttgaaactgtaaagcttttatgactctaatattaatctcttaaatgaaattaaaaggcaaaagaacatgattgagcttaaatgatcatttcttcctgcagtgattcttggattgttttctcatgtatttgaaaaaaaaaaaatgaagaaaaataatggaaaatggaagtaattactccagctaaaaaaagcttggacttagatttctttttatgataccaaatgagaaataaaccaggcaaatcagaaggaagttaaagaagcaaatataaattcaacaagtgtcctaattatcctggatattggaatatttgattttccttacaatcccgttctagaatgcctgccgcctttcaacactttcaagagaatttcaacacttacagagtatttatattgttaacagtaattttgctaccaaaaccttcagaataactttaataataaaatgacactgaaataatagactatacaaactctatattttttcagttggtgttaaaataagtcacattttgataccagtacaagatgtcttttaaataaggatgtcatcagtctgatttttatagcattaatgttttatgaagaaaaagttcaaaatgaaagcattaattgctgtgattattagaattctatcatgactgtattgtagtttttgctctatttcagataagcaagatctaagaagttatcaaaactattctttaaaatgctaaagcagctcctgtagccagagatcacaggtcttccctgtgaaactttggtttctttctataaatgtgtgtggttttcagcgctcaactcctgtcttcaaatggtagtaagttctacttctacttctgtcattcagaacattttatgtcaaatgatgtaatgcagaaattcttgtgcatatttgtaactgaaggaagctttttagatttatttttgtttttaataaaattcagattcctattctaaactggtacataaaagtggtgaatgacttgtatcagcaaatgagctgcgaagtgttctgctctagcaccgtgtttaccttacacagaacctactaaaaactgaaatgtcacttttgtacgataatcatggtttttaagaggctgggtaattggccagttaacacatcatctcttgcatttcaaaattttgtgttaaatggagctcttcacaatttcatgagtcctaatttgtgtgaagcacaacacgtcatacattgctaagtgattcttctcatcagaaagctgatttcttagagtatttctaagttaaattaggtatttcattcctttatcaacctgctggctttccaaccctaacatatgcacacattcttataaactctaccttcattttagtaaatccatccattcatttgctcattcttttaataaatatttgtttatcatatattataaactgcactgctattaccaataccaagttacatgtccattccagtcacacagtagtttgatggtattcccatcttacagatg

SEQ ID NO: 735227 - DNA, 6057 bp, Homo sapiens
ctcgtaatccataacttgagatgaacacaccaaattataaatatcttattcacctaatccgtggaaagtttgtaacaccaaaatattaacttctgttcttgatcactcagcctccatagttattcatgttgcatgatctgattcgctcttttagaatttctcatagcgtcaggtactagctcaaaataacaggagcaactgcttctttccatatcccacattgaggaaaacacattttgcaagccgtcttaaagaaacaggtcaacttagtttagggatgaaacttaaaagtaagcttcgtcacaaaaaacacagttcaacaccacctcgcccggctgcaggcagctcagaggacaggaagtgaggccaagacatatttcacgcagcacagactaaaccccagcttttatctttcccgctggtccttaagggaccaaccgtactgattttccgtcatgttccgcgccacttccgttcgcgcactttaattacgtcaggcgtcctctctcgcggtatcatccggttgctgaggccctgtaataaaggtctcgcgaaatttgttctagaggtccaagtttgcttcttagcttactccaccccacccccaacctgtccctccttttctttccaagtcacaaaattctcccctcccctaccccggagtttacggccctcctcctgtttccgatttcagcccggaaccggaagtgtagtgggcggggcccgtcggcggaaaacgcagcggagccagagccggacacggctgtggccgctgcctctacccccgccacggatcgccgggtagtaggactgcgcggctccaggctgagggtcggtccggaggcgggtgggcgcgggtctcacccggattgtccgggtggcaccgttcccggccccaccgggcgccgcgagggatcatgtctacagcctctgccgcctcctcctcctcctcgtcttcggccggtgagatgatcgaagccccttcccaggtcctcaactttgaagagatcgactacaaggagatcgaggtggaagaggttgttggaagaggagcctttggagttgtttgcaaagctaagtggagagcaaaagatgttgctattaaacaaatagaaagtgaatctgagaggaaagcgtttattgtagagcttcggcagttatcccgtgtgaaccatcctaatattgtaaagctttatggagcctgcttgaatccagtgtgtcttgtgatggaatatgctgaagggggctctttatataatgtgctgcatggtgctgaaccattgccatattatactgctgcccacgcaatgagttggtgtttacagtgttcccaaggagtggcttatcttcacagcatgcaacccaaagcgctaattcacagggacctgaaaccaccaaacttactgctggttgcaggggggacagttctaaaaatttgtgattttggtacagcctgtgacattcagacacacatgaccaataacaaggggagtgctgcttggatggcacctgaagtttttgaaggtagtaattacagtgaaaaatgtgacgtcttcagctggggtattattctttgggaagtgataacgcgtcggaaaccctttgatgagattggtggcccagctttccgaatcatgtgggctgttcataatggtactcgaccaccactgataaaaaatttacctaagcccattgagagcctgatgactcgttgttggtctaaagatccttcccagcgcccttcaatggaggaaattgtgaaaataatgactcacttgatgcgggtataatccttcttttgaggggctttggatttaggggaatttaatatgtgctgagttttaatggaattttaaaagggatgttattactatattctgctttatatattgctatgttttctaagtgagaatgggcatttattactcatagtcagaagaggaaacatttcgagagggaaaatctagttctttatcactggaaagatggctagactaggtttctagacttgcttttttctttttgcttacattagtggacaagtatgtttgtctctgggcctgttgcctcatttgtaatgtgggagaaactgaaatagatagtctctaaagccatcacaggacttggatatattaatattatgacttcaatacatgataaactaaattttacatttttctgataccaattttcatcaagcatttagtcatttatgcaaggcaataggttgcattctcagacacatttatttgagtgacttttactatttggcctattttcaggtttttatatcccagtaaaaagttaaactttcttctatttagaagaacccttttaaatgattatcaaattttcctagtctgtgaatcaagcgcctttagaattatttggaatattttacgcctctggtttttggtacattaacaaaaactgtgaagtggtatcttggctttaaaaagttcaaatatctatgaaagtgcctgaattttgaaacagtttgttcagtagaagaatcttacaatctccttaaatatagactaagtaatttcctaaatggtaaaacgttgtttattcaatctattgaaaatttcttacgcaaagcagcttgaactaatctactaaaagtttaccatcgtatttggataccagtcatatatagaagcctaggccttaaaggtgtgtgcataagaaaacaacttagtctctgtagtcagattacttaaaactttaggatatataagttattgcagttgtaattttgcttctctgttccttgtctaatttgaggagaatacgtttcctttttttctctaaattctaacatttttgtccagcagatactttgagtattatgcctccagtttgtagaaagacattcataatctatcctcttaatatttaaaatgttctaacaattattctatggtatactagtctcagtcttcagactaacagtcactggaagtttacatcactactgtaagaacatgagtatgttttacataattatgagaaatgatactattttatttcatatgtttctctagagaaatatttgctgttttcttcaagactatctagactccaatgtaagctagattcttaggtaggtgcatggcattgatcaaagttgaaatccaagagtacattattgtaatctttgtaaaataaaaaacttaggcacctacaaatttagtatataacttagggaaaataaaacattaatcaggatttaatttgtattaaggaaattttaagctgtggtttacttttttatatatagtactttccaggagcagatgagccattacagtatccttgtcagtattcagatgaaggacagagcaactctgccaccagtacaggctcattcatggacattgcttctacaaatacgagtaacaaaagtgacactaatatggagcaagttcctgccacaaatgatactattaagcgcttagaatcaaaattgttgaaaaatcaggcaaagcaacagagtgaatctggacgtttaagcttgggagcctcccgtgggagcagtgtggagagcttgcccccaacctctgagggcaagaggatgagtgctgacatgtctgaaatagaagctaggatcgccgcaaccacagcctattccaagcctaaacggggccaccgtaaaactgcttcatttggcaacattctggatgtccctgagatcgtcatatcaggcaacggacagccaagacgtagatccatccaagacttgactgtaactggaacagaacctggtcaggtgagcagtaggtcatccagtcccagtgtcagaatgattactacctcaggaccaacctcagaaaagccaactcgaagtcatccatggacccctgatgattccacagataccaatggatcagataactccatcccaatggcttatcttacactggatcaccaactacaggcaagaactagttgcagaactggaccaggatgaaaaggaccagcaaaatacatctcgcctggtacaggaacataaaaagcttttagatgaaaacaaaagcctttctacttactaccagcaatgcaaaaaacaactagaggtcatcagaagtcagcagcagaaacgacaaggcacttcatgattctctgggaccgttacattttgaaatatgcaaagaaagactttttttttaaggaaaggaaaaccttataatgacgattcatgagtgttagctttttggcgtgttctgaatgccaactgcctatatttgctgcatttttttcattgtttattttccttttctcatggtggacatacaattttactgtttcattgcataacatggtagcatctgtgacttgaatgagcagcactttgcaacttcaaaacagatgcagtgaactgtggctgtatatgcatgctcattgtgtgaaggctagcctaacagaacaggaggtatcaaactagctgctatgtgcaaacagcgtccattttttcatattagaggtggaacctcaagaatgactttattcttgtatctcatctcaaaatattaataatttttttcccaaaagatggtatataccaagttaaagacagggtattataaatttagagtgattggtggtatattacggaaatacggaacctttagggatagttccgtgtaagggctttgatgccagcatccttggatcagtactgaactcagttccatccgtaaaatatgtaaaggtaagtggcagctgctctatttaatgaaagcagttttaccggattttgttagactaaaatttgattgtgatacattgaacaaaatggaactcatttttttttaaggagtaaagatttttaattctgtgattgtgtgtatgtgtgttgaaactgtaaagcttttatgactctaatattaatctcttaaatgaaattaaaaggcaaaagaacatgattgagcttaaatgatcatttcttcctgcagtgattcttggattgttttctcatgtatttgaaaaaaaaaaaatgaagaaaaataatggaaaatggaagtaattactccagctaaaaaaagcttggacttagatttctttttatgataccaaatgagaaataaaccaggcaaatcagaaggaagttaaagaagcaaatataaattcaacaagtgtcctaattatcctggatattggaatatttgattttccttacaatcccgttctagaatgcctgccgcctttcaacactttcaagagaatttcaacacttacagagtatttatattgttaacagtaattttgctaccaaaaccttcagaataactttaataataaaatgacactgaaataatagactatacaaactctatattttttcagttggtgttaaaataagtcacattttgataccagtacaagatgtcttttaaataaggatgtcatcagtctgatttttatagcattaatgttttatgaagaaaaagttcaaaatgaaagcattaattgctgtgattattagaattctatcatgactgtattgtagtttttgctctatttcagataagcaagatctaagaagttatcaaaactattctttaaaatgctaaagcagctcctgtagccagagatcacaggtcttccctgtgaaactttggtttctttctataaatgtgtgtggttttcagcgctcaactcctgtcttcaaatggtagtaagttctacttctacttctgtcattcagaacattttatgtcaaatgatgtaatgcagaaattcttgtgcatatttgtaactgaaggaagctttttagatttatttttgtttttaataaaattcagattcctattctaaaaaaaaaaaaaaaaaaaaaaaaaaggggggggcggctaaaaaataacctagagggcaagtttaagcgtaccaggtttttggtcaaaagggccctaaggggggaataaaaggagggaggggcgtacaacgtcggtgggaaacggcgttgggctttggaagagcttcttttggtggcgtttggaatctaagaattagctaggaataatacgttatggtacacgttctgggaatgcgtaa

SEQ ID NO: 735228 - DNA, 6755 bp, Homo sapiens
ctcgtaatccataacttgagatgaacacaccaaattataaatatcttattcacctaatccgtggaaagtttgtaacaccaaaatattaacttctgttcttgatcactcagcctccatagttattcatgttgcatgatctgattcgctcttttagaatttctcatagcgtcaggtactagctcaaaataacaggagcaactgcttctttccatatcccacattgaggaaaacacattttgcaagccgtcttaaagaaacaggtcaacttagtttagggatgaaacttaaaagtaagcttcgtcacaaaaaacacagttcaacaccacctcgcccggctgcaggcagctcagaggacaggaagtgaggccaagacatatttcacgcagcacagactaaaccccagcttttatctttcccgctggtccttaagggaccaaccgtactgattttccgtcatgttccgcgccacttccgttcgcgcactttaattacgtcaggcgtcctctctcgcggtatcatccggttgctgaggccctgtaataaaggtctcgcgaaatttgttctagaggtccaagtttgcttcttagcttactccaccccacccccaacctgtccctccttttctttccaagtcacaaaattctcccctcccctaccccggagtttacggccctcctcctgtttccgatttcagcccggaaccggaagtgtagtgggcggggcccgtcggcggaaaacgcagcggagccagagccggacacggctgtggccgctgcctctacccccgccacggatcgccgggtagtaggactgcgcggctccaggctgagggtcggtccggaggcgggtgggcgcgggtctcacccggattgtccgggtggcaccgttcccggccccaccgggcgccgcgagggatcatgtctacagcctctgccgcctcctcctcctcctcgtcttcggccggtgagatgatcgaagccccttcccaggtcctcaactttgaagagatcgactacaaggagatcgaggtggaagaggttgttggaagaggagcctttggagttgtttgcaaagctaagtggagagcaaaagatgttgctattaaacaaatagaaagtgaatctgagaggaaagcgtttattgtagagcttcggcagttatcccgtgtgaaccatcctaatattgtaaagctttatggagcctgcttgaatccagtgtgtcttgtgatggaatatgctgaagggggctctttatataatgtgctgcatggtgctgaaccattgccatattatactgctgcccacgcaatgagttggtgtttacagtgttcccaaggagtggcttatcttcacagcatgcaacccaaagcgctaattcacagggacctgaaaccaccaaacttactgctggttgcaggggggacagttctaaaaatttgtgattttggtacagcctgtgacattcagacacacatgaccaataacaaggggagtgctgcttggatggcacctgaagtttttgaaggtagtaattacagtgaaaaatgtgacgtcttcagctggggtattattctttgggaagtgataacgcgtcggaaaccctttgatgagattggtggcccagctttccgaatcatgtgggctgttcataatggtactcgaccaccactgataaaaaatttacctaagcccattgagagcctgatgactcgttgttggtctaaagatccttcccagcgcccttcaatggaggaaattgtgaaaataatgactcacttgatgcgggtataatccttcttttgaggggctttggatttaggggaatttaatatgtgctgagttttaatggaattttaaaagggatgttattactatattctgctttatatattgctatgttttctaagtgagaatgggcatttattactcatagtcagaagaggaaacatttcgagagggaaaatctagttctttatcactggaaagatggctagactaggtttctagacttgcttttttctttttgcttacattagtggacaagtatgtttgtctctgggcctgttgcctcatttgtaatgtgggagaaactgaaatagatagtctctaaagccatcacaggacttggatatattaatattatgacttcaatacatgataaactaaattttacatttttctgataccaattttcatcaagcatttagtcatttatgcaaggcaataggttgcattctcagacacatttatttgagtgacttttactatttggcctattttcaggtttttatatcccagtaaaaagttaaactttcttctatttagaagaacccttttaaatgattatcaaattttcctagtctgtgaatcaagcgcctttagaattatttggaatattttacgcctctggtttttggtacattaacaaaaactgtgaagtggtatcttggctttaaaaagttcaaatatctatgaaagtgcctgaattttgaaacagtttgttcagtagaagaatcttacaatctccttaaatatagactaagtaatttcctaaatggtaaaacgttgtttattcaatctattgaaaatttcttacgcaaagcagcttgaactaatctactaaaagtttaccatcgtatttggataccagtcatatatagaagcctaggccttaaaggtgtgtgcataagaaaacaacttagtctctgtagtcagattacttaaaactttaggatatataagttattgcagttgtaattttgcttctctgttccttgtctaatttgaggagaatacgtttcctttttttctctaaattctaacatttttgtccagcagatactttgagtattatgcctccagtttgtagaaagacattcataatctatcctcttaatatttaaaatgttctaacaattattctatggtatactagtctcagtcttcagactaacagtcactggaagtttacatcactactgtaagaacatgagtatgttttacataattatgagaaatgatactattttatttcatatgtttctctagagaaatatttgctgttttcttcaagactatctagactccaatgtaagctagattcttaggtaggtgcatggcattgatcaaagttgaaatccaagagtacattattgtaatctttgtaaaataaaaaacttaggcacctacaaatttagtatataacttagggaaaataaaacattaatcaggatttaatttgtattaaggaaattttaagctgtggtttacttttttatatatagtactttccaggagcagatgagccattacagtatccttgtcagtattcagatgaaggacagagcaactctgccaccagtacaggctcattcatggacattgcttctacaaatacgagtaacaaaagtgacactaatatggagcaagttcctgccacaaatgatactattaagcgcttagaatcaaaattgttgaaaaatcaggcaaagcaacagagtgaatctggacgtttaagcttgggagcctcccgtgggagcagtgtggagagcttgcccccaacctctgagggcaagaggatgagtgctgacatgtctgaaatagaagctaggatcgccgcaaccacagcctattccaagcctaaacggggccaccgtaaaactgcttcatttggcaacattctggatgtccctgagatcgtcatatcaggcaacggacagccaagacgtagatccatccaagacttgactgtaactggaacagaacctggtcaggtgagcagtaggtcatccagtcccagtgtcagaatgattactacctcaggaccaacctcagaaaagccaactcgaagtcatccatggacccctgatgattccacagataccaatggatcagataactccatcccaatggcttatcttacactggatcaccaactacaggcaagaactagttgcagaactggaccaggatgaaaaggaccagcaaaatacatctcgcctggtacaggaacataaaaagcttttagatgaaaacaaaagcctttctacttactaccagcaatgcaaaaaacaactagaggtcatcagaagtcagcagcagaaacgacaaggcacttcatgattctctgggaccgttacattttgaaatatgcaaagaaagactttttttttaaggaaaggaaaaccttataatgacgattcatgagtgttagctttttggcgtgttctgaatgccaactgcctatatttgctgcatttttttcattgtttattttccttttctcatggtggacatacaattttactgtttcattgcataacatggtagcatctgtgacttgaatgagcagcactttgcaacttcaaaacagatgcagtgaactgtggctgtatatgcatgctcattgtgtgaaggctagcctaacagaacaggaggtatcaaactagctgctatgtgcaaacagcgtccattttttcatattagaggtggaacctcaagaatgactttattcttgtatctcatctcaaaatattaataatttttttcccaaaagatggtatataccaagttaaagacagggtattataaatttagagtgattggtggtatattacggaaatacggaacctttagggatagttccgtgtaagggctttgatgccagcatccttggatcagtactgaactcagttccatccgtaaaatatgtaaagataagcaagatctaagaagttatcaaaactattctttaaaatgctaaagcaggtaactttttcttccattattttttcctcctaccactgagttttgtaatgaattccttgtgtatacaagcaatacaggtgaatactaaactgttatttttagcttcttcaaaagctattttagaaagcttcctggaaataaatgtcttctgtcatttaatttaaataaaaggagtgttaattgttcccaaatttgattacctagctgaaacagatattggattcagcatagtaatagtaaaataaaattggcagagaaaataactgtagactaggataaagcatgactcctccatagcattgttgcttgtatgtacatctgtcactccactgaaagggacctagtcactttaaagaggccttttatctcagcacgagatatccaagcgtgaatgctaaggcttgatgtttccattaggatttagcattcgagatttcagattttatttatagtcattgatgtgttttgctgtattataacacatttaaagggaaattttattatggtttttacatgtagtcatttcataaaaatatccagataggtaaatggaagaaaatagtagattttagtcatggtaccaaatgcaagaggctgttgaacagttgcttgtttgtttacagtaagttccttgagattttcagtactgtagttgccctggacattgagtacagttcagccttactctgtttttaagtagttgtgttgtcaatttcatgcttttaagtcctgatgatccttggagatgggagaaaaagataccagggataattaaaatccacagccagtttcatcagtttcctcatccatcctgcaaataaaaatgttaacaaggagccaaacttattcgttctggttttacaatttattttgaccgttttttgggtgaaaattgcaaacagccaagcaagtggctggaatgccccagtctaagaaattcaaaaacaatcactgagtaagccctaattacattttactcttgactccaggaaaagaaagcaagcttttatctaatctagagggaagtattcgtgagcaataaaaatcacttttttgagttgaataataatcagttaagaatatttaccgcatagcaacacaacatataaagatttgttacaagttgtttacagatgtttgactatttttgctgaagtattttagagtattgaatgtcttctctcttcaagtttctttcatgttcctaatttcagctcctgtagccagagatcacaggtcttccctgtgaaactttggtttctttctataaatgtgtgtggttttcagcgctcaactcctgtcttcaaatggtagtaagttctacttctacttctgtcattcagaacattttatgtcaaatgatgtaatgcagaaattcttgtgcatatttgtaactgaaggaagctttttagatttatttttgtttttaataaaattcagattcctattctaaactggtacataaaagtggtgaatgacttgtatcagcaaatgagctgcgaagtgttctgctctagcaccgtgtttaccttacacagaacctactaaaaactgaaatgtcacttttgtacgataatcatggtttttaagaggctgggtaattggccagttaacacatcatctcttgcatttcaaaattttgtgttaaatggagctcttcacaatttcatgagtcctaatttgtgtgaagcacaacacgtcatacattgctaagtgattcttctcatcagaaagctgatttcttagagtatttctaagttaaattaggtatttcattcctttatcaacctgctggctttccaaccctaacatatgcacacattcttataaactctaccttcattttagtaaatccatccattcatttgctcattcttttaataaatatttgtttatcatatattataaactgcactgctattaccaataccaagttacatgtccattccagtcacacagtagtttgatggtattcccatcttacagatg

SEQ ID NO: 735229 - DNA, 6456 bp, Homo sapiens
ctcgtaatccataacttgagatgaacacaccaaattataaatatcttattcacctaatccgtggaaagtttgtaacaccaaaatattaacttctgttcttgatcactcagcctccatagttattcatgttgcatgatctgattcgctcttttagaatttctcatagcgtcaggtactagctcaaaataacaggagcaactgcttctttccatatcccacattgaggaaaacacattttgcaagccgtcttaaagaaacaggtcaacttagtttagggatgaaacttaaaagtaagcttcgtcacaaaaaacacagttcaacaccacctcgcccggctgcaggcagctcagaggacaggaagtgaggccaagacatatttcacgcagcacagactaaaccccagcttttatctttcccgctggtccttaagggaccaaccgtactgattttccgtcatgttccgcgccacttccgttcgcgcactttaattacgtcaggcgtcctctctcgcggtatcatccggttgctgaggccctgtaataaaggtctcgcgaaatttgttctagaggtccaagtttgcttcttagcttactccaccccacccccaacctgtccctccttttctttccaagtcacaaaattctcccctcccctaccccggagtttacggccctcctcctgtttccgatttcagcccggaaccggaagtgtagtgggcggggcccgtcggcggaaaacgcagcggagccagagccggacacggctgtggccgctgcctctacccccgccacggatcgccgggtagtaggactgcgcggctccaggctgagggtcggtccggaggcgggtgggcgcgggtctcacccggattgtccgggtggcaccgttcccggccccaccgggcgccgcgagggatcatgtctacagcctctgccgcctcctcctcctcctcgtcttcggccggtgagatgatcgaagccccttcccaggtcctcaactttgaagagatcgactacaaggagatcgaggtggaagaggttgttggaagaggagcctttggagttgtttgcaaagctaagtggagagcaaaagatgttgctattaaacaaatagaaagtgaatctgagaggaaagcgtttattgtagagcttcggcagttatcccgtgtgaaccatcctaatattgtaaagctttatggagcctgcttgaatccagtgtgtcttgtgatggaatatgctgaagggggctctttatataatgtgctgcatggtgctgaaccattgccatattatactgctgcccacgcaatgagttggtgtttacagtgttcccaaggagtggcttatcttcacagcatgcaacccaaagcgctaattcacagggacctgaaaccaccaaacttactgctggttgcaggggggacagttctaaaaatttgtgattttggtacagcctgtgacattcagacacacatgaccaataacaaggggagtgctgcttggatggcacctgaagtttttgaaggtagtaattacagtgaaaaatgtgacgtcttcagctggggtattattctttgggaagtgataacgcgtcggaaaccctttgatgagattggtggcccagctttccgaatcatgtgggctgttcataatggtactcgaccaccactgataaaaaatttacctaagcccattgagagcctgatgactcgttgttggtctaaagatccttcccagcgcccttcaatggaggaaattgtgaaaataatgactcacttgatgcgggtataatccttcttttgaggggctttggatttaggggaatttaatatgtgctgagttttaatggaattttaaaagggatgttattactatattctgctttatatattgctatgttttctaagtgagaatgggcatttattactcatagtcagaagaggaaacatttcgagagggaaaatctagttctttatcactggaaagatggctagactaggtttctagacttgcttttttctttttgcttacattagtggacaagtatgtttgtctctgggcctgttgcctcatttgtaatgtgggagaaactgaaatagatagtctctaaagccatcacaggacttggatatattaatattatgacttcaatacatgataaactaaattttacatttttctgataccaattttcatcaagcatttagtcatttatgcaaggcaataggttgcattctcagacacatttatttgagtgacttttactatttggcctattttcaggtttttatatcccagtaaaaagttaaactttcttctatttagaagaacccttttaaatgattatcaaattttcctagtctgtgaatcaagcgcctttagaattatttggaatattttacgcctctggtttttggtacattaacaaaaactgtgaagtggtatcttggctttaaaaagttcaaatatctatgaaagtgcctgaattttgaaacagtttgttcagtagaagaatcttacaatctccttaaatatagactaagtaatttcctaaatggtaaaacgttgtttattcaatctattgaaaatttcttacgcaaagcagcttgaactaatctactaaaagtttaccatcgtatttggataccagtcatatatagaagcctaggccttaaaggtgtgtgcataagaaaacaacttagtctctgtagtcagattacttaaaactttaggatatataagttattgcagttgtaattttgcttctctgttccttgtctaatttgaggagaatacgtttcctttttttctctaaattctaacatttttgtccagcagatactttgagtattatgcctccagtttgtagaaagacattcataatctatcctcttaatatttaaaatgttctaacaattattctatggtatactagtctcagtcttcagactaacagtcactggaagtttacatcactactgtaagaacatgagtatgttttacataattatgagaaatgatactattttatttcatatgtttctctagagaaatatttgctgttttcttcaagactatctagactccaatgtaagctagattcttaggtaggtgcatggcattgatcaaagttgaaatccaagagtacattattgtaatctttgtaaaataaaaaacttaggcacctacaaatttagtatataacttagggaaaataaaacattaatcaggatttaatttgtattaaggaaattttaagctgtggtttacttttttatatatagtactttccaggagcagatgagccattacagtatccttgtcagtattcagatgaaggacagagcaactctgccaccagtacaggctcattcatggacattgcttctacaaatacgagtaacaaaagtgacactaatatggagcaagttcctgccacaaatgatactattaagcgcttagaatcaaaattgttgaaaaatcaggcaaagcaacagagtgaatctggacgtttaagcttgggagcctcccgtgggagcagtgtggagagcttgcccccaacctctgagggcaagaggatgagtgctgacatgtctgaaatagaagctaggatcgccgcaaccacagcctattccaagcctaaacggggccaccgtaaaactgcttcatttggcaacattctggatgtccctgagatcgtcatatcaggcaacggacagccaagacgtagatccatccaagacttgactgtaactggaacagaacctggtcaggtgagcagtaggtcatccagtcccagtgtcagaatgattactacctcaggaccaacctcagaaaagccaactcgaagtcatccatggacccctgatgattccacagataccaatggatcagataactccatcccaatggcttatcttacactggatcaccaactacaggcaagaactagttgcagaactggaccaggatgaaaaggaccagcaaaatacatctcgcctggtacaggaacataaaaagcttttagatgaaaacaaaagcctttctacttactaccagcaatgcaaaaaacaactagaggtcatcagaagtcagcagcagaaacgacaaggcacttcatgattctctgggaccgttacattttgaaatatgcaaagaaagactttttttttaaggaaaggaaaaccttataatgacgattcatgagtgttagctttttggcgtgttctgaatgccaactgcctatatttgctgcatttttttcattgtttattttccttttctcatggtggacatacaattttactgtttcattgcataacatggtagcatctgtgacttgaatgagcagcactttgcaacttcaaaacagatgcagtgaactgtggctgtatatgcatgctcattgtgtgaaggctagcctaacagaacaggaggtatcaaactagctgctatgtgcaaacagcgtccattttttcatattagaggtggaacctcaagaatgactttattcttgtatctcatctcaaaatattaataatttttttcccaaaagatggtatataccaagttaaagacagggtattataaatttagagtgattggtggtatattacggaaatacggaacctttagggatagttccgtgtaagggctttgatgccagcatccttggatcagtactgaactcagttccatccgtaaaatatgtaaagataagcaagatctaagaagttatcaaaactattctttaaaatgctaaagcaggtaactttttcttccattattttttcctcctaccactgagttttgtaatgaattccttgtgtatacaagcaatacaggtgaatactaaactgttatttttagcttcttcaaaagctattttagaaagcttcctggaaataaatgtcttctgtcatttaatttaaataaaaggagtgttaattgttcccaaatttgattacctagctgaaacagatattggattcagcatagtaatagtaaaataaaattggcagagaaaataactgtagactaggataaagcatgactcctccatagcattgttgcttgtatgtacatctgtcactccactgaaagggacctagtcactttaaagaggccttttatctcagcacgagatatccaagcgtgaatgctaaggcttgatgtttccattaggatttagcattcgagatttcagattttatttatagtcattgatgtgttttgctgtattataacacatttaaagggaaattttattatggtttttacatgtagtcatttcataaaaatatccagataggtaaatggaagaaaatagtagattttagtcatggtaccaaatgcaagaggctgttgaacagttgcttgtttgtttacagtaagttccttgagattttcagtactgtagttgccctggacattgagtacagttcagccttactctgtttttaagtagttgtgttgtcaatttcatgcttttaagtcctgatgatccttggagatgggagaaaaagataccagggataattaaaatccacagccagtttcatcagtttcctcatccatcctgcaaataaaaatgttaacaaggagccaaacttattcgttctggttttacaatttattttgaccgttttttgggtgaaaattgcaaacagccaagcaagtggctggaatgccccagtctaagaaattcaaaaacaatcactgagtaagccctaattacattttactcttgactccaggaaaagaaagcaagcttttatctaatctagagggaagtattcgtgagcaataaaaatcacttttttgagttgaataataatcagttaagaatatttaccgcatagcaacacaacatataaagatttgttacaagttgtttacagatgtttgactatttttgctgaagtattttagagtattgaatgtcttctctcttcaagtttctttcatgttcctaatttcagctcctgtagccagagatcacaggtcttccctgtgaaactttggtttctttctataaatgtgtgtggttttcagcgctcaactcctgtcttcaaatggtagtaagttctacttctacttctgtcattcagaacattttatgtcaaatgatgtaatgcagaaattcttgtgcatatttgtaactgaaggaagctttttagatttatttttgtttttaataaaattcagattcctattctaaaaaaaaaaaaaaaaaaaaaaaaaaggggggggcggctaaaaaataacctagagggcaagtttaagcgtaccaggtttttggtcaaaagggccctaaggggggaataaaaggagggaggggcgtacaacgtcggtgggaaacggcgttgggctttggaagagcttcttttggtggcgtttggaatctaagaattagctaggaataatacgttatggtacacgttctgggaatgcgtaa

SEQ ID NO: 735230 - DNA, 6755 bp, Homo sapiens
  misc_feature (5673)..(5673): n is a, c, g, or t
  misc_feature (5680)..(5680): n is a, c, g, or t
  misc_feature (5700)..(5702): n is a, c, g, or t
  misc_feature (5708)..(5708): n is a, c, g, or t
  misc_feature (5713)..(5713): n is a, c, g, or t
  misc_feature (5722)..(5722): n is a, c, g, or t
  misc_feature (5725)..(5726): n is a, c, g, or t
  misc_feature (5731)..(5731): n is a, c, g, or t
  misc_feature (5749)..(5749): n is a, c, g, or t
  misc_feature (5755)..(5756): n is a, c, g, or t
  misc_feature (5761)..(5762): n is a, c, g, or t
  misc_feature (5767)..(5767): n is a, c, g, or t
  misc_feature (5769)..(5769): n is a, c, g, or t
  misc_feature (5784)..(5784): n is a, c, g, or t
  misc_feature (5788)..(5789): n is a, c, g, or t
  misc_feature (5791)..(5792): n is a, c, g, or t
  misc_feature (5798)..(5798): n is a, c, g, or t
  misc_feature (5801)..(5802): n is a, c, g, or t
  misc_feature (5804)..(5805): n is a, c, g, or t
  misc_feature (5808)..(5809): n is a, c, g, or t
  misc_feature (5814)..(5814): n is a, c, g, or t
  misc_feature (5822)..(5822): n is a, c, g, or t
  misc_feature (5824)..(5824): n is a, c, g, or t
  misc_feature (5827)..(5827): n is a, c, g, or t
  misc_feature (5829)..(5829): n is a, c, g, or t
  misc_feature (5831)..(5832): n is a, c, g, or t
  misc_feature (5839)..(5839): n is a, c, g, or t
  misc_feature (5842)..(5842): n is a, c, g, or t
  misc_feature (5844)..(5844): n is a, c, g, or t
  misc_feature (5859)..(5860): n is a, c, g, or t
  misc_feature (5867)..(5867): n is a, c, g, or t
  misc_feature (5870)..(5870): n is a, c, g, or t
  misc_feature (5877)..(5877): n is a, c, g, or t
  misc_feature (5882)..(5882): n is a, c, g, or t
  misc_feature (5885)..(5885): n is a, c, g, or t
  misc_feature (5889)..(5889): n is a, c, g, or t
  misc_feature (5892)..(5892): n is a, c, g, or t
  misc_feature (5896)..(5896): n is a, c, g, or t
  misc_feature (5899)..(5899): n is a, c, g, or t
  misc_feature (5902)..(5902): n is a, c, g, or t
  misc_feature (5906)..(5906): n is a, c, g, or t
  misc_feature (5916)..(5916): n is a, c, g, or t
  misc_feature (5919)..(5919): n is a, c, g, or t
  misc_feature (5922)..(5922): n is a, c, g, or t
  misc_feature (5932)..(5932): n is a, c, g, or t
  misc_feature (5937)..(5937): n is a, c, g, or t
  misc_feature (5941)..(5941): n is a, c, g, or t
  misc_feature (5961)..(5961): n is a, c, g, or t
  misc_feature (5989)..(5989): n is a, c, g, or t
  misc_feature (6012)..(6012): n is a, c, g, or t
  misc_feature (6016)..(6016): n is a, c, g, or t
ctcgtaatccataacttgagatgaacacaccaaattataaatatcttattcacctaatccgtggaaagtttgtaacaccaaaatattaacttctgttcttgatcactcagcctccatagttattcatgttgcatgatctgattcgctcttttagaatttctcatagcgtcaggtactagctcaaaataacaggagcaactgcttctttccatatcccacattgaggaaaacacattttgcaagccgtcttaaagaaacaggtcaacttagtttagggatgaaacttaaaagtaagcttcgtcacaaaaaacacagttcaacaccacctcgcccggctgcaggcagctcagaggacaggaagtgaggccaagacatatttcacgcagcacagactaaaccccagcttttatctttcccgctggtccttaagggaccaaccgtactgattttccgtcatgttccgcgccacttccgttcgcgcactttaattacgtcaggcgtcctctctcgcggtatcatccggttgctgaggccctgtaataaaggtctcgcgaaatttgttctagaggtccaagtttgcttcttagcttactccaccccacccccaacctgtccctccttttctttccaagtcacaaaattctcccctcccctaccccggagtttacggccctcctcctgtttccgatttcagcccggaaccggaagtgtagtgggcggggcccgtcggcggaaaacgcagcggagccagagccggacacggctgtggccgctgcctctacccccgccacggatcgccgggtagtaggactgcgcggctccaggctgagggtcggtccggaggcgggtgggcgcgggtctcacccggattgtccgggtggcaccgttcccggccccaccgggcgccgcgagggatcatgtctacagcctctgccgcctcctcctcctcctcgtcttcggccggtgagatgatcgaagccccttcccaggtcctcaactttgaagagatcgactacaaggagatcgaggtggaagaggttgttggaagaggagcctttggagttgtttgcaaagctaagtggagagcaaaagatgttgctattaaacaaatagaaagtgaatctgagaggaaagcgtttattgtagagcttcggcagttatcccgtgtgaaccatcctaatattgtaaagctttatggagcctgcttgaatccagtgtgtcttgtgatggaatatgctgaagggggctctttatataatgtgctgcatggtgctgaaccattgccatattatactgctgcccacgcaatgagttggtgtttacagtgttcccaaggagtggcttatcttcacagcatgcaacccaaagcgctaattcacagggacctgaaaccaccaaacttactgctggttgcaggggggacagttctaaaaatttgtgattttggtacagcctgtgacattcagacacacatgaccaataacaaggggagtgctgcttggatggcacctgaagtttttgaaggtagtaattacagtgaaaaatgtgacgtcttcagctggggtattattctttgggaagtgataacgcgtcggaaaccctttgatgagattggtggcccagctttccgaatcatgtgggctgttcataatggtactcgaccaccactgataaaaaatttacctaagcccattgagagcctgatgactcgttgttggtctaaagatccttcccagcgcccttcaatggaggaaattgtgaaaataatgactcacttgatgcgggtataatccttcttttgaggggctttggatttaggggaatttaatatgtgctgagttttaatggaattttaaaagggatgttattactatattctgctttatatattgctatgttttctaagtgagaatgggcatttattactcatagtcagaagaggaaacatttcgagagggaaaatctagttctttatcactggaaagatggctagactaggtttctagacttgcttttttctttttgcttacattagtggacaagtatgtttgtctctgggcctgttgcctcatttgtaatgtgggagaaactgaaatagatagtctctaaagccatcacaggacttggatatattaatattatgacttcaatacatgataaactaaattttacatttttctgataccaattttcatcaagcatttagtcatttatgcaaggcaataggttgcattctcagacacatttatttgagtgacttttactatttggcctattttcaggtttttatatcccagtaaaaagttaaactttcttctatttagaagaacccttttaaatgattatcaaattttcctagtctgtgaatcaagcgcctttagaattatttggaatattttacgcctctggtttttggtacattaacaaaaactgtgaagtggtatcttggctttaaaaagttcaaatatctatgaaagtgcctgaattttgaaacagtttgttcagtagaagaatcttacaatctccttaaatatagactaagtaatttcctaaatggtaaaacgttgtttattcaatctattgaaaatttcttacgcaaagcagcttgaactaatctactaaaagtttaccatcgtatttggataccagtcatatatagaagcctaggccttaaaggtgtgtgcataagaaaacaacttagtctctgtagtcagattacttaaaactttaggatatataagttattgcagttgtaattttgcttctctgttccttgtctaatttgaggagaatacgtttcctttttttctctaaattctaacatttttgtccagcagatactttgagtattatgcctccagtttgtagaaagacattcataatctatcctcttaatatttaaaatgttctaacaattattctatggtatactagtctcagtcttcagactaacagtcactggaagtttacatcactactgtaagaacatgagtatgttttacataattatgagaaatgatactattttatttcatatgtttctctagagaaatatttgctgttttcttcaagactatctagactccaatgtaagctagattcttaggtaggtgcatggcattgatcaaagttgaaatccaagagtacattattgtaatctttgtaaaataaaaaacttaggcacctacaaatttagtatataacttagggaaaataaaacattaatcaggatttaatttgtattaaggaaattttaagctgtggtttacttttttatatatagtactttccaggagcagatgagccattacagtatccttgtcagtattcagatgaaggacagagcaactctgccaccagtacaggctcattcatggacattgcttctacaaatacgagtaacaaaagtgacactaatatggagcaagttcctgccacaaatgatactattaagcgcttagaatcaaaattgttgaaaaatcaggcaaagcaacagagtgaatctggacgtttaagcttgggagcctcccgtgggagcagtgtggagagcttgcccccaacctctgagggcaagaggatgagtgctgacatgtctgaaatagaagctaggatcgccgcaaccacagcctattccaagcctaaacggggccaccgtaaaactgcttcatttggcaacattctggatgtccctgagatcgtcatatcaggcaacggacagccaagacgtagatccatccaagacttgactgtaactggaacagaacctggtcaggtgagcagtaggtcatccagtcccagtgtcagaatgattactacctcaggaccaacctcagaaaagccaactcgaagtcatccatggacccctgatgattccacagataccaatggatcagataactccatcccaatggcttatcttacactggatcaccaactacaggcaagaactagttgcagaactggaccaggatgaaaaggaccagcaaaatacatctcgcctggtacaggaacataaaaagcttttagatgaaaacaaaagcctttctacttactaccagcaatgcaaaaaacaactagaggtcatcagaagtcagcagcagaaacgacaaggcacttcatgattctctgggaccgttacattttgaaatatgcaaagaaagactttttttttaaggaaaggaaaaccttataatgacgattcatgagtgttagctttttggcgtgttctgaatgccaactgcctatatttgctgcatttttttcattgtttattttccttttctcatggtggacatacaattttactgtttcattgcataacatggtagcatctgtgacttgaatgagcagcactttgcaacttcaaaacagatgcagtgaactgtggctgtatatgcatgctcattgtgtgaaggctagcctaacagaacaggaggtatcaaactagctgctatgtgcaaacagcgtccattttttcatattagaggtggaacctcaagaatgactttattcttgtatctcatctcaaaatattaataatttttttcccaaaagatggtatataccaagttaaagacagggtattataaatttagagtgattggtggtatattacggaaatacggaacctttagggatagttccgtgtaagggctttgatgccagcatccttggatcagtactgaactcagttccatccgtaaaatatgtaaagataagcaagatctaagaagttatcaaaactattctttaaaatgctaaagcaggtaactttttcttccattattttttcctcctaccactgagttttgtaatgaattccttgtgtatacaagcaatacaggtgaatactaaactgttatttttagcttcttcaaaagctattttagaaagcttcctggaaataaatgtcttctgtcatttaatttaaataaaaggagtgttaattgttcccaaatttgattacctagctgaaacagatattggattcagcatagtaatagtaaaataaaattggcagagaaaataactgtagactaggataaagcatgactcctccatagcattgttgcttgtatgtacatctgtcactccactgaaagggacctagtcactttaaagaggccttttatctcagcacgagatatccaagcgtgaatgctaaggcttgatgtttccattaggatttagcattcgagatttcagattttatttatagtcattgatgtgttttgctgtattataacacatttaaagggaaattttattatggtttttacatgtagtcatttcataaaaatatccagataggtaaatggaagaaaatagtagattttagtcatggtaccaaatgcaagaggctgttgaacagttgcttgtttgtttacagtaagttccttgagattttcagtactgtagttgccctggacattgagtacagttcagccttactctgtttttaagtagttgtgttgtcaatttcatgcttttaagtcctgatgatccttggagatgggagaaaaagataccagggataattaaaatccacagccagtttcatcagtttcctcatccatcctgcaaataaaaatgttaacaaggagccaaacttattcgttctggttttacaatttattttgaccgttttttgggtgaaaattgcaaacagccacncccgtcncccccccgcccccgcccaannnaccccnacccnacccccgcncannccccnaccccccccccccccccncccccnnccccnnacccncncccccacccaacccngagnnanncacccncgnncnnccnnaaccncccccccnanccnancnncaaccanccnanaacacccaccccacnncaacacnacncacaaanacccnccncaanccncccncanacncccnaccacccccnccnaancaccccagancaccnaacnccccccccccccaagccccntccatgcccccaatcccagcccccgcanccagagaccacaggccccccccncganaccctggcccccccccataaatgtgtgtggttttcagcgctcaactcctgtcttcaaatggtagtaagttctacttctacttctgtcattcagaacattttatgtcaaatgatgtaatgcagaaattcttgtgcatatttgtaactgaaggaagctttttagatttatttttgtttttaataaaattcagattcctattctaaactggtacataaaagtggtgaatgacttgtatcagcaaatgagctgcgaagtgttctgctctagcaccgtgtttaccttacacagaacctactaaaaactgaaatgtcacttttgtacgataatcatggtttttaagaggctgggtaattggccagttaacacatcatctcttgcatttcaaaattttgtgttaaatggagctcttcacaatttcatgagtcctaatttgtgtgaagcacaacacgtcatacattgctaagtgattcttctcatcagaaagctgatttcttagagtatttctaagttaaattaggtatttcattcctttatcaacctgctggctttccaaccctaacatatgcacacattcttataaactctaccttcattttagtaaatccatccattcatttgctcattcttttaataaatatttgtttatcatatattataaactgcactgctattaccaataccaagttacatgtccattccagtcacacagtagtttgatggtattcccatcttacagatg

SEQ ID NO: 735231 - DNA, 6456 bp, Homo sapiens
  misc_feature (5673)..(5673): n is a, c, g, or t
  misc_feature (5680)..(5680): n is a, c, g, or t
  misc_feature (5700)..(5702): n is a, c, g, or t
  misc_feature (5708)..(5708): n is a, c, g, or t
  misc_feature (5713)..(5713): n is a, c, g, or t
  misc_feature (5722)..(5722): n is a, c, g, or t
  misc_feature (5725)..(5726): n is a, c, g, or t
  misc_feature (5731)..(5731): n is a, c, g, or t
  misc_feature (5749)..(5749): n is a, c, g, or t
  misc_feature (5755)..(5756): n is a, c, g, or t
  misc_feature (5761)..(5762): n is a, c, g, or t
  misc_feature (5767)..(5767): n is a, c, g, or t
  misc_feature (5769)..(5769): n is a, c, g, or t
  misc_feature (5784)..(5784): n is a, c, g, or t
  misc_feature (5788)..(5789): n is a, c, g, or t
  misc_feature (5791)..(5792): n is a, c, g, or t
  misc_feature (5798)..(5798): n is a, c, g, or t
  misc_feature (5801)..(5802): n is a, c, g, or t
  misc_feature (5804)..(5805): n is a, c, g, or t
  misc_feature (5808)..(5809): n is a, c, g, or t
  misc_feature (5814)..(5814): n is a, c, g, or t
  misc_feature (5822)..(5822): n is a, c, g, or t
  misc_feature (5824)..(5824): n is a, c, g, or t
  misc_feature (5827)..(5827): n is a, c, g, or t
  misc_feature (5829)..(5829): n is a, c, g, or t
  misc_feature (5831)..(5832): n is a, c, g, or t
  misc_feature (5839)..(5839): n is a, c, g, or t
  misc_feature (5842)..(5842): n is a, c, g, or t
  misc_feature (5844)..(5844): n is a, c, g, or t
  misc_feature (5859)..(5860): n is a, c, g, or t
  misc_feature (5867)..(5867): n is a, c, g, or t
  misc_feature (5870)..(5870): n is a, c, g, or t
  misc_feature (5877)..(5877): n is a, c, g, or t
  misc_feature (5882)..(5882): n is a, c, g, or t
  misc_feature (5885)..(5885): n is a, c, g, or t
  misc_feature (5889)..(5889): n is a, c, g, or t
  misc_feature (5892)..(5892): n is a, c, g, or t
  misc_feature (5896)..(5896): n is a, c, g, or t
  misc_feature (5899)..(5899): n is a, c, g, or t
  misc_feature (5902)..(5902): n is a, c, g, or t
  misc_feature (5906)..(5906): n is a, c, g, or t
  misc_feature (5916)..(5916): n is a, c, g, or t
  misc_feature (5919)..(5919): n is a, c, g, or t
  misc_feature (5922)..(5922): n is a, c, g, or t
  misc_feature (5932)..(5932): n is a, c, g, or t
  misc_feature (5937)..(5937): n is a, c, g, or t
  misc_feature (5941)..(5941): n is a, c, g, or t
  misc_feature (5961)..(5961): n is a, c, g, or t
  misc_feature (5989)..(5989): n is a, c, g, or t
  misc_feature (6012)..(6012): n is a, c, g, or t
  misc_feature (6016)..(6016): n is a, c, g, or t
ctcgtaatccataacttgagatgaacacaccaaattataaatatcttattcacctaatccgtggaaagtttgtaacaccaaaatattaacttctgttcttgatcactcagcctccatagttattcatgttgcatgatctgattcgctcttttagaatttctcatagcgtcaggtactagctcaaaataacaggagcaactgcttctttccatatcccacattgaggaaaacacattttgcaagccgtcttaaagaaacaggtcaacttagtttagggatgaaacttaaaagtaagcttcgtcacaaaaaacacagttcaacaccacctcgcccggctgcaggcagctcagaggacaggaagtgaggccaagacatatttcacgcagcacagactaaaccccagcttttatctttcccgctggtccttaagggaccaaccgtactgattttccgtcatgttccgcgccacttccgttcgcgcactttaattacgtcaggcgtcctctctcgcggtatcatccggttgctgaggccctgtaataaaggtctcgcgaaatttgttctagaggtccaagtttgcttcttagcttactccaccccacccccaacctgtccctccttttctttccaagtcacaaaattctcccctcccctaccccggagtttacggccctcctcctgtttccgatttcagcccggaaccggaagtgtagtgggcggggcccgtcggcggaaaacgcagcggagccagagccggacacggctgtggccgctgcctctacccccgccacggatcgccgggtagtaggactgcgcggctccaggctgagggtcggtccggaggcgggtgggcgcgggtctcacccggattgtccgggtggcaccgttcccggccccaccgggcgccgcgagggatcatgtctacagcctctgccgcctcctcctcctcctcgtcttcggccggtgagatgatcgaagccccttcccaggtcctcaactttgaagagatcgactacaaggagatcgaggtggaagaggttgttggaagaggagcctttggagttgtttgcaaagctaagtggagagcaaaagatgttgctattaaacaaatagaaagtgaatctgagaggaaagcgtttattgtagagcttcggcagttatcccgtgtgaaccatcctaatattgtaaagctttatggagcctgcttgaatccagtgtgtcttgtgatggaatatgctgaagggggctctttatataatgtgctgcatggtgctgaaccattgccatattatactgctgcccacgcaatgagttggtgtttacagtgttcccaaggagtggcttatcttcacagcatgcaacccaaagcgctaattcacagggacctgaaaccaccaaacttactgctggttgcaggggggacagttctaaaaatttgtgattttggtacagcctgtgacattcagacacacatgaccaataacaaggggagtgctgcttggatggcacctgaagtttttgaaggtagtaattacagtgaaaaatgtgacgtcttcagctggggtattattctttgggaagtgataacgcgtcggaaaccctttgatgagattggtggcccagctttccgaatcatgtgggctgttcataatggtactcgaccaccactgataaaaaatttacctaagcccattgagagcctgatgactcgttgttggtctaaagatccttcccagcgcccttcaatggaggaaattgtgaaaataatgactcacttgatgcgggtataatccttcttttgaggggctttggatttaggggaatttaatatgtgctgagttttaatggaattttaaaagggatgttattactatattctgctttatatattgctatgttttctaagtgagaatgggcatttattactcatagtcagaagaggaaacatttcgagagggaaaatctagttctttatcactggaaagatggctagactaggtttctagacttgcttttttctttttgcttacattagtggacaagtatgtttgtctctgggcctgttgcctcatttgtaatgtgggagaaactgaaatagatagtctctaaagccatcacaggacttggatatattaatattatgacttcaatacatgataaactaaattttacatttttctgataccaattttcatcaagcatttagtcatttatgcaaggcaataggttgcattctcagacacatttatttgagtgacttttactatttggcctattttcaggtttttatatcccagtaaaaagttaaactttcttctatttagaagaacccttttaaatgattatcaaattttcctagtctgtgaatcaagcgcctttagaattatttggaatattttacgcctctggtttttggtacattaacaaaaactgtgaagtggtatcttggctttaaaaagttcaaatatctatgaaagtgcctgaattttgaaacagtttgttcagtagaagaatcttacaatctccttaaatatagactaagtaatttcctaaatggtaaaacgttgtttattcaatctattgaaaatttcttacgcaaagcagcttgaactaatctactaaaagtttaccatcgtatttggataccagtcatatatagaagcctaggccttaaaggtgtgtgcataagaaaacaacttagtctctgtagtcagattacttaaaactttaggatatataagttattgcagttgtaattttgcttctctgttccttgtctaatttgaggagaatacgtttcctttttttctctaaattctaacatttttgtccagcagatactttgagtattatgcctccagtttgtagaaagacattcataatctatcctcttaatatttaaaatgttctaacaattattctatggtatactagtctcagtcttcagactaacagtcactggaagtttacatcactactgtaagaacatgagtatgttttacataattatgagaaatgatactattttatttcatatgtttctctagagaaatatttgctgttttcttcaagactatctagactccaatgtaagctagattcttaggtaggtgcatggcattgatcaaagttgaaatccaagagtacattattgtaatctttgtaaaataaaaaacttaggcacctacaaatttagtatataacttagggaaaataaaacattaatcaggatttaatttgtattaaggaaattttaagctgtggtttacttttttatatatagtactttccaggagcagatgagccattacagtatccttgtcagtattcagatgaaggacagagcaactctgccaccagtacaggctcattcatggacattgcttctacaaatacgagtaacaaaagtgacactaatatggagcaagttcctgccacaaatgatactattaagcgcttagaatcaaaattgttgaaaaatcaggcaaagcaacagagtgaatctggacgtttaagcttgggagcctcccgtgggagcagtgtggagagcttgcccccaacctctgagggcaagaggatgagtgctgacatgtctgaaatagaagctaggatcgccgcaaccacagcctattccaagcctaaacggggccaccgtaaaactgcttcatttggcaacattctggatgtccctgagatcgtcatatcaggcaacggacagccaagacgtagatccatccaagacttgactgtaactggaacagaacctggtcaggtgagcagtaggtcatccagtcccagtgtcagaatgattactacctcaggaccaacctcagaaaagccaactcgaagtcatccatggacccctgatgattccacagataccaatggatcagataactccatcccaatggcttatcttacactggatcaccaactacaggcaagaactagttgcagaactggaccaggatgaaaaggaccagcaaaatacatctcgcctggtacaggaacataaaaagcttttagatgaaaacaaaagcctttctacttactaccagcaatgcaaaaaacaactagaggtcatcagaagtcagcagcagaaacgacaaggcacttcatgattctctgggaccgttacattttgaaatatgcaaagaaagactttttttttaaggaaaggaaaaccttataatgacgattcatgagtgttagctttttggcgtgttctgaatgccaactgcctatatttgctgcatttttttcattgtttattttccttttctcatggtggacatacaattttactgtttcattgcataacatggtagcatctgtgacttgaatgagcagcactttgcaacttcaaaacagatgcagtgaactgtggctgtatatgcatgctcattgtgtgaaggctagcctaacagaacaggaggtatcaaactagctgctatgtgcaaacagcgtccattttttcatattagaggtggaacctcaagaatgactttattcttgtatctcatctcaaaatattaataatttttttcccaaaagatggtatataccaagttaaagacagggtattataaatttagagtgattggtggtatattacggaaatacggaacctttagggatagttccgtgtaagggctttgatgccagcatccttggatcagtactgaactcagttccatccgtaaaatatgtaaagataagcaagatctaagaagttatcaaaactattctttaaaatgctaaagcaggtaactttttcttccattattttttcctcctaccactgagttttgtaatgaattccttgtgtatacaagcaatacaggtgaatactaaactgttatttttagcttcttcaaaagctattttagaaagcttcctggaaataaatgtcttctgtcatttaatttaaataaaaggagtgttaattgttcccaaatttgattacctagctgaaacagatattggattcagcatagtaatagtaaaataaaattggcagagaaaataactgtagactaggataaagcatgactcctccatagcattgttgcttgtatgtacatctgtcactccactgaaagggacctagtcactttaaagaggccttttatctcagcacgagatatccaagcgtgaatgctaaggcttgatgtttccattaggatttagcattcgagatttcagattttatttatagtcattgatgtgttttgctgtattataacacatttaaagggaaattttattatggtttttacatgtagtcatttcataaaaatatccagataggtaaatggaagaaaatagtagattttagtcatggtaccaaatgcaagaggctgttgaacagttgcttgtttgtttacagtaagttccttgagattttcagtactgtagttgccctggacattgagtacagttcagccttactctgtttttaagtagttgtgttgtcaatttcatgcttttaagtcctgatgatccttggagatgggagaaaaagataccagggataattaaaatccacagccagtttcatcagtttcctcatccatcctgcaaataaaaatgttaacaaggagccaaacttattcgttctggttttacaatttattttgaccgttttttgggtgaaaattgcaaacagccacncccgtcncccccccgcccccgcccaannnaccccnacccnacccccgcncannccccnaccccccccccccccccncccccnnccccnnacccncncccccacccaacccngagnnanncacccncgnncnnccnnaaccncccccccnanccnancnncaaccanccnanaacacccaccccacnncaacacnacncacaaanacccnccncaanccncccncanacncccnaccacccccnccnaancaccccagancaccnaacnccccccccccccaagccccntccatgcccccaatcccagcccccgcanccagagaccacaggccccccccncganaccctggcccccccccataaatgtgtgtggttttcagcgctcaactcctgtcttcaaatggtagtaagttctacttctacttctgtcattcagaacattttatgtcaaatgatgtaatgcagaaattcttgtgcatatttgtaactgaaggaagctttttagatttatttttgtttttaataaaattcagattcctattctaaaaaaaaaaaaaaaaaaaaaaaaaaggggggggcggctaaaaaataacctagagggcaagtttaagcgtaccaggtttttggtcaaaagggccctaaggggggaataaaaggagggaggggcgtacaacgtcggtgggaaacggcgttgggctttggaagagcttcttttggtggcgtttggaatctaagaattagctaggaataatacgttatggtacacgttctgggaatgcgtaa

SEQ ID NO: 735232 - DNA, 5599 bp, Homo sapiens
ctcgtaatccataacttgagatgaacacaccaaattataaatatcttattcacctaatccgtggaaagtttgtaacaccaaaatattaacttctgttcttgatcactcagcctccatagttattcatgttgcatgatctgattcgctcttttagaatttctcatagcgtcaggtactagctcaaaataacaggagcaactgcttctttccatatcccacattgaggaaaacacattttgcaagccgtcttaaagaaacaggtcaacttagtttagggatgaaacttaaaagtaagcttcgtcacaaaaaacacagttcaacaccacctcgcccggctgcaggcagctcagaggacaggaagtgaggccaagacatatttcacgcagcacagactaaaccccagcttttatctttcccgctggtccttaagggaccaaccgtactgattttccgtcatgttccgcgccacttccgttcgcgcactttaattacgtcaggcgtcctctctcgcggtatcatccggttgctgaggccctgtaataaaggtctcgcgaaatttgttctagaggtccaagtttgcttcttagcttactccaccccacccccaacctgtccctccttttctttccaagtcacaaaattctcccctcccctaccccggagtttacggccctcctcctgtttccgatttcagcccggaaccggaagtgtagtgggcggggcccgtcggcggaaaacgcagcggagccagagccggacacggctgtggccgctgcctctacccccgccacggatcgccgggtagtaggactgcgcggctccaggctgagggtcggtccggaggcgggtgggcgcgggtctcacccggattgtccgggtggcaccgttcccggccccaccgggcgccgcgagggatcatgtctacagcctctgccgcctcctcctcctcctcgtcttcggccggtgagatgatcgaagccccttcccaggtcctcaactttgaagagatcgactacaaggagatcgaggtggaagaggttgttggaagaggagcctttggagttgtttgcaaagctaagtggagagcaaaagatgttgctattaaacaaatagaaagtgaatctgagaggaaagcgtttattgtagagcttcggcagttatcccgtgtgaaccatcctaatattgtaaagctttatggagcctgcttgaatccagtgtgtcttgtgatggaatatgctgaagggggctctttatataatgtgctgcatggtgctgaaccattgccatattatactgctgcccacgcaatgagttggtgtttacagtgttcccaaggagtggcttatcttcacagcatgcaacccaaagcgctaattcacagggacctgaaaccaccaaacttactgctggttgcaggggggacagttctaaaaatttgtgattttggtacagcctgtgacattcagacacacatgaccaataacaaggggagtgctgcttggatggcacctgaagtttttgaaggtagtaattacagtgaaaaatgtgacgtcttcagctggggtattattctttgggaagtgataacgcgtcggaaaccctttgatgagattggtggcccagctttccgaatcatgtgggctgttcataatggtactcgaccaccactgataaaaaatttacctaagcccattgagagcctgatgactcgttgttggtctaaagatccttcccagcgcccttcaatggaggaaattgtgaaaataatgactcacttgatgcgggtataatccttcttttgaggggctttggatttaggggaatttaatatgtgctgagttttaatggaattttaaaagggatgttattactatattctgctttatatattgctatgttttctaagtgagaatgggcatttattactcatagtcagaagaggaaacatttcgagagggaaaatctagttctttatcactggaaagatggctagactaggtttctagacttgcttttttctttttgcttacattagtggacaagtatgtttgtctctgggcctgttgcctcatttgtaatgtgggagaaactgaaatagatagtctctaaagccatcacaggacttggatatattaatattatgacttcaatacatgataaactaaattttacatttttctgataccaattttcatcaagcatttagtcatttatgcaaggcaataggttgcattctcagacacatttatttgagtgacttttactatttggcctattttcaggtttttatatcccagtaaaaagttaaactttcttctatttagaagaacccttttaaatgattatcaaattttcctagtctgtgaatcaagcgcctttagaattatttggaatattttacgcctctggtttttggtacattaacaaaaactgtgaagtggtatcttggctttaaaaagttcaaatatctatgaaagtgcctgaattttgaaacagtttgttcagtagaagaatcttacaatctccttaaatatagactaagtaatttcctaaatggtaaaacgttgtttattcaatctattgaaaatttcttacgcaaagcagcttgaactaatctactaaaagtttaccatcgtatttggataccagtcatatatagaagcctaggccttaaaggtgtgtgcataagaaaacaacttagtctctgtagtcagattacttaaaactttaggatatataagttattgcagttgtaattttgcttctctgttccttgtctaatttgaggagaatacgtttcctttttttctctaaattctaacatttttgtccagcagatactttgagtattatgcctccagtttgtagaaagacattcataatctatcctcttaatatttaaaatgttctaacaattattctatggtatactagtctcagtcttcagactaacagtcactggaagtttacatcactactgtaagaacatgagtatgttttacataattatgagaaatgatactattttatttcatatgtttctctagagaaatatttgctgttttcttcaagactatctagactccaatgtaagctagattcttaggtaggtgcatggcattgatcaaagttgaaatccaagagtacattattgtaatctttgtaaaataaaaaacttaggcacctacaaatttagtatataacttagggaaaataaaacattaatcaggatttaatttgtattaaggaaattttaagctgtggtttacttttttatatatagtactttccaggagcagatgagccattacagtatccttgtcagtattcagatgaaggacagagcaactctgccaccagtacaggctcattcatggacattgcttctacaaatacgagtaacaaaagtgacactaatatggagcaagttcctgccacaaatgatactattaagcgcttagaatcaaaattgttgaaaaatcaggcaaagcaacagagtgaatctggacgtttaagcttgggagcctcccgtgggagcagtgtggagagcttgcccccaacctctgagggcaagaggatgagtgctgacatgtctgaaatagaagctaggatcgccgcaaccacagcctattccaagcctaaacggggccaccgtaaaactgcttcatttggcaacattctggatgtccctgagatcgtcatatcaggcaacggacagccaagacgtagatccatccaagacttgactgtaactggaacagaacctggtcaggtgagcagtaggtcatccagtcccagtgtcagaatgattactacctcaggaccaacctcagaaaagccaactcgaagtcatccatggacccctgatgattccacagataccaatggatcagataactccatcccaatggcttatcttacactggatcaccaactacaggcaagaactagttgcagaactggaccaggatgaaaaggaccagcaaaatacatctcgcctggtacaggaacataaaaagcttttagatgaaaacaaaagcctttctacttactaccagcaatgcaaaaaacaactagaggtcatcagaagtcagcagcagaaacgacaaggcacttcatgattctctgggaccgttacattttgaaatatgcaaagaaagactttttttttaaggaaaggaaaaccttataatgacgattcatgagtgttagctttttggcgtgttctgaatgccaactgcctatatttgctgcatttttttcattgtttattttccttttctcatggtggacatacaattttactgtttcattgcataacatggtagcatctgtgacttgaatgagcagcactttgcaacttcaaaacagatgcagtgaactgtggctgtatatgcatgctcattgtgtgaaggctagcctaacagaacaggaggtatcaaactagctgctatgtgcaaacagcgtccattttttcatattagaggtggaacctcaagaatgactttattcttgtatctcatctcaaaatattaataatttttttcccaaaagatggtatataccaagttaaagacagggtattataaatttagagtgattggtggtatattacggaaatacggaacctttagggatagttccgtgtaagggctttgatgccagcatccttggatcagtactgaactcagttccatccgtaaaatatgtaaagataagcaagatctaagaagttatcaaaactattctttaaaatgctaaagcaggtaactttttcttccattattttttcctcctaccactgagttttgtaatgaattccttgtgtatacaagcaatacaggtgaatactaaactgttatttttagcttcttcaaaagctattttagaaagcttcctggaaataaatgtcttctgtcatttaatttaaataaaaggagtgttaattgttcccaaatttgattacctagctgaaacagatattggattcagcatagtaatagtaaaataaaattggcagagaaaataactgtagactaggataaagcatgactcctccatagcattgttgcttgtatgtacatctgtcactccactgaaagggacctagtcactttaaagaggccttttatctcagcacgagatatccaagcgtgaatgctaaggcttgatgtttccattaggatttagcattcgagatttcagattttatttatagtcattgatgtgttttgctgtattataacacatttaaagggaaattttattatggtttttacatgtagtcatttcataaaaatatccagataggtaaatggaagaaaatagtagattttagtcatggtaccaaatgcaagaggctgttgaacagttgcttgtttgtttacagtaagttccttgagattttcagtactgtagttgccctggacattgagtacagttcagccttactctgtttttaagtagttgtgttgtcaatttcatgcttttaagtcctgatgatccttggagatgggagaaaaagataccagggataattaaaatccacagccagtttcatcagtttcctcatccatccgtcgacgcggccgcgaattta

SEQ ID NO: 735233 - DNA, 6701 bp, Homo sapiens
ctcgtaatccataacttgagatgaacacaccaaattataaatatcttattcacctaatccgtggaaagtttgtaacaccaaaatattaacttctgttcttgatcactcagcctccatagttattcatgttgcatgatctgattcgctcttttagaatttctcatagcgtcaggtactagctcaaaataacaggagcaactgcttctttccatatcccacattgaggaaaacacattttgcaagccgtcttaaagaaacaggtcaacttagtttagggatgaaacttaaaagtaagcttcgtcacaaaaaacacagttcaacaccacctcgcccggctgcaggcagctcagaggacaggaagtgaggccaagacatatttcacgcagcacagactaaaccccagcttttatctttcccgctggtccttaagggaccaaccgtactgattttccgtcatgttccgcgccacttccgttcgcgcactttaattacgtcaggcgtcctctctcgcggtatcatccggttgctgaggccctgtaataaaggtctcgcgaaatttgttctagaggtccaagtttgcttcttagcttactccaccccacccccaacctgtccctccttttctttccaagtcacaaaattctcccctcccctaccccggagtttacggccctcctcctgtttccgatttcagcccggaaccggaagtgtagtgggcggggcccgtcggcggaaaacgcagcggagccagagccggacacggctgtggccgctgcctctacccccgccacggatcgccgggtagtaggactgcgcggctccaggctgagggtcggtccggaggcgggtgggcgcgggtctcacccggattgtccgggtggcaccgttcccggccccaccgggcgccgcgagggatcatgtctacagcctctgccgcctcctcctcctcctcgtcttcggccggtgagatgatcgaagccccttcccaggtcctcaactttgaagagatcgactacaaggagatcgaggtggaagaggttgttggaagaggagcctttggagttgtttgcaaagctaagtggagagcaaaagatgttgctattaaacaaatagaaagtgaatctgagaggaaagcgtttattgtagagcttcggcagttatcccgtgtgaaccatcctaatattgtaaagctttatggagcctgcttgaatccagtgtgtcttgtgatggaatatgctgaagggggctctttatataatgtgctgcatggtgctgaaccattgccatattatactgctgcccacgcaatgagttggtgtttacagtgttcccaaggagtggcttatcttcacagcatgcaacccaaagcgctaattcacagggacctgaaaccaccaaacttactgctggttgcaggggggacagttctaaaaatttgtgattttggtacagcctgtgacattcagacacacatgaccaataacaaggggagtgctgcttggatggcacctgaagtttttgaaggtagtaattacagtgaaaaatgtgacgtcttcagctggggtattattctttgggaagtgataacgcgtcggaaaccctttgatgagattggtggcccagctttccgaatcatgtgggctgttcataatggtactcgaccaccactgataaaaaatttacctaagcccattgagagcctgatgactcgttgttggtctaaagatccttcccagcgcccttcaatggaggaaattgtgaaaataatgactcacttgatgcgggtataatccttcttttgaggggctttggatttaggggaatttaatatgtgctgagttttaatggaattttaaaagggatgttattactatattctgctttatatattgctatgttttctaagtgagaatgggcatttattactcatagtcagaagaggaaacatttcgagagggaaaatctagttctttatcactggaaagatggctagactaggtttctagacttgcttttttctttttgcttacattagtggacaagtatgtttgtctctgggcctgttgcctcatttgtaatgtgggagaaactgaaatagatagtctctaaagccatcacaggacttggatatattaatattatgacttcaatacatgataaactaaattttacatttttctgataccaattttcatcaagcatttagtcatttatgcaaggcaataggttgcattctcagacacatttatttgagtgacttttactatttggcctattttcaggtttttatatcccagtaaaaagttaaactttcttctatttagaagaacccttttaaatgattatcaaattttcctagtctgtgaatcaagcgcctttagaattatttggaatattttacgcctctggtttttggtacattaacaaaaactgtgaagtggtatcttggctttaaaaagttcaaatatctatgaaagtgcctgaattttgaaacagtttgttcagtagaagaatcttacaatctccttaaatatagactaagtaatttcctaaatggtaaaacgttgtttattcaatctattgaaaatttcttacgcaaagcagcttgaactaatctactaaaagtttaccatcgtatttggataccagtcatatatagaagcctaggccttaaaggtgtgtgcataagaaaacaacttagtctctgtagtcagattacttaaaactttaggatatataagttattgcagttgtaattttgcttctctgttccttgtctaatttgaggagaatacgtttcctttttttctctaaattctaacatttttgtccagcagatactttgagtattatgcctccagtttgtagaaagacattcataatctatcctcttaatatttaaaatgttctaacaattattctatggtatactagtctcagtcttcagactaacagtcactggaagtttacatcactactgtaagaacatgagtatgttttacataattatgagaaatgatactattttatttcatatgtttctctagagaaatatttgctgttttcttcaagactatctagactccaatgtaagctagattcttaggtaggtgcatggcattgatcaaagttgaaatccaagagtacattattgtaatctttgtaaaataaaaaacttaggcacctacaaatttagtatataacttagggaaaataaaacattaatcaggatttaatttgtattaaggaaattttaagctgtggtttacttttttatatatagtactttccaggagcagatgagccattacagtatccttgtcagtattcagatgaaggacagagcaactctgccaccagtacaggctcattcatggacattgcttctacaaatacgagtaacaaaagtgacactaatatggagcaagttcctgccacaaatgatactattaagcgcttagaatcaaaattgttgaaaaatcaggcaaagcaacagagtgaatctggacgtttaagcttgggagcctcccgtgggagcagtgtggagagcttgcccccaacctctgagggcaagaggatgagtgctgacatgtctgaaatagaagctaggatcgccgcaaccacagcctattccaagcctaaacggggccaccgtaaaactgcttcatttggcaacattctggatgtccctgagatcgtcatatcaggcaacggacagccaagacgtagatccatccaagacttgactgtaactggaacagaacctggtcaggtgagcagtaggtcatccagtcccagtgtcagaatgattactacctcaggaccaacctcagaaaagccaactcgaagtcatccatggacccctgatgattccacagataccaatggatcagataactccatcccaatggcttatcttacactggatcaccaactacaggcaagaactagttgcagaactggaccaggatgaaaaggaccagcaaaatacatctcgcctggtacaggaacataaaaagcttttagatgaaaacaaaagcctttctacttactaccagcaatgcaaaaaacaactagaggtcatcagaagtcagcagcagaaacgacaaggcacttcatgattctctgggaccgttacattttgaaatatgcaaagaaagactttttttttaaggaaaggaaaaccttataatgacgattcatgagtgttagctttttggcgtgttctgaatgccaactgcctatatttgctgcatttttttcattgtttattttccttttctcatggtggacatacaattttactgtttcattgcataacatggtagcatctgtgacttgaatgagcagcactttgcaacttcaaaacagatgcagtgaactgtggctgtatatgcatgctcattgtgtgaaggctagcctaacagaacaggaggtatcaaactagctgctatgtgcaaacagcgtccattttttcatattagaggtggaacctcaagaatgactttattcttgtatctcatctcaaaatattaataatttttttcccaaaagatggtatataccaagttaaagacagggtattataaatttagagtgattggtggtatattacggaaatacggaacctttagggatagttccgtgtaagggctttgatgccagcatccttggatcagtactgaactcagttccatccgtaaaatatgtaaagataagcaagatctaagaagttatcaaaactattctttaaaatgctaaagcaggtaactttttcttccattattttttcctcctaccactgagttttgtaatgaattccttgtgtatacaagcaatacaggtgaatactaaactgttatttttagcttcttcaaaagctattttagaaagcttcctggaaataaatgtcttctgtcatttaatttaaataaaaggagtgttaattgttcccaaatttgattacctagctgaaacagatattggattcagcatagtaatagtaaaataaaattggcagagaaaataactgtagactaggataaagcatgactcctccatagcattgttgcttgtatgtacatctgtcactccactgaaagggacctagtcactttaaagaggccttttatctcagcacgagatatccaagcgtgaatgctaaggcttgatgtttccattaggatttagcattcgagatttcagattttatttatagtcattgatgtgttttgctgtattataacacatttaaagggaaattttattatggtttttacatgtagtcatttcataaaaatatccagataggtaaatggaagttgtttgtttacagtaagttccttgagattttcagtactgtagttgccctggacattgagtacagttcagccttactctgtttttaagtagttgtgttgtcaatttcatgcttttaagtcctgatgatccttggagatgggagaaaaagataccagggataattaaaatccacagccagtttcatcagtttcctcatccatcctgcaaataaaaatgttaacaaggagccaaacttattcgttctggttttacaatttattttgaccgttttttgggtgaaaattgcaaacagccaagcaagtggctggaatgccccagtctaagaaattcaaaaacaatcactgagtaagccctaattacattttactcttgactccaggaaaagaaagcaagcttttatctaatctagagggaagtattcgtgagcaataaaaatcacttttttgagttgaataataatcagttaagaatatttaccgcatagcaacacaacatataaagatttgttacaagttgtttacagatgtttgactatttttgctgaagtattttagagtattgaatgtcttctctcttcaagtttctttcatgttcctaatttcagctcctgtagccagagatcacaggtcttccctgtgaaactttggtttctttctataaatgtgtgtggttttcagcgctcaactcctgtcttcaaatggtagtaagttctacttctacttctgtcattcagaacattttatgtcaaatgatgtaatgcagaaattcttgtgcatatttgtaactgaaggaagctttttagatttatttttgtttttaataaaattcagattcctattctaaactggtacataaaagtggtgaatgacttgtatcagcaaatgagctgcgaagtgttctgctctagcaccgtgtttaccttacacagaacctactaaaaactgaaatgtcacttttgtacgataatcatggtttttaagaggctgggtaattggccagttaacacatcatctcttgcatttcaaaattttgtgttaaatggagctcttcacaatttcatgagtcctaatttgtgtgaagcacaacacgtcatacattgctaagtgattcttctcatcagaaagctgatttcttagagtatttctaagttaaattaggtatttcattcctttatcaacctgctggctttccaaccctaacatatgcacacattcttataaactctaccttcattttagtaaatccatccattcatttgctcattcttttaataaatatttgtttatcatatattataaactgcactgctattaccaataccaagttacatgtccattccagtcacacagtagtttgatggtattcccatcttacagatg

SEQ ID NO: 735234 - DNA, 6402 bp, Homo sapiens
ctcgtaatccataacttgagatgaacacaccaaattataaatatcttattcacctaatccgtggaaagtttgtaacaccaaaatattaacttctgttcttgatcactcagcctccatagttattcatgttgcatgatctgattcgctcttttagaatttctcatagcgtcaggtactagctcaaaataacaggagcaactgcttctttccatatcccacattgaggaaaacacattttgcaagccgtcttaaagaaacaggtcaacttagtttagggatgaaacttaaaagtaagcttcgtcacaaaaaacacagttcaacaccacctcgcccggctgcaggcagctcagaggacaggaagtgaggccaagacatatttcacgcagcacagactaaaccccagcttttatctttcccgctggtccttaagggaccaaccgtactgattttccgtcatgttccgcgccacttccgttcgcgcactttaattacgtcaggcgtcctctctcgcggtatcatccggttgctgaggccctgtaataaaggtctcgcgaaatttgttctagaggtccaagtttgcttcttagcttactccaccccacccccaacctgtccctccttttctttccaagtcacaaaattctcccctcccctaccccggagtttacggccctcctcctgtttccgatttcagcccggaaccggaagtgtagtgggcggggcccgtcggcggaaaacgcagcggagccagagccggacacggctgtggccgctgcctctacccccgccacggatcgccgggtagtaggactgcgcggctccaggctgagggtcggtccggaggcgggtgggcgcgggtctcacccggattgtccgggtggcaccgttcccggccccaccgggcgccgcgagggatcatgtctacagcctctgccgcctcctcctcctcctcgtcttcggccggtgagatgatcgaagccccttcccaggtcctcaactttgaagagatcgactacaaggagatcgaggtggaagaggttgttggaagaggagcctttggagttgtttgcaaagctaagtggagagcaaaagatgttgctattaaacaaatagaaagtgaatctgagaggaaagcgtttattgtagagcttcggcagttatcccgtgtgaaccatcctaatattgtaaagctttatggagcctgcttgaatccagtgtgtcttgtgatggaatatgctgaagggggctctttatataatgtgctgcatggtgctgaaccattgccatattatactgctgcccacgcaatgagttggtgtttacagtgttcccaaggagtggcttatcttcacagcatgcaacccaaagcgctaattcacagggacctgaaaccaccaaacttactgctggttgcaggggggacagttctaaaaatttgtgattttggtacagcctgtgacattcagacacacatgaccaataacaaggggagtgctgcttggatggcacctgaagtttttgaaggtagtaattacagtgaaaaatgtgacgtcttcagctggggtattattctttgggaagtgataacgcgtcggaaaccctttgatgagattggtggcccagctttccgaatcatgtgggctgttcataatggtactcgaccaccactgataaaaaatttacctaagcccattgagagcctgatgactcgttgttggtctaaagatccttcccagcgcccttcaatggaggaaattgtgaaaataatgactcacttgatgcgggtataatccttcttttgaggggctttggatttaggggaatttaatatgtgctgagttttaatggaattttaaaagggatgttattactatattctgctttatatattgctatgttttctaagtgagaatgggcatttattactcatagtcagaagaggaaacatttcgagagggaaaatctagttctttatcactggaaagatggctagactaggtttctagacttgcttttttctttttgcttacattagtggacaagtatgtttgtctctgggcctgttgcctcatttgtaatgtgggagaaactgaaatagatagtctctaaagccatcacaggacttggatatattaatattatgacttcaatacatgataaactaaattttacatttttctgataccaattttcatcaagcatttagtcatttatgcaaggcaataggttgcattctcagacacatttatttgagtgacttttactatttggcctattttcaggtttttatatcccagtaaaaagttaaactttcttctatttagaagaacccttttaaatgattatcaaattttcctagtctgtgaatcaagcgcctttagaattatttggaatattttacgcctctggtttttggtacattaacaaaaactgtgaagtggtatcttggctttaaaaagttcaaatatctatgaaagtgcctgaattttgaaacagtttgttcagtagaagaatcttacaatctccttaaatatagactaagtaatttcctaaatggtaaaacgttgtttattcaatctattgaaaatttcttacgcaaagcagcttgaactaatctactaaaagtttaccatcgtatttggataccagtcatatatagaagcctaggccttaaaggtgtgtgcataagaaaacaacttagtctctgtagtcagattacttaaaactttaggatatataagttattgcagttgtaattttgcttctctgttccttgtctaatttgaggagaatacgtttcctttttttctctaaattctaacatttttgtccagcagatactttgagtattatgcctccagtttgtagaaagacattcataatctatcctcttaatatttaaaatgttctaacaattattctatggtatactagtctcagtcttcagactaacagtcactggaagtttacatcactactgtaagaacatgagtatgttttacataattatgagaaatgatactattttatttcatatgtttctctagagaaatatttgctgttttcttcaagactatctagactccaatgtaagctagattcttaggtaggtgcatggcattgatcaaagttgaaatccaagagtacattattgtaatctttgtaaaataaaaaacttaggcacctacaaatttagtatataacttagggaaaataaaacattaatcaggatttaatttgtattaaggaaattttaagctgtggtttacttttttatatatagtactttccaggagcagatgagccattacagtatccttgtcagtattcagatgaaggacagagcaactctgccaccagtacaggctcattcatggacattgcttctacaaatacgagtaacaaaagtgacactaatatggagcaagttcctgccacaaatgatactattaagcgcttagaatcaaaattgttgaaaaatcaggcaaagcaacagagtgaatctggacgtttaagcttgggagcctcccgtgggagcagtgtggagagcttgcccccaacctctgagggcaagaggatgagtgctgacatgtctgaaatagaagctaggatcgccgcaaccacagcctattccaagcctaaacggggccaccgtaaaactgcttcatttggcaacattctggatgtccctgagatcgtcatatcaggcaacggacagccaagacgtagatccatccaagacttgactgtaactggaacagaacctggtcaggtgagcagtaggtcatccagtcccagtgtcagaatgattactacctcaggaccaacctcagaaaagccaactcgaagtcatccatggacccctgatgattccacagataccaatggatcagataactccatcccaatggcttatcttacactggatcaccaactacaggcaagaactagttgcagaactggaccaggatgaaaaggaccagcaaaatacatctcgcctggtacaggaacataaaaagcttttagatgaaaacaaaagcctttctacttactaccagcaatgcaaaaaacaactagaggtcatcagaagtcagcagcagaaacgacaaggcacttcatgattctctgggaccgttacattttgaaatatgcaaagaaagactttttttttaaggaaaggaaaaccttataatgacgattcatgagtgttagctttttggcgtgttctgaatgccaactgcctatatttgctgcatttttttcattgtttattttccttttctcatggtggacatacaattttactgtttcattgcataacatggtagcatctgtgacttgaatgagcagcactttgcaacttcaaaacagatgcagtgaactgtggctgtatatgcatgctcattgtgtgaaggctagcctaacagaacaggaggtatcaaactagctgctatgtgcaaacagcgtccattttttcatattagaggtggaacctcaagaatgactttattcttgtatctcatctcaaaatattaataatttttttcccaaaagatggtatataccaagttaaagacagggtattataaatttagagtgattggtggtatattacggaaatacggaacctttagggatagttccgtgtaagggctttgatgccagcatccttggatcagtactgaactcagttccatccgtaaaatatgtaaagataagcaagatctaagaagttatcaaaactattctttaaaatgctaaagcaggtaactttttcttccattattttttcctcctaccactgagttttgtaatgaattccttgtgtatacaagcaatacaggtgaatactaaactgttatttttagcttcttcaaaagctattttagaaagcttcctggaaataaatgtcttctgtcatttaatttaaataaaaggagtgttaattgttcccaaatttgattacctagctgaaacagatattggattcagcatagtaatagtaaaataaaattggcagagaaaataactgtagactaggataaagcatgactcctccatagcattgttgcttgtatgtacatctgtcactccactgaaagggacctagtcactttaaagaggccttttatctcagcacgagatatccaagcgtgaatgctaaggcttgatgtttccattaggatttagcattcgagatttcagattttatttatagtcattgatgtgttttgctgtattataacacatttaaagggaaattttattatggtttttacatgtagtcatttcataaaaatatccagataggtaaatggaagttgtttgtttacagtaagttccttgagattttcagtactgtagttgccctggacattgagtacagttcagccttactctgtttttaagtagttgtgttgtcaatttcatgcttttaagtcctgatgatccttggagatgggagaaaaagataccagggataattaaaatccacagccagtttcatcagtttcctcatccatcctgcaaataaaaatgttaacaaggagccaaacttattcgttctggttttacaatttattttgaccgttttttgggtgaaaattgcaaacagccaagcaagtggctggaatgccccagtctaagaaattcaaaaacaatcactgagtaagccctaattacattttactcttgactccaggaaaagaaagcaagcttttatctaatctagagggaagtattcgtgagcaataaaaatcacttttttgagttgaataataatcagttaagaatatttaccgcatagcaacacaacatataaagatttgttacaagttgtttacagatgtttgactatttttgctgaagtattttagagtattgaatgtcttctctcttcaagtttctttcatgttcctaatttcagctcctgtagccagagatcacaggtcttccctgtgaaactttggtttctttctataaatgtgtgtggttttcagcgctcaactcctgtcttcaaatggtagtaagttctacttctacttctgtcattcagaacattttatgtcaaatgatgtaatgcagaaattcttgtgcatatttgtaactgaaggaagctttttagatttatttttgtttttaataaaattcagattcctattctaaaaaaaaaaaaaaaaaaaaaaaaaaggggggggcggctaaaaaataacctagagggcaagtttaagcgtaccaggtttttggtcaaaagggccctaaggggggaataaaaggagggaggggcgtacaacgtcggtgggaaacggcgttgggctttggaagagcttcttttggtggcgtttggaatctaagaattagctaggaataatacgttatggtacacgttctgggaatgcgtaa

SEQ ID NO: 735235 - DNA, 6701 bp, Homo sapiens
  misc_feature (5619)..(5619): n is a, c, g, or t
  misc_feature (5626)..(5626): n is a, c, g, or t
  misc_feature (5646)..(5648): n is a, c, g, or t
  misc_feature (5654)..(5654): n is a, c, g, or t
  misc_feature (5659)..(5659): n is a, c, g, or t
  misc_feature (5668)..(5668): n is a, c, g, or t
  misc_feature (5671)..(5672): n is a, c, g, or t
  misc_feature (5677)..(5677): n is a, c, g, or t
  misc_feature (5695)..(5695): n is a, c, g, or t
  misc_feature (5701)..(5702): n is a, c, g, or t
  misc_feature (5707)..(5708): n is a, c, g, or t
  misc_feature (5713)..(5713): n is a, c, g, or t
  misc_feature (5715)..(5715): n is a, c, g, or t
  misc_feature (5730)..(5730): n is a, c, g, or t
  misc_feature (5734)..(5735): n is a, c, g, or t
  misc_feature (5737)..(5738): n is a, c, g, or t
  misc_feature (5744)..(5744): n is a, c, g, or t
  misc_feature (5747)..(5748): n is a, c, g, or t
  misc_feature (5750)..(5751): n is a, c, g, or t
  misc_feature (5754)..(5755): n is a, c, g, or t
  misc_feature (5760)..(5760): n is a, c, g, or t
  misc_feature (5768)..(5768): n is a, c, g, or t
  misc_feature (5770)..(5770): n is a, c, g, or t
  misc_feature (5773)..(5773): n is a, c, g, or t
  misc_feature (5775)..(5775): n is a, c, g, or t
  misc_feature (5777)..(5778): n is a, c, g, or t
  misc_feature (5785)..(5785): n is a, c, g, or t
  misc_feature (5788)..(5788): n is a, c, g, or t
  misc_feature (5790)..(5790): n is a, c, g, or t
  misc_feature (5805)..(5806): n is a, c, g, or t
  misc_feature (5813)..(5813): n is a, c, g, or t
  misc_feature (5816)..(5816): n is a, c, g, or t
  misc_feature (5823)..(5823): n is a, c, g, or t
  misc_feature (5828)..(5828): n is a, c, g, or t
  misc_feature (5831)..(5831): n is a, c, g, or t
  misc_feature (5835)..(5835): n is a, c, g, or t
  misc_feature (5838)..(5838): n is a, c, g, or t
  misc_feature (5842)..(5842): n is a, c, g, or t
  misc_feature (5845)..(5845): n is a, c, g, or t
  misc_feature (5848)..(5848): n is a, c, g, or t
  misc_feature (5852)..(5852): n is a, c, g, or t
  misc_feature (5862)..(5862): n is a, c, g, or t
  misc_feature (5865)..(5865): n is a, c, g, or t
  misc_feature (5868)..(5868): n is a, c, g, or t
  misc_feature (5878)..(5878): n is a, c, g, or t
  misc_feature (5883)..(5883): n is a, c, g, or t
  misc_feature (5887)..(5887): n is a, c, g, or t
  misc_feature (5907)..(5907): n is a, c, g, or t
  misc_feature (5935)..(5935): n is a, c, g, or t
  misc_feature (5958)..(5958): n is a, c, g, or t
  misc_feature (5962)..(5962): n is a, c, g, or t
ctcgtaatccataacttgagatgaacacaccaaattataaatatcttattcacctaatccgtggaaagtttgtaacaccaaaatattaacttctgttcttgatcactcagcctccatagttattcatgttgcatgatctgattcgctcttttagaatttctcatagcgtcaggtactagctcaaaataacaggagcaactgcttctttccatatcccacattgaggaaaacacattttgcaagccgtcttaaagaaacaggtcaacttagtttagggatgaaacttaaaagtaagcttcgtcacaaaaaacacagttcaacaccacctcgcccggctgcaggcagctcagaggacaggaagtgaggccaagacatatttcacgcagcacagactaaaccccagcttttatctttcccgctggtccttaagggaccaaccgtactgattttccgtcatgttccgcgccacttccgttcgcgcactttaattacgtcaggcgtcctctctcgcggtatcatccggttgctgaggccctgtaataaaggtctcgcgaaatttgttctagaggtccaagtttgcttcttagcttactccaccccacccccaacctgtccctccttttctttccaagtcacaaaattctcccctcccctaccccggagtttacggccctcctcctgtttccgatttcagcccggaaccggaagtgtagtgggcggggcccgtcggcggaaaacgcagcggagccagagccggacacggctgtggccgctgcctctacccccgccacggatcgccgggtagtaggactgcgcggctccaggctgagggtcggtccggaggcgggtgggcgcgggtctcacccggattgtccgggtggcaccgttcccggccccaccgggcgccgcgagggatcatgtctacagcctctgccgcctcctcctcctcctcgtcttcggccggtgagatgatcgaagccccttcccaggtcctcaactttgaagagatcgactacaaggagatcgaggtggaagaggttgttggaagaggagcctttggagttgtttgcaaagctaagtggagagcaaaagatgttgctattaaacaaatagaaagtgaatctgagaggaaagcgtttattgtagagcttcggcagttatcccgtgtgaaccatcctaatattgtaaagctttatggagcctgcttgaatccagtgtgtcttgtgatggaatatgctgaagggggctctttatataatgtgctgcatggtgctgaaccattgccatattatactgctgcccacgcaatgagttggtgtttacagtgttcccaaggagtggcttatcttcacagcatgcaacccaaagcgctaattcacagggacctgaaaccaccaaacttactgctggttgcaggggggacagttctaaaaatttgtgattttggtacagcctgtgacattcagacacacatgaccaataacaaggggagtgctgcttggatggcacctgaagtttttgaaggtagtaattacagtgaaaaatgtgacgtcttcagctggggtattattctttgggaagtgataacgcgtcggaaaccctttgatgagattggtggcccagctttccgaatcatgtgggctgttcataatggtactcgaccaccactgataaaaaatttacctaagcccattgagagcctgatgactcgttgttggtctaaagatccttcccagcgcccttcaatggaggaaattgtgaaaataatgactcacttgatgcgggtataatccttcttttgaggggctttggatttaggggaatttaatatgtgctgagttttaatggaattttaaaagggatgttattactatattctgctttatatattgctatgttttctaagtgagaatgggcatttattactcatagtcagaagaggaaacatttcgagagggaaaatctagttctttatcactggaaagatggctagactaggtttctagacttgcttttttctttttgcttacattagtggacaagtatgtttgtctctgggcctgttgcctcatttgtaatgtgggagaaactgaaatagatagtctctaaagccatcacaggacttggatatattaatattatgacttcaatacatgataaactaaattttacatttttctgataccaattttcatcaagcatttagtcatttatgcaaggcaataggttgcattctcagacacatttatttgagtgacttttactatttggcctattttcaggtttttatatcccagtaaaaagttaaactttcttctatttagaagaacccttttaaatgattatcaaattttcctagtctgtgaatcaagcgcctttagaattatttggaatattttacgcctctggtttttggtacattaacaaaaactgtgaagtggtatcttggctttaaaaagttcaaatatctatgaaagtgcctgaattttgaaacagtttgttcagtagaagaatcttacaatctccttaaatatagactaagtaatttcctaaatggtaaaacgttgtttattcaatctattgaaaatttcttacgcaaagcagcttgaactaatctactaaaagtttaccatcgtatttggataccagtcatatatagaagcctaggccttaaaggtgtgtgcataagaaaacaacttagtctctgtagtcagattacttaaaactttaggatatataagttattgcagttgtaattttgcttctctgttccttgtctaatttgaggagaatacgtttcctttttttctctaaattctaacatttttgtccagcagatactttgagtattatgcctccagtttgtagaaagacattcataatctatcctcttaatatttaaaatgttctaacaattattctatggtatactagtctcagtcttcagactaacagtcactggaagtttacatcactactgtaagaacatgagtatgttttacataattatgagaaatgatactattttatttcatatgtttctctagagaaatatttgctgttttcttcaagactatctagactccaatgtaagctagattcttaggtaggtgcatggcattgatcaaagttgaaatccaagagtacattattgtaatctttgtaaaataaaaaacttaggcacctacaaatttagtatataacttagggaaaataaaacattaatcaggatttaatttgtattaaggaaattttaagctgtggtttacttttttatatatagtactttccaggagcagatgagccattacagtatccttgtcagtattcagatgaaggacagagcaactctgccaccagtacaggctcattcatggacattgcttctacaaatacgagtaacaaaagtgacactaatatggagcaagttcctgccacaaatgatactattaagcgcttagaatcaaaattgttgaaaaatcaggcaaagcaacagagtgaatctggacgtttaagcttgggagcctcccgtgggagcagtgtggagagcttgcccccaacctctgagggcaagaggatgagtgctgacatgtctgaaatagaagctaggatcgccgcaaccacagcctattccaagcctaaacggggccaccgtaaaactgcttcatttggcaacattctggatgtccctgagatcgtcatatcaggcaacggacagccaagacgtagatccatccaagacttgactgtaactggaacagaacctggtcaggtgagcagtaggtcatccagtcccagtgtcagaatgattactacctcaggaccaacctcagaaaagccaactcgaagtcatccatggacccctgatgattccacagataccaatggatcagataactccatcccaatggcttatcttacactggatcaccaactacaggcaagaactagttgcagaactggaccaggatgaaaaggaccagcaaaatacatctcgcctggtacaggaacataaaaagcttttagatgaaaacaaaagcctttctacttactaccagcaatgcaaaaaacaactagaggtcatcagaagtcagcagcagaaacgacaaggcacttcatgattctctgggaccgttacattttgaaatatgcaaagaaagactttttttttaaggaaaggaaaaccttataatgacgattcatgagtgttagctttttggcgtgttctgaatgccaactgcctatatttgctgcatttttttcattgtttattttccttttctcatggtggacatacaattttactgtttcattgcataacatggtagcatctgtgacttgaatgagcagcactttgcaacttcaaaacagatgcagtgaactgtggctgtatatgcatgctcattgtgtgaaggctagcctaacagaacaggaggtatcaaactagctgctatgtgcaaacagcgtccattttttcatattagaggtggaacctcaagaatgactttattcttgtatctcatctcaaaatattaataatttttttcccaaaagatggtatataccaagttaaagacagggtattataaatttagagtgattggtggtatattacggaaatacggaacctttagggatagttccgtgtaagggctttgatgccagcatccttggatcagtactgaactcagttccatccgtaaaatatgtaaagataagcaagatctaagaagttatcaaaactattctttaaaatgctaaagcaggtaactttttcttccattattttttcctcctaccactgagttttgtaatgaattccttgtgtatacaagcaatacaggtgaatactaaactgttatttttagcttcttcaaaagctattttagaaagcttcctggaaataaatgtcttctgtcatttaatttaaataaaaggagtgttaattgttcccaaatttgattacctagctgaaacagatattggattcagcatagtaatagtaaaataaaattggcagagaaaataactgtagactaggataaagcatgactcctccatagcattgttgcttgtatgtacatctgtcactccactgaaagggacctagtcactttaaagaggccttttatctcagcacgagatatccaagcgtgaatgctaaggcttgatgtttccattaggatttagcattcgagatttcagattttatttatagtcattgatgtgttttgctgtattataacacatttaaagggaaattttattatggtttttacatgtagtcatttcataaaaatatccagataggtaaatggaagttgtttgtttacagtaagttccttgagattttcagtactgtagttgccctggacattgagtacagttcagccttactctgtttttaagtagttgtgttgtcaatttcatgcttttaagtcctgatgatccttggagatgggagaaaaagataccagggataattaaaatccacagccagtttcatcagtttcctcatccatcctgcaaataaaaatgttaacaaggagccaaacttattcgttctggttttacaatttattttgaccgttttttgggtgaaaattgcaaacagccacncccgtcncccccccgcccccgcccaannnaccccnacccnacccccgcncannccccnaccccccccccccccccncccccnnccccnnacccncncccccacccaacccngagnnanncacccncgnncnnccnnaaccncccccccnanccnancnncaaccanccnanaacacccaccccacnncaacacnacncacaaanacccnccncaanccncccncanacncccnaccacccccnccnaancaccccagancaccnaacnccccccccccccaagccccntccatgcccccaatcccagcccccgcanccagagaccacaggccccccccncganaccctggcccccccccataaatgtgtgtggttttcagcgctcaactcctgtcttcaaatggtagtaagttctacttctacttctgtcattcagaacattttatgtcaaatgatgtaatgcagaaattcttgtgcatatttgtaactgaaggaagctttttagatttatttttgtttttaataaaattcagattcctattctaaactggtacataaaagtggtgaatgacttgtatcagcaaatgagctgcgaagtgttctgctctagcaccgtgtttaccttacacagaacctactaaaaactgaaatgtcacttttgtacgataatcatggtttttaagaggctgggtaattggccagttaacacatcatctcttgcatttcaaaattttgtgttaaatggagctcttcacaatttcatgagtcctaatttgtgtgaagcacaacacgtcatacattgctaagtgattcttctcatcagaaagctgatttcttagagtatttctaagttaaattaggtatttcattcctttatcaacctgctggctttccaaccctaacatatgcacacattcttataaactctaccttcattttagtaaatccatccattcatttgctcattcttttaataaatatttgtttatcatatattataaactgcactgctattaccaataccaagttacatgtccattccagtcacacagtagtttgatggtattcccatcttacagatg

SEQ ID NO: 735236 - DNA, 6402 bp, Homo sapiens
  misc_feature (5619)..(5619): n is a, c, g, or t
  misc_feature (5626)..(5626): n is a, c, g, or t
  misc_feature (5646)..(5648): n is a, c, g, or t
  misc_feature (5654)..(5654): n is a, c, g, or t
  misc_feature (5659)..(5659): n is a, c, g, or t
  misc_feature (5668)..(5668): n is a, c, g, or t
  misc_feature (5671)..(5672): n is a, c, g, or t
  misc_feature (5677)..(5677): n is a, c, g, or t
  misc_feature (5695)..(5695): n is a, c, g, or t
  misc_feature (5701)..(5702): n is a, c, g, or t
  misc_feature (5707)..(5708): n is a, c, g, or t
  misc_feature (5713)..(5713): n is a, c, g, or t
  misc_feature (5715)..(5715): n is a, c, g, or t
  misc_feature (5730)..(5730): n is a, c, g, or t
  misc_feature (5734)..(5735): n is a, c, g, or t
  misc_feature (5737)..(5738): n is a, c, g, or t
  misc_feature (5744)..(5744): n is a, c, g, or t
  misc_feature (5747)..(5748): n is a, c, g, or t
  misc_feature (5750)..(5751): n is a, c, g, or t
  misc_feature (5754)..(5755): n is a, c, g, or t
  misc_feature (5760)..(5760): n is a, c, g, or t
  misc_feature (5768)..(5768): n is a, c, g, or t
  misc_feature (5770)..(5770): n is a, c, g, or t
  misc_feature (5773)..(5773): n is a, c, g, or t
  misc_feature (5775)..(5775): n is a, c, g, or t
  misc_feature (5777)..(5778): n is a, c, g, or t
  misc_feature (5785)..(5785): n is a, c, g, or t
  misc_feature (5788)..(5788): n is a, c, g, or t
  misc_feature (5790)..(5790): n is a, c, g, or t
  misc_feature (5805)..(5806): n is a, c, g, or t
  misc_feature (5813)..(5813): n is a, c, g, or t
  misc_feature (5816)..(5816): n is a, c, g, or t
  misc_feature (5823)..(5823): n is a, c, g, or t
  misc_feature (5828)..(5828): n is a, c, g, or t
  misc_feature (5831)..(5831): n is a, c, g, or t
  misc_feature (5835)..(5835): n is a, c, g, or t
  misc_feature (5838)..(5838): n is a, c, g, or t
  misc_feature (5842)..(5842): n is a, c, g, or t
  misc_feature (5845)..(5845): n is a, c, g, or t
  misc_feature (5848)..(5848): n is a, c, g, or t
  misc_feature (5852)..(5852): n is a, c, g, or t
  misc_feature (5862)..(5862): n is a, c, g, or t
  misc_feature (5865)..(5865): n is a, c, g, or t
  misc_feature (5868)..(5868): n is a, c, g, or t
  misc_feature (5878)..(5878): n is a, c, g, or t
  misc_feature (5883)..(5883): n is a, c, g, or t
  misc_feature (5887)..(5887): n is a, c, g, or t
  misc_feature (5907)..(5907): n is a, c, g, or t
  misc_feature (5935)..(5935): n is a, c, g, or t
  misc_feature (5958)..(5958): n is a, c, g, or t
  misc_feature (5962)..(5962): n is a, c, g, or t
ctcgtaatccataacttgagatgaacacaccaaattataaatatcttattcacctaatccgtggaaagtttgtaacaccaaaatattaacttctgttcttgatcactcagcctccatagttattcatgttgcatgatctgattcgctcttttagaatttctcatagcgtcaggtactagctcaaaataacaggagcaactgcttctttccatatcccacattgaggaaaacacattttgcaagccgtcttaaagaaacaggtcaacttagtttagggatgaaacttaaaagtaagcttcgtcacaaaaaacacagttcaacaccacctcgcccggctgcaggcagctcagaggacaggaagtgaggccaagacatatttcacgcagcacagactaaaccccagcttttatctttcccgctggtccttaagggaccaaccgtactgattttccgtcatgttccgcgccacttccgttcgcgcactttaattacgtcaggcgtcctctctcgcggtatcatccggttgctgaggccctgtaataaaggtctcgcgaaatttgttctagaggtccaagtttgcttcttagcttactccaccccacccccaacctgtccctccttttctttccaagtcacaaaattctcccctcccctaccccggagtttacggccctcctcctgtttccgatttcagcccggaaccggaagtgtagtgggcggggcccgtcggcggaaaacgcagcggagccagagccggacacggctgtggccgctgcctctacccccgccacggatcgccgggtagtaggactgcgcggctccaggctgagggtcggtccggaggcgggtgggcgcgggtctcacccggattgtccgggtggcaccgttcccggccccaccgggcgccgcgagggatcatgtctacagcctctgccgcctcctcctcctcctcgtcttcggccggtgagatgatcgaagccccttcccaggtcctcaactttgaagagatcgactacaaggagatcgaggtggaagaggttgttggaagaggagcctttggagttgtttgcaaagctaagtggagagcaaaagatgttgctattaaacaaatagaaagtgaatctgagaggaaagcgtttattgtagagcttcggcagttatcccgtgtgaaccatcctaatattgtaaagctttatggagcctgcttgaatccagtgtgtcttgtgatggaatatgctgaagggggctctttatataatgtgctgcatggtgctgaaccattgccatattatactgctgcccacgcaatgagttggtgtttacagtgttcccaaggagtggcttatcttcacagcatgcaacccaaagcgctaattcacagggacctgaaaccaccaaacttactgctggttgcaggggggacagttctaaaaatttgtgattttggtacagcctgtgacattcagacacacatgaccaataacaaggggagtgctgcttggatggcacctgaagtttttgaaggtagtaattacagtgaaaaatgtgacgtcttcagctggggtattattctttgggaagtgataacgcgtcggaaaccctttgatgagattggtggcccagctttccgaatcatgtgggctgttcataatggtactcgaccaccactgataaaaaatttacctaagcccattgagagcctgatgactcgttgttggtctaaagatccttcccagcgcccttcaatggaggaaattgtgaaaataatgactcacttgatgcgggtataatccttcttttgaggggctttggatttaggggaatttaatatgtgctgagttttaatggaattttaaaagggatgttattactatattctgctttatatattgctatgttttctaagtgagaatgggcatttattactcatagtcagaagaggaaacatttcgagagggaaaatctagttctttatcactggaaagatggctagactaggtttctagacttgcttttttctttttgcttacattagtggacaagtatgtttgtctctgggcctgttgcctcatttgtaatgtgggagaaactgaaatagatagtctctaaagccatcacaggacttggatatattaatattatgacttcaatacatgataaactaaattttacatttttctgataccaattttcatcaagcatttagtcatttatgcaaggcaataggttgcattctcagacacatttatttgagtgacttttactatttggcctattttcaggtttttatatcccagtaaaaagttaaactttcttctatttagaagaacccttttaaatgattatcaaattttcctagtctgtgaatcaagcgcctttagaattatttggaatattttacgcctctggtttttggtacattaacaaaaactgtgaagtggtatcttggctttaaaaagttcaaatatctatgaaagtgcctgaattttgaaacagtttgttcagtagaagaatcttacaatctccttaaatatagactaagtaatttcctaaatggtaaaacgttgtttattcaatctattgaaaatttcttacgcaaagcagcttgaactaatctactaaaagtttaccatcgtatttggataccagtcatatatagaagcctaggccttaaaggtgtgtgcataagaaaacaacttagtctctgtagtcagattacttaaaactttaggatatataagttattgcagttgtaattttgcttctctgttccttgtctaatttgaggagaatacgtttcctttttttctctaaattctaacatttttgtccagcagatactttgagtattatgcctccagtttgtagaaagacattcataatctatcctcttaatatttaaaatgttctaacaattattctatggtatactagtctcagtcttcagactaacagtcactggaagtttacatcactactgtaagaacatgagtatgttttacataattatgagaaatgatactattttatttcatatgtttctctagagaaatatttgctgttttcttcaagactatctagactccaatgtaagctagattcttaggtaggtgcatggcattgatcaaagttgaaatccaagagtacattattgtaatctttgtaaaataaaaaacttaggcacctacaaatttagtatataacttagggaaaataaaacattaatcaggatttaatttgtattaaggaaattttaagctgtggtttacttttttatatatagtactttccaggagcagatgagccattacagtatccttgtcagtattcagatgaaggacagagcaactctgccaccagtacaggctcattcatggacattgcttctacaaatacgagtaacaaaagtgacactaatatggagcaagttcctgccacaaatgatactattaagcgcttagaatcaaaattgttgaaaaatcaggcaaagcaacagagtgaatctggacgtttaagcttgggagcctcccgtgggagcagtgtggagagcttgcccccaacctctgagggcaagaggatgagtgctgacatgtctgaaatagaagctaggatcgccgcaaccacagcctattccaagcctaaacggggccaccgtaaaactgcttcatttggcaacattctggatgtccctgagatcgtcatatcaggcaacggacagccaagacgtagatccatccaagacttgactgtaactggaacagaacctggtcaggtgagcagtaggtcatccagtcccagtgtcagaatgattactacctcaggaccaacctcagaaaagccaactcgaagtcatccatggacccctgatgattccacagataccaatggatcagataactccatcccaatggcttatcttacactggatcaccaactacaggcaagaactagttgcagaactggaccaggatgaaaaggaccagcaaaatacatctcgcctggtacaggaacataaaaagcttttagatgaaaacaaaagcctttctacttactaccagcaatgcaaaaaacaactagaggtcatcagaagtcagcagcagaaacgacaaggcacttcatgattctctgggaccgttacattttgaaatatgcaaagaaagactttttttttaaggaaaggaaaaccttataatgacgattcatgagtgttagctttttggcgtgttctgaatgccaactgcctatatttgctgcatttttttcattgtttattttccttttctcatggtggacatacaattttactgtttcattgcataacatggtagcatctgtgacttgaatgagcagcactttgcaacttcaaaacagatgcagtgaactgtggctgtatatgcatgctcattgtgtgaaggctagcctaacagaacaggaggtatcaaactagctgctatgtgcaaacagcgtccattttttcatattagaggtggaacctcaagaatgactttattcttgtatctcatctcaaaatattaataatttttttcccaaaagatggtatataccaagttaaagacagggtattataaatttagagtgattggtggtatattacggaaatacggaacctttagggatagttccgtgtaagggctttgatgccagcatccttggatcagtactgaactcagttccatccgtaaaatatgtaaagataagcaagatctaagaagttatcaaaactattctttaaaatgctaaagcaggtaactttttcttccattattttttcctcctaccactgagttttgtaatgaattccttgtgtatacaagcaatacaggtgaatactaaactgttatttttagcttcttcaaaagctattttagaaagcttcctggaaataaatgtcttctgtcatttaatttaaataaaaggagtgttaattgttcccaaatttgattacctagctgaaacagatattggattcagcatagtaatagtaaaataaaattggcagagaaaataactgtagactaggataaagcatgactcctccatagcattgttgcttgtatgtacatctgtcactccactgaaagggacctagtcactttaaagaggccttttatctcagcacgagatatccaagcgtgaatgctaaggcttgatgtttccattaggatttagcattcgagatttcagattttatttatagtcattgatgtgttttgctgtattataacacatttaaagggaaattttattatggtttttacatgtagtcatttcataaaaatatccagataggtaaatggaagttgtttgtttacagtaagttccttgagattttcagtactgtagttgccctggacattgagtacagttcagccttactctgtttttaagtagttgtgttgtcaatttcatgcttttaagtcctgatgatccttggagatgggagaaaaagataccagggataattaaaatccacagccagtttcatcagtttcctcatccatcctgcaaataaaaatgttaacaaggagccaaacttattcgttctggttttacaatttattttgaccgttttttgggtgaaaattgcaaacagccacncccgtcncccccccgcccccgcccaannnaccccnacccnacccccgcncannccccnaccccccccccccccccncccccnnccccnnacccncncccccacccaacccngagnnanncacccncgnncnnccnnaaccncccccccnanccnancnncaaccanccnanaacacccaccccacnncaacacnacncacaaanacccnccncaanccncccncanacncccnaccacccccnccnaancaccccagancaccnaacnccccccccccccaagccccntccatgcccccaatcccagcccccgcanccagagaccacaggccccccccncganaccctggcccccccccataaatgtgtgtggttttcagcgctcaactcctgtcttcaaatggtagtaagttctacttctacttctgtcattcagaacattttatgtcaaatgatgtaatgcagaaattcttgtgcatatttgtaactgaaggaagctttttagatttatttttgtttttaataaaattcagattcctattctaaaaaaaaaaaaaaaaaaaaaaaaaaggggggggcggctaaaaaataacctagagggcaagtttaagcgtaccaggtttttggtcaaaagggccctaaggggggaataaaaggagggaggggcgtacaacgtcggtgggaaacggcgttgggctttggaagagcttcttttggtggcgtttggaatctaagaattagctaggaataatacgttatggtacacgttctgggaatgcgtaa

SEQ ID NO: 735237 - DNA, 5545 bp, Homo sapiens
ctcgtaatccataacttgagatgaacacaccaaattataaatatcttattcacctaatccgtggaaagtttgtaacaccaaaatattaacttctgttcttgatcactcagcctccatagttattcatgttgcatgatctgattcgctcttttagaatttctcatagcgtcaggtactagctcaaaataacaggagcaactgcttctttccatatcccacattgaggaaaacacattttgcaagccgtcttaaagaaacaggtcaacttagtttagggatgaaacttaaaagtaagcttcgtcacaaaaaacacagttcaacaccacctcgcccggctgcaggcagctcagaggacaggaagtgaggccaagacatatttcacgcagcacagactaaaccccagcttttatctttcccgctggtccttaagggaccaaccgtactgattttccgtcatgttccgcgccacttccgttcgcgcactttaattacgtcaggcgtcctctctcgcggtatcatccggttgctgaggccctgtaataaaggtctcgcgaaatttgttctagaggtccaagtttgcttcttagcttactccaccccacccccaacctgtccctccttttctttccaagtcacaaaattctcccctcccctaccccggagtttacggccctcctcctgtttccgatttcagcccggaaccggaagtgtagtgggcggggcccgtcggcggaaaacgcagcggagccagagccggacacggctgtggccgctgcctctacccccgccacggatcgccgggtagtaggactgcgcggctccaggctgagggtcggtccggaggcgggtgggcgcgggtctcacccggattgtccgggtggcaccgttcccggccccaccgggcgccgcgagggatcatgtctacagcctctgccgcctcctcctcctcctcgtcttcggccggtgagatgatcgaagccccttcccaggtcctcaactttgaagagatcgactacaaggagatcgaggtggaagaggttgttggaagaggagcctttggagttgtttgcaaagctaagtggagagcaaaagatgttgctattaaacaaatagaaagtgaatctgagaggaaagcgtttattgtagagcttcggcagttatcccgtgtgaaccatcctaatattgtaaagctttatggagcctgcttgaatccagtgtgtcttgtgatggaatatgctgaagggggctctttatataatgtgctgcatggtgctgaaccattgccatattatactgctgcccacgcaatgagttggtgtttacagtgttcccaaggagtggcttatcttcacagcatgcaacccaaagcgctaattcacagggacctgaaaccaccaaacttactgctggttgcaggggggacagttctaaaaatttgtgattttggtacagcctgtgacattcagacacacatgaccaataacaaggggagtgctgcttggatggcacctgaagtttttgaaggtagtaattacagtgaaaaatgtgacgtcttcagctggggtattattctttgggaagtgataacgcgtcggaaaccctttgatgagattggtggcccagctttccgaatcatgtgggctgttcataatggtactcgaccaccactgataaaaaatttacctaagcccattgagagcctgatgactcgttgttggtctaaagatccttcccagcgcccttcaatggaggaaattgtgaaaataatgactcacttgatgcgggtataatccttcttttgaggggctttggatttaggggaatttaatatgtgctgagttttaatggaattttaaaagggatgttattactatattctgctttatatattgctatgttttctaagtgagaatgggcatttattactcatagtcagaagaggaaacatttcgagagggaaaatctagttctttatcactggaaagatggctagactaggtttctagacttgcttttttctttttgcttacattagtggacaagtatgtttgtctctgggcctgttgcctcatttgtaatgtgggagaaactgaaatagatagtctctaaagccatcacaggacttggatatattaatattatgacttcaatacatgataaactaaattttacatttttctgataccaattttcatcaagcatttagtcatttatgcaaggcaataggttgcattctcagacacatttatttgagtgacttttactatttggcctattttcaggtttttatatcccagtaaaaagttaaactttcttctatttagaagaacccttttaaatgattatcaaattttcctagtctgtgaatcaagcgcctttagaattatttggaatattttacgcctctggtttttggtacattaacaaaaactgtgaagtggtatcttggctttaaaaagttcaaatatctatgaaagtgcctgaattttgaaacagtttgttcagtagaagaatcttacaatctccttaaatatagactaagtaatttcctaaatggtaaaacgttgtttattcaatctattgaaaatttcttacgcaaagcagcttgaactaatctactaaaagtttaccatcgtatttggataccagtcatatatagaagcctaggccttaaaggtgtgtgcataagaaaacaacttagtctctgtagtcagattacttaaaactttaggatatataagttattgcagttgtaattttgcttctctgttccttgtctaatttgaggagaatacgtttcctttttttctctaaattctaacatttttgtccagcagatactttgagtattatgcctccagtttgtagaaagacattcataatctatcctcttaatatttaaaatgttctaacaattattctatggtatactagtctcagtcttcagactaacagtcactggaagtttacatcactactgtaagaacatgagtatgttttacataattatgagaaatgatactattttatttcatatgtttctctagagaaatatttgctgttttcttcaagactatctagactccaatgtaagctagattcttaggtaggtgcatggcattgatcaaagttgaaatccaagagtacattattgtaatctttgtaaaataaaaaacttaggcacctacaaatttagtatataacttagggaaaataaaacattaatcaggatttaatttgtattaaggaaattttaagctgtggtttacttttttatatatagtactttccaggagcagatgagccattacagtatccttgtcagtattcagatgaaggacagagcaactctgccaccagtacaggctcattcatggacattgcttctacaaatacgagtaacaaaagtgacactaatatggagcaagttcctgccacaaatgatactattaagcgcttagaatcaaaattgttgaaaaatcaggcaaagcaacagagtgaatctggacgtttaagcttgggagcctcccgtgggagcagtgtggagagcttgcccccaacctctgagggcaagaggatgagtgctgacatgtctgaaatagaagctaggatcgccgcaaccacagcctattccaagcctaaacggggccaccgtaaaactgcttcatttggcaacattctggatgtccctgagatcgtcatatcaggcaacggacagccaagacgtagatccatccaagacttgactgtaactggaacagaacctggtcaggtgagcagtaggtcatccagtcccagtgtcagaatgattactacctcaggaccaacctcagaaaagccaactcgaagtcatccatggacccctgatgattccacagataccaatggatcagataactccatcccaatggcttatcttacactggatcaccaactacaggcaagaactagttgcagaactggaccaggatgaaaaggaccagcaaaatacatctcgcctggtacaggaacataaaaagcttttagatgaaaacaaaagcctttctacttactaccagcaatgcaaaaaacaactagaggtcatcagaagtcagcagcagaaacgacaaggcacttcatgattctctgggaccgttacattttgaaatatgcaaagaaagactttttttttaaggaaaggaaaaccttataatgacgattcatgagtgttagctttttggcgtgttctgaatgccaactgcctatatttgctgcatttttttcattgtttattttccttttctcatggtggacatacaattttactgtttcattgcataacatggtagcatctgtgacttgaatgagcagcactttgcaacttcaaaacagatgcagtgaactgtggctgtatatgcatgctcattgtgtgaaggctagcctaacagaacaggaggtatcaaactagctgctatgtgcaaacagcgtccattttttcatattagaggtggaacctcaagaatgactttattcttgtatctcatctcaaaatattaataatttttttcccaaaagatggtatataccaagttaaagacagggtattataaatttagagtgattggtggtatattacggaaatacggaacctttagggatagttccgtgtaagggctttgatgccagcatccttggatcagtactgaactcagttccatccgtaaaatatgtaaagataagcaagatctaagaagttatcaaaactattctttaaaatgctaaagcaggtaactttttcttccattattttttcctcctaccactgagttttgtaatgaattccttgtgtatacaagcaatacaggtgaatactaaactgttatttttagcttcttcaaaagctattttagaaagcttcctggaaataaatgtcttctgtcatttaatttaaataaaaggagtgttaattgttcccaaatttgattacctagctgaaacagatattggattcagcatagtaatagtaaaataaaattggcagagaaaataactgtagactaggataaagcatgactcctccatagcattgttgcttgtatgtacatctgtcactccactgaaagggacctagtcactttaaagaggccttttatctcagcacgagatatccaagcgtgaatgctaaggcttgatgtttccattaggatttagcattcgagatttcagattttatttatagtcattgatgtgttttgctgtattataacacatttaaagggaaattttattatggtttttacatgtagtcatttcataaaaatatccagataggtaaatggaagttgtttgtttacagtaagttccttgagattttcagtactgtagttgccctggacattgagtacagttcagccttactctgtttttaagtagttgtgttgtcaatttcatgcttttaagtcctgatgatccttggagatgggagaaaaagataccagggataattaaaatccacagccagtttcatcagtttcctcatccatccgtcgacgcggccgcgaattta

SEQ ID NO: 735238 - DNA, 5541 bp, Homo sapiens
ctcgtaatccataacttgagatgaacacaccaaattataaatatcttattcacctaatccgtggaaagtttgtaacaccaaaatattaacttctgttcttgatcactcagcctccatagttattcatgttgcatgatctgattcgctcttttagaatttctcatagcgtcaggtactagctcaaaataacaggagcaactgcttctttccatatcccacattgaggaaaacacattttgcaagccgtcttaaagaaacaggtcaacttagtttagggatgaaacttaaaagtaagcttcgtcacaaaaaacacagttcaacaccacctcgcccggctgcaggcagctcagaggacaggaagtgaggccaagacatatttcacgcagcacagactaaaccccagcttttatctttcccgctggtccttaagggaccaaccgtactgattttccgtcatgttccgcgccacttccgttcgcgcactttaattacgtcaggcgtcctctctcgcggtatcatccggttgctgaggccctgtaataaaggtctcgcgaaatttgttctagaggtccaagtttgcttcttagcttactccaccccacccccaacctgtccctccttttctttccaagtcacaaaattctcccctcccctaccccggagtttacggccctcctcctgtttccgatttcagcccggaaccggaagtgtagtgggcggggcccgtcggcggaaaacgcagcggagccagagccggacacggctgtggccgctgcctctacccccgccacggatcgccgggtagtaggactgcgcggctccaggctgagggtcggtccggaggcgggtgggcgcgggtctcacccggattgtccgggtggcaccgttcccggccccaccgggcgccgcgagggatcatgtctacagcctctgccgcctcctcctcctcctcgtcttcggccggtgagatgatcgaagccccttcccaggtcctcaactttgaagagatcgactacaaggagatcgaggtggaagaggttgttggaagaggagcctttggagttgtttgcaaagctaagtggagagcaaaagatgttgctattaaacaaatagaaagtgaatctgagaggaaagcgtttattgtagagcttcggcagttatcccgtgtgaaccatcctaatattgtaaagctttatggagcctgcttgaatccagtgtgtcttgtgatggaatatgctgaagggggctctttatataatgtgctgcatggtgctgaaccattgccatattatactgctgcccacgcaatgagttggtgtttacagtgttcccaaggagtggcttatcttcacagcatgcaacccaaagcgctaattcacagggacctgaaaccaccaaacttactgctggttgcaggggggacagttctaaaaatttgtgattttggtacagcctgtgacattcagacacacatgaccaataacaaggggagtgctgcttggatggcacctgaagtttttgaaggtagtaattacagtgaaaaatgtgacgtcttcagctggggtattattctttgggaagtgataacgcgtcggaaaccctttgatgagattggtggcccagctttccgaatcatgtgggctgttcataatggtactcgaccaccactgataaaaaatttacctaagcccattgagagcctgatgactcgttgttggtctaaagatccttcccagcgcccttcaatggaggaaattgtgaaaataatgactcacttgatgcgggtataatccttcttttgaggggctttggatttaggggaatttaatatgtgctgagttttaatggaattttaaaagggatgttattactatattctgctttatatattgctatgttttctaagtgagaatgggcatttattactcatagtcagaagaggaaacatttcgagagggaaaatctagttctttatcactggaaagatggctagactaggtttctagacttgcttttttctttttgcttacattagtggacaagtatgtttgtctctgggcctgttgcctcatttgtaatgtgggagaaactgaaatagatagtctctaaagccatcacaggacttggatatattaatattatgacttcaatacatgataaactaaattttacatttttctgataccaattttcatcaagcatttagtcatttatgcaaggcaataggttgcattctcagacacatttatttgagtgacttttactatttggcctattttcaggtttttatatcccagtaaaaagttaaactttcttctatttagaagaacccttttaaatgattatcaaattttcctagtctgtgaatcaagcgcctttagaattatttggaatattttacgcctctggtttttggtacattaacaaaaactgtgaagtggtatcttggctttaaaaagttcaaatatctatgaaagtgcctgaattttgaaacagtttgttcagtagaagaatcttacaatctccttaaatatagactaagtaatttcctaaatggtaaaacgttgtttattcaatctattgaaaatttcttacgcaaagcagcttgaactaatctactaaaagtttaccatcgtatttggataccagtcatatatagaagcctaggccttaaaggtgtgtgcataagaaaacaacttagtctctgtagtcagattacttaaaactttaggatatataagttattgcagttgtaattttgcttctctgttccttgtctaatttgaggagaatacgtttcctttttttctctaaattctaacatttttgtccagcagatactttgagtattatgcctccagtttgtagaaagacattcataatctatcctcttaatatttaaaatgttctaacaattattctatggtatactagtctcagtcttcagactaacagtcactggaagtttacatcactactgtaagaacatgagtatgttttacataattatgagaaatgatactattttatttcatatgtttctctagagaaatatttgctgttttcttcaagactatctagactccaatgtaagctagattcttaggtaggtgcatggcattgatcaaagttgaaatccaagagtacattattgtaatctttgtaaaataaaaaacttaggcacctacaaatttagtatataacttagggaaaataaaacattaatcaggatttaatttgtattaaggaaattttaagctgtggtttacttttttatatatagtactttccaggagcagatgagccattacagtatccttgtcagtattcagatgaaggacagagcaactctgccaccagtacaggctcattcatggacattgcttctacaaatacgagtaacaaaagtgacactaatatggagcaagttcctgccacaaatgatactattaagcgcttagaatcaaaattgttgaaaaatcaggcaaagcaacagagtgaatctggacgtttaagcttgggagcctcccgtgggagcagtgtggagagcttgcccccaacctctgagggcaagaggatgagtgctgacatgtctgaaatagaagctaggatcgccgcaaccacagcctattccaagcctaaacggggccaccgtaaaactgcttcatttggcaacattctggatgtccctgagatcgtcatatcaggcaacggacagccaagacgtagatccatccaagacttgactgtaactggaacagaacctggtcaggtgagcagtaggtcatccagtcccagtgtcagaatgattactacctcaggaccaacctcagaaaagccaactcgaagtcatccatggacccctgatgattccacagataccaatggatcagataactccatcccaatggcttatcttacactggatcaccaactacaggcaagaactagttgcagaactggaccaggatgaaaaggaccagcaaaatacatctcgcctggtacaggaacataaaaagcttttagatgaaaacaaaagcctttctacttactaccagcaatgcaaaaaacaactagaggtcatcagaagtcagcagcagaaacgacaaggcacttcatgattctctgggaccgttacattttgaaatatgcaaagaaagactttttttttaaggaaaggaaaaccttataatgacgattcatgagtgttagctttttggcgtgttctgaatgccaactgcctatatttgctgcatttttttcattgtttattttccttttctcatggtggacatacaattttactgtttcattgcataacatggtagcatctgtgacttgaatgagcagcactttgcaacttcaaaacagatgcagtgaactgtggctgtatatgcatgctcattgtgtgaaggctagcctaacagaacaggaggtatcaaactagctgctatgtgcaaacagcgtccattttttcatattagaggtggaacctcaagaatgactttattcttgtatctcatctcaaaatattaataatttttttcccaaaagatggtatataccaagttaaagacagggtattataaatttagagtgattggtggtatattacggaaatacggaacctttagggatagttccgtgtaagggctttgatgccagcatccttggatcagtactgaactcagttccatccgtaaaatatgtaaagataagcaagatctaagaagttatcaaaactattctttaaaatgctaaagcagctcctgtagccagagatcacaggtcttccctgtgaaactttggtttctttctataaatgtgtgtggttttcagcgctcaactcctgtcttcaaatggtagtaagttctacttctacttctgtcattcagaacattttatgtcaaatgatgtaatgcagaaattcttgtgcatatttgtaactgaaggaagctttttagatttatttttgtttttaataaaattcagattcctattctaaactggtacataaaagtggtgaatgacttgtatcagcaaatgagctgcgaagtgttctgctctagcaccgtgtttaccttacacagaacctactaaaaactgaaatgtcacttttgtacgataatcatggtttttaagaggctgggtaattggccagttaacacatcatctcttgcatttcaaaattttgtgttaaatggagctcttcacaatttcatgagtcctaatttgtgtgaagcacaacacgtcatacattgctaagtgattcttctcatcagaaagctgatttcttagagtatttctaagttaaattaggtatttcattcctttatcaacctgctggctttccaaccctaacatatgcacacattcttataaactctaccttcattttagtaaatccatccattcatttgctcattcttttaataaatatttgtttatcatatattataaactgcactgctattaccaataccaagttacatgtccattccagtcacacagtagtttgatggtattcccatcttacagatg

SEQ ID NO: 735239 - DNA, 5242 bp, Homo sapiens
ctcgtaatccataacttgagatgaacacaccaaattataaatatcttattcacctaatccgtggaaagtttgtaacaccaaaatattaacttctgttcttgatcactcagcctccatagttattcatgttgcatgatctgattcgctcttttagaatttctcatagcgtcaggtactagctcaaaataacaggagcaactgcttctttccatatcccacattgaggaaaacacattttgcaagccgtcttaaagaaacaggtcaacttagtttagggatgaaacttaaaagtaagcttcgtcacaaaaaacacagttcaacaccacctcgcccggctgcaggcagctcagaggacaggaagtgaggccaagacatatttcacgcagcacagactaaaccccagcttttatctttcccgctggtccttaagggaccaaccgtactgattttccgtcatgttccgcgccacttccgttcgcgcactttaattacgtcaggcgtcctctctcgcggtatcatccggttgctgaggccctgtaataaaggtctcgcgaaatttgttctagaggtccaagtttgcttcttagcttactccaccccacccccaacctgtccctccttttctttccaagtcacaaaattctcccctcccctaccccggagtttacggccctcctcctgtttccgatttcagcccggaaccggaagtgtagtgggcggggcccgtcggcggaaaacgcagcggagccagagccggacacggctgtggccgctgcctctacccccgccacggatcgccgggtagtaggactgcgcggctccaggctgagggtcggtccggaggcgggtgggcgcgggtctcacccggattgtccgggtggcaccgttcccggccccaccgggcgccgcgagggatcatgtctacagcctctgccgcctcctcctcctcctcgtcttcggccggtgagatgatcgaagccccttcccaggtcctcaactttgaagagatcgactacaaggagatcgaggtggaagaggttgttggaagaggagcctttggagttgtttgcaaagctaagtggagagcaaaagatgttgctattaaacaaatagaaagtgaatctgagaggaaagcgtttattgtagagcttcggcagttatcccgtgtgaaccatcctaatattgtaaagctttatggagcctgcttgaatccagtgtgtcttgtgatggaatatgctgaagggggctctttatataatgtgctgcatggtgctgaaccattgccatattatactgctgcccacgcaatgagttggtgtttacagtgttcccaaggagtggcttatcttcacagcatgcaacccaaagcgctaattcacagggacctgaaaccaccaaacttactgctggttgcaggggggacagttctaaaaatttgtgattttggtacagcctgtgacattcagacacacatgaccaataacaaggggagtgctgcttggatggcacctgaagtttttgaaggtagtaattacagtgaaaaatgtgacgtcttcagctggggtattattctttgggaagtgataacgcgtcggaaaccctttgatgagattggtggcccagctttccgaatcatgtgggctgttcataatggtactcgaccaccactgataaaaaatttacctaagcccattgagagcctgatgactcgttgttggtctaaagatccttcccagcgcccttcaatggaggaaattgtgaaaataatgactcacttgatgcgggtataatccttcttttgaggggctttggatttaggggaatttaatatgtgctgagttttaatggaattttaaaagggatgttattactatattctgctttatatattgctatgttttctaagtgagaatgggcatttattactcatagtcagaagaggaaacatttcgagagggaaaatctagttctttatcactggaaagatggctagactaggtttctagacttgcttttttctttttgcttacattagtggacaagtatgtttgtctctgggcctgttgcctcatttgtaatgtgggagaaactgaaatagatagtctctaaagccatcacaggacttggatatattaatattatgacttcaatacatgataaactaaattttacatttttctgataccaattttcatcaagcatttagtcatttatgcaaggcaataggttgcattctcagacacatttatttgagtgacttttactatttggcctattttcaggtttttatatcccagtaaaaagttaaactttcttctatttagaagaacccttttaaatgattatcaaattttcctagtctgtgaatcaagcgcctttagaattatttggaatattttacgcctctggtttttggtacattaacaaaaactgtgaagtggtatcttggctttaaaaagttcaaatatctatgaaagtgcctgaattttgaaacagtttgttcagtagaagaatcttacaatctccttaaatatagactaagtaatttcctaaatggtaaaacgttgtttattcaatctattgaaaatttcttacgcaaagcagcttgaactaatctactaaaagtttaccatcgtatttggataccagtcatatatagaagcctaggccttaaaggtgtgtgcataagaaaacaacttagtctctgtagtcagattacttaaaactttaggatatataagttattgcagttgtaattttgcttctctgttccttgtctaatttgaggagaatacgtttcctttttttctctaaattctaacatttttgtccagcagatactttgagtattatgcctccagtttgtagaaagacattcataatctatcctcttaatatttaaaatgttctaacaattattctatggtatactagtctcagtcttcagactaacagtcactggaagtttacatcactactgtaagaacatgagtatgttttacataattatgagaaatgatactattttatttcatatgtttctctagagaaatatttgctgttttcttcaagactatctagactccaatgtaagctagattcttaggtaggtgcatggcattgatcaaagttgaaatccaagagtacattattgtaatctttgtaaaataaaaaacttaggcacctacaaatttagtatataacttagggaaaataaaacattaatcaggatttaatttgtattaaggaaattttaagctgtggtttacttttttatatatagtactttccaggagcagatgagccattacagtatccttgtcagtattcagatgaaggacagagcaactctgccaccagtacaggctcattcatggacattgcttctacaaatacgagtaacaaaagtgacactaatatggagcaagttcctgccacaaatgatactattaagcgcttagaatcaaaattgttgaaaaatcaggcaaagcaacagagtgaatctggacgtttaagcttgggagcctcccgtgggagcagtgtggagagcttgcccccaacctctgagggcaagaggatgagtgctgacatgtctgaaatagaagctaggatcgccgcaaccacagcctattccaagcctaaacggggccaccgtaaaactgcttcatttggcaacattctggatgtccctgagatcgtcatatcaggcaacggacagccaagacgtagatccatccaagacttgactgtaactggaacagaacctggtcaggtgagcagtaggtcatccagtcccagtgtcagaatgattactacctcaggaccaacctcagaaaagccaactcgaagtcatccatggacccctgatgattccacagataccaatggatcagataactccatcccaatggcttatcttacactggatcaccaactacaggcaagaactagttgcagaactggaccaggatgaaaaggaccagcaaaatacatctcgcctggtacaggaacataaaaagcttttagatgaaaacaaaagcctttctacttactaccagcaatgcaaaaaacaactagaggtcatcagaagtcagcagcagaaacgacaaggcacttcatgattctctgggaccgttacattttgaaatatgcaaagaaagactttttttttaaggaaaggaaaaccttataatgacgattcatgagtgttagctttttggcgtgttctgaatgccaactgcctatatttgctgcatttttttcattgtttattttccttttctcatggtggacatacaattttactgtttcattgcataacatggtagcatctgtgacttgaatgagcagcactttgcaacttcaaaacagatgcagtgaactgtggctgtatatgcatgctcattgtgtgaaggctagcctaacagaacaggaggtatcaaactagctgctatgtgcaaacagcgtccattttttcatattagaggtggaacctcaagaatgactttattcttgtatctcatctcaaaatattaataatttttttcccaaaagatggtatataccaagttaaagacagggtattataaatttagagtgattggtggtatattacggaaatacggaacctttagggatagttccgtgtaagggctttgatgccagcatccttggatcagtactgaactcagttccatccgtaaaatatgtaaagataagcaagatctaagaagttatcaaaactattctttaaaatgctaaagcagctcctgtagccagagatcacaggtcttccctgtgaaactttggtttctttctataaatgtgtgtggttttcagcgctcaactcctgtcttcaaatggtagtaagttctacttctacttctgtcattcagaacattttatgtcaaatgatgtaatgcagaaattcttgtgcatatttgtaactgaaggaagctttttagatttatttttgtttttaataaaattcagattcctattctaaaaaaaaaaaaaaaaaaaaaaaaaaggggggggcggctaaaaaataacctagagggcaagtttaagcgtaccaggtttttggtcaaaagggccctaaggggggaataaaaggagggaggggcgtacaacgtcggtgggaaacggcgttgggctttggaagagcttcttttggtggcgtttggaatctaagaattagctaggaataatacgttatggtacacgttctgggaatgcgtaa

SEQ ID NO: 735240 - DNA, 7686 bp, Homo sapiens
ctcgtaatccataacttgagatgaacacaccaaattataaatatcttattcacctaatccgtggaaagtttgtaacaccaaaatattaacttctgttcttgatcactcagcctccatagttattcatgttgcatgatctgattcgctcttttagaatttctcatagcgtcaggtactagctcaaaataacaggagcaactgcttctttccatatcccacattgaggaaaacacattttgcaagccgtcttaaagaaacaggtcaacttagtttagggatgaaacttaaaagtaagcttcgtcacaaaaaacacagttcaacaccacctcgcccggctgcaggcagctcagaggacaggaagtgaggccaagacatatttcacgcagcacagactaaaccccagcttttatctttcccgctggtccttaagggaccaaccgtactgattttccgtcatgttccgcgccacttccgttcgcgcactttaattacgtcaggcgtcctctctcgcggtatcatccggttgctgaggccctgtaataaaggtctcgcgaaatttgttctagaggtccaagtttgcttcttagcttactccaccccacccccaacctgtccctccttttctttccaagtcacaaaattctcccctcccctaccccggagtttacggccctcctcctgtttccgatttcagcccggaaccggaagtgtagtgggcggggcccgtcggcggaaaacgcagcggagccagagccggacacggctgtggccgctgcctctacccccgccacggatcgccgggtagtaggactgcgcggctccaggctgagggtcggtccggaggcgggtgggcgcgggtctcacccggattgtccgggtggcaccgttcccggccccaccgggcgccgcgagggatcatgtctacagcctctgccgcctcctcctcctcctcgtcttcggccggtgagatgatcgaagccccttcccaggtcctcaactttgaagagatcgactacaaggagatcgaggtggaagaggttgttggaagaggagcctttggagttgtttgcaaagctaagtggagagcaaaagatgttgctattaaacaaatagaaagtgaatctgagaggaaagcgtttattgtagagcttcggcagttatcccgtgtgaaccatcctaatattgtaaagctttatggagcctgcttgaatccagtgtgtcttgtgatggaatatgctgaagggggctctttatataatgtgctgcatggtgctgaaccattgccatattatactgctgcccacgcaatgagttggtgtttacagtgttcccaaggagtggcttatcttcacagcatgcaacccaaagcgctaattcacagggacctgaaaccaccaaacttactgctggttgcaggggggacagttctaaaaatttgtgattttggtacagcctgtgacattcagacacacatgaccaataacaaggggagtgctgcttggatggcacctgaagtttttgaaggtagtaattacagtgaaaaatgtgacgtcttcagctggggtattattctttgggaagtgataacgcgtcggaaaccctttgatgagattggtggcccagctttccgaatcatgtgggctgttcataatggtactcgaccaccactgataaaaaatttacctaagcccattgagagcctgatgactcgttgttggtctaaagatccttcccagcgcccttcaatggaggaaattgtgaaaataatgactcacttgatgcgggtataatccttcttttgaggggctttggatttaggggaatttaatatgtgctgagttttaatggaattttaaaagggatgttattactatattctgctttatatattgctatgttttctaagtgagaatgggcatttattactcatagtcagaagaggaaacatttcgagagggaaaatctagttctttatcactggaaagatggctagactaggtttctagacttgcttttttctttttgcttacattagtggacaagtatgtttgtctctgggcctgttgcctcatttgtaatgtgggagaaactgaaatagatagtctctaaagccatcacaggacttggatatattaatattatgacttcaatacatgataaactaaattttacatttttctgataccaattttcatcaagcatttagtcatttatgcaaggcaataggttgcattctcagacacatttatttgagtgacttttactatttggcctattttcaggtttttatatcccagtaaaaagttaaactttcttctatttagaagaacccttttaaatgattatcaaattttcctagtctgtgaatcaagcgcctttagaattatttggaatattttacgcctctggtttttggtacattaacaaaaactgtgaagtggtatcttggctttaaaaagttcaaatatctatgaaagtgcctgaattttgaaacagtttgttcagtagaagaatcttacaatctccttaaatatagactaagtaatttcctaaatggtaaaacgttgtttattcaatctattgaaaatttcttacgcaaagcagcttgaactaatctactaaaagtttaccatcgtatttggataccagtcatatatagaagcctaggccttaaaggtgtgtgcataagaaaacaacttagtctctgtagtcagattacttaaaactttaggatatataagttattgcagttgtaattttgcttctctgttccttgtctaatttgaggagaatacgtttcctttttttctctaaattctaacatttttgtccagcagatactttgagtattatgcctccagtttgtagaaagacattcataatctatcctcttaatatttaaaatgttctaacaattattctatggtatactagtctcagtcttcagactaacagtcactggaagtttacatcactactgtaagaacatgagtatgttttacataattatgagaaatgatactattttatttcatatgtttctctagagaaatatttgctgttttcttcaagactatctagactccaatgtaagctagattcttaggtaggtgcatggcattgatcaaagttgaaatccaagagtacattattgtaatctttgtaaaataaaaaacttaggcacctacaaatttagtatataacttagggaaaataaaacattaatcaggatttaatttgtattaaggaaattttaagctgtggtttacttttttatatatagtactttccaggagcagatgagccattacagtatccttgtcagtattcagatgaaggacagagcaactctgccaccagtacaggctcattcatggacattgcttctacaaatacgagtaacaaaagtgacactaatatggagcaagttcctgccacaaatgatactattaagcgcttagaatcaaaattgttgaaaaatcaggcaaagcaacagagtgaatctggacgtttaagcttgggagcctcccgtgggagcagtgtggagagcttgcccccaacctctgagggcaagaggatgagtgctgacatgtctgaaatagaagctaggatcgccgcaaccacagcctattccaagcctaaacggggccaccgtaaaactgcttcatttggcaacattctggatgtccctgagatcgtcatatcaggcaacggacagccaagacgtagatccatccaagacttgactgtaactggaacagaacctggtcaggtgagcagtaggtcatccagtcccagtgtcagaatgattactacctcaggaccaacctcagaaaagccaactcgaagtcatccatggacccctgatgattccacagataccaatggatcagataactccatcccaatggcttatcttacactggatcaccaactacagcctctagcaccgtgcccaaactccaaagaatctatggcagtgtttgaacagcattgtaaaatggcacaagaatatatgaaagttcaaacagaaattgcattgttattacagagaaagcaagaactagttgcagaactggaccaggatgaaaaggaccagcaaaatacatctcgcctggtacaggaacataaaaagcttttagatgaaaacaaaagcctttctacttactaccagcaatgcaaaaaacaactagaggtcatcagaagtcagcagcagaaacgacaaggcacttcatgattctctgggaccgttacattttgaaatatgcaaagaaagactttttttttaaggaaaggaaaaccttataatgacgattcatgagtgttagctttttggcgtgttctgaatgccaactgcctatatttgctgcatttttttcattgtttattttccttttctcatggtggacatacaattttactgtttcattgcataacatggtagcatctgtgacttgaatgagcagcactttgcaacttcaaaacagatgcagtgaactgtggctgtatatgcatgctcattgtgtgaaggctagcctaacagaacaggaggtatcaaactagctgctatgtgcaaacagcgtccattttttcatattagaggtggaacctcaagaatgactttattcttgtatctcatctcaaaatattaataatttttttcccaaaagatggtatataccaagttaaagacagggtattataaatttagagtgattggtggtatattacggaaatacggaacctttagggatagttccgtgtaagggctttgatgccagcatccttggatcagtactgaactcagttccatccgtaaaatatgtaaaggtaagtggcagctgctctatttaatgaaagcagttttaccggattttgttagactaaaatttgattgtgatacattgaacaaaatggaactcatttttttttaaggagtaaagatttttaattctgtgattgtgtgtatgtgtgttgaaactgtaaagcttttatgactctaatattaatctcttaaatgaaattaaaaggcaaaagaacatgattgagcttaaatgatcatttcttcctgcagtgattcttggattgttttctcatgtatttgaaaaaaaaaaaatgaagaaaaataatggaaaatggaagtaattactccagctaaaaaaagcttggacttagatttctttttatgataccaaatgagaaataaaccaggcaaatcagaaggaagttaaagaagcaaatataaattcaacaagtgtcctaattatcctggatattggaatatttgattttccttacaatcccgttctagaatgcctgccgcctttcaacactttcaagagaatttcaacacttacagagtatttatattgttaacagtaattttgctaccaaaaccttcagaataactttaataataaaatgacactgaaataatagactatacaaactctatattttttcagttggtgttaaaataagtcacattttgataccagtacaagatgtcttttaaataaggatgtcatcagtctgatttttatagcattaatgttttatgaagaaaaagttcaaaatgaaagcattaattgctgtgattattagaattctatcatgactgtattgtagtttttgctctatttcagataagcaagatctaagaagttatcaaaactattctttaaaatgctaaagcaggtaactttttcttccattattttttcctcctaccactgagttttgtaatgaattccttgtgtatacaagcaatacaggtgaatactaaactgttatttttagcttcttcaaaagctattttagaaagcttcctggaaataaatgtcttctgtcatttaatttaaataaaaggagtgttaattgttcccaaatttgattacctagctgaaacagatattggattcagcatagtaatagtaaaataaaattggcagagaaaataactgtagactaggataaagcatgactcctccatagcattgttgcttgtatgtacatctgtcactccactgaaagggacctagtcactttaaagaggccttttatctcagcacgagatatccaagcgtgaatgctaaggcttgatgtttccattaggatttagcattcgagatttcagattttatttatagtcattgatgtgttttgctgtattataacacatttaaagggaaattttattatggtttttacatgtagtcatttcataaaaatatccagataggtaaatggaagaaaatagtagattttagtcatggtaccaaatgcaagaggctgttgaacagttgcttgtttgtttacagtaagttccttgagattttcagtactgtagttgccctggacattgagtacagttcagccttactctgtttttaagtagttgtgttgtcaatttcatgcttttaagtcctgatgatccttggagatgggagaaaaagataccagggataattaaaatccacagccagtttcatcagtttcctcatccatcctgcaaataaaaatgttaacaaggagccaaacttattcgttctggttttacaatttattttgaccgttttttgggtgaaaattgcaaacagccaagcaagtggctggaatgccccagtctaagaaattcaaaaacaatcactgagtaagccctaattacattttactcttgactccaggaaaagaaagcaagcttttatctaatctagagggaagtattcgtgagcaataaaaatcacttttttgagttgaataataatcagttaagaatatttaccgcatagcaacacaacatataaagatttgttacaagttgtttacagatgtttgactatttttgctgaagtattttagagtattgaatgtcttctctcttcaagtttctttcatgttcctaatttcagctcctgtagccagagatcacaggtcttccctgtgaaactttggtttctttctataaatgtgtgtggttttcagcgctcaactcctgtcttcaaatggtagtaagttctacttctacttctgtcattcagaacattttatgtcaaatgatgtaatgcagaaattcttgtgcatatttgtaactgaaggaagctttttagatttatttttgtttttaataaaattcagattcctattctaaactggtacataaaagtggtgaatgacttgtatcagcaaatgagctgcgaagtgttctgctctagcaccgtgtttaccttacacagaacctactaaaaactgaaatgtcacttttgtacgataatcatggtttttaagaggctgggtaattggccagttaacacatcatctcttgcatttcaaaattttgtgttaaatggagctcttcacaatttcatgagtcctaatttgtgtgaagcacaacacgtcatacattgctaagtgattcttctcatcagaaagctgatttcttagagtatttctaagttaaattaggtatttcattcctttatcaacctgctggctttccaaccctaacatatgcacacattcttataaactctaccttcattttagtaaatccatccattcatttgctcattcttttaataaatatttgtttatcatatattataaactgcactgctattaccaataccaagttacatgtccattccagtcacacagtagtttgatggtattcccatcttacagatg

SEQ ID NO: 735241 - DNA, 7387 bp, Homo sapiens
ctcgtaatccataacttgagatgaacacaccaaattataaatatcttattcacctaatccgtggaaagtttgtaacaccaaaatattaacttctgttcttgatcactcagcctccatagttattcatgttgcatgatctgattcgctcttttagaatttctcatagcgtcaggtactagctcaaaataacaggagcaactgcttctttccatatcccacattgaggaaaacacattttgcaagccgtcttaaagaaacaggtcaacttagtttagggatgaaacttaaaagtaagcttcgtcacaaaaaacacagttcaacaccacctcgcccggctgcaggcagctcagaggacaggaagtgaggccaagacatatttcacgcagcacagactaaaccccagcttttatctttcccgctggtccttaagggaccaaccgtactgattttccgtcatgttccgcgccacttccgttcgcgcactttaattacgtcaggcgtcctctctcgcggtatcatccggttgctgaggccctgtaataaaggtctcgcgaaatttgttctagaggtccaagtttgcttcttagcttactccaccccacccccaacctgtccctccttttctttccaagtcacaaaattctcccctcccctaccccggagtttacggccctcctcctgtttccgatttcagcccggaaccggaagtgtagtgggcggggcccgtcggcggaaaacgcagcggagccagagccggacacggctgtggccgctgcctctacccccgccacggatcgccgggtagtaggactgcgcggctccaggctgagggtcggtccggaggcgggtgggcgcgggtctcacccggattgtccgggtggcaccgttcccggccccaccgggcgccgcgagggatcatgtctacagcctctgccgcctcctcctcctcctcgtcttcggccggtgagatgatcgaagccccttcccaggtcctcaactttgaagagatcgactacaaggagatcgaggtggaagaggttgttggaagaggagcctttggagttgtttgcaaagctaagtggagagcaaaagatgttgctattaaacaaatagaaagtgaatctgagaggaaagcgtttattgtagagcttcggcagttatcccgtgtgaaccatcctaatattgtaaagctttatggagcctgcttgaatccagtgtgtcttgtgatggaatatgctgaagggggctctttatataatgtgctgcatggtgctgaaccattgccatattatactgctgcccacgcaatgagttggtgtttacagtgttcccaaggagtggcttatcttcacagcatgcaacccaaagcgctaattcacagggacctgaaaccaccaaacttactgctggttgcaggggggacagttctaaaaatttgtgattttggtacagcctgtgacattcagacacacatgaccaataacaaggggagtgctgcttggatggcacctgaagtttttgaaggtagtaattacagtgaaaaatgtgacgtcttcagctggggtattattctttgggaagtgataacgcgtcggaaaccctttgatgagattggtggcccagctttccgaatcatgtgggctgttcataatggtactcgaccaccactgataaaaaatttacctaagcccattgagagcctgatgactcgttgttggtctaaagatccttcccagcgcccttcaatggaggaaattgtgaaaataatgactcacttgatgcgggtataatccttcttttgaggggctttggatttaggggaatttaatatgtgctgagttttaatggaattttaaaagggatgttattactatattctgctttatatattgctatgttttctaagtgagaatgggcatttattactcatagtcagaagaggaaacatttcgagagggaaaatctagttctttatcactggaaagatggctagactaggtttctagacttgcttttttctttttgcttacattagtggacaagtatgtttgtctctgggcctgttgcctcatttgtaatgtgggagaaactgaaatagatagtctctaaagccatcacaggacttggatatattaatattatgacttcaatacatgataaactaaattttacatttttctgataccaattttcatcaagcatttagtcatttatgcaaggcaataggttgcattctcagacacatttatttgagtgacttttactatttggcctattttcaggtttttatatcccagtaaaaagttaaactttcttctatttagaagaacccttttaaatgattatcaaattttcctagtctgtgaatcaagcgcctttagaattatttggaatattttacgcctctggtttttggtacattaacaaaaactgtgaagtggtatcttggctttaaaaagttcaaatatctatgaaagtgcctgaattttgaaacagtttgttcagtagaagaatcttacaatctccttaaatatagactaagtaatttcctaaatggtaaaacgttgtttattcaatctattgaaaatttcttacgcaaagcagcttgaactaatctactaaaagtttaccatcgtatttggataccagtcatatatagaagcctaggccttaaaggtgtgtgcataagaaaacaacttagtctctgtagtcagattacttaaaactttaggatatataagttattgcagttgtaattttgcttctctgttccttgtctaatttgaggagaatacgtttcctttttttctctaaattctaacatttttgtccagcagatactttgagtattatgcctccagtttgtagaaagacattcataatctatcctcttaatatttaaaatgttctaacaattattctatggtatactagtctcagtcttcagactaacagtcactggaagtttacatcactactgtaagaacatgagtatgttttacataattatgagaaatgatactattttatttcatatgtttctctagagaaatatttgctgttttcttcaagactatctagactccaatgtaagctagattcttaggtaggtgcatggcattgatcaaagttgaaatccaagagtacattattgtaatctttgtaaaataaaaaacttaggcacctacaaatttagtatataacttagggaaaataaaacattaatcaggatttaatttgtattaaggaaattttaagctgtggtttacttttttatatatagtactttccaggagcagatgagccattacagtatccttgtcagtattcagatgaaggacagagcaactctgccaccagtacaggctcattcatggacattgcttctacaaatacgagtaacaaaagtgacactaatatggagcaagttcctgccacaaatgatactattaagcgcttagaatcaaaattgttgaaaaatcaggcaaagcaacagagtgaatctggacgtttaagcttgggagcctcccgtgggagcagtgtggagagcttgcccccaacctctgagggcaagaggatgagtgctgacatgtctgaaatagaagctaggatcgccgcaaccacagcctattccaagcctaaacggggccaccgtaaaactgcttcatttggcaacattctggatgtccctgagatcgtcatatcaggcaacggacagccaagacgtagatccatccaagacttgactgtaactggaacagaacctggtcaggtgagcagtaggtcatccagtcccagtgtcagaatgattactacctcaggaccaacctcagaaaagccaactcgaagtcatccatggacccctgatgattccacagataccaatggatcagataactccatcccaatggcttatcttacactggatcaccaactacagcctctagcaccgtgcccaaactccaaagaatctatggcagtgtttgaacagcattgtaaaatggcacaagaatatatgaaagttcaaacagaaattgcattgttattacagagaaagcaagaactagttgcagaactggaccaggatgaaaaggaccagcaaaatacatctcgcctggtacaggaacataaaaagcttttagatgaaaacaaaagcctttctacttactaccagcaatgcaaaaaacaactagaggtcatcagaagtcagcagcagaaacgacaaggcacttcatgattctctgggaccgttacattttgaaatatgcaaagaaagactttttttttaaggaaaggaaaaccttataatgacgattcatgagtgttagctttttggcgtgttctgaatgccaactgcctatatttgctgcatttttttcattgtttattttccttttctcatggtggacatacaattttactgtttcattgcataacatggtagcatctgtgacttgaatgagcagcactttgcaacttcaaaacagatgcagtgaactgtggctgtatatgcatgctcattgtgtgaaggctagcctaacagaacaggaggtatcaaactagctgctatgtgcaaacagcgtccattttttcatattagaggtggaacctcaagaatgactttattcttgtatctcatctcaaaatattaataatttttttcccaaaagatggtatataccaagttaaagacagggtattataaatttagagtgattggtggtatattacggaaatacggaacctttagggatagttccgtgtaagggctttgatgccagcatccttggatcagtactgaactcagttccatccgtaaaatatgtaaaggtaagtggcagctgctctatttaatgaaagcagttttaccggattttgttagactaaaatttgattgtgatacattgaacaaaatggaactcatttttttttaaggagtaaagatttttaattctgtgattgtgtgtatgtgtgttgaaactgtaaagcttttatgactctaatattaatctcttaaatgaaattaaaaggcaaaagaacatgattgagcttaaatgatcatttcttcctgcagtgattcttggattgttttctcatgtatttgaaaaaaaaaaaatgaagaaaaataatggaaaatggaagtaattactccagctaaaaaaagcttggacttagatttctttttatgataccaaatgagaaataaaccaggcaaatcagaaggaagttaaagaagcaaatataaattcaacaagtgtcctaattatcctggatattggaatatttgattttccttacaatcccgttctagaatgcctgccgcctttcaacactttcaagagaatttcaacacttacagagtatttatattgttaacagtaattttgctaccaaaaccttcagaataactttaataataaaatgacactgaaataatagactatacaaactctatattttttcagttggtgttaaaataagtcacattttgataccagtacaagatgtcttttaaataaggatgtcatcagtctgatttttatagcattaatgttttatgaagaaaaagttcaaaatgaaagcattaattgctgtgattattagaattctatcatgactgtattgtagtttttgctctatttcagataagcaagatctaagaagttatcaaaactattctttaaaatgctaaagcaggtaactttttcttccattattttttcctcctaccactgagttttgtaatgaattccttgtgtatacaagcaatacaggtgaatactaaactgttatttttagcttcttcaaaagctattttagaaagcttcctggaaataaatgtcttctgtcatttaatttaaataaaaggagtgttaattgttcccaaatttgattacctagctgaaacagatattggattcagcatagtaatagtaaaataaaattggcagagaaaataactgtagactaggataaagcatgactcctccatagcattgttgcttgtatgtacatctgtcactccactgaaagggacctagtcactttaaagaggccttttatctcagcacgagatatccaagcgtgaatgctaaggcttgatgtttccattaggatttagcattcgagatttcagattttatttatagtcattgatgtgttttgctgtattataacacatttaaagggaaattttattatggtttttacatgtagtcatttcataaaaatatccagataggtaaatggaagaaaatagtagattttagtcatggtaccaaatgcaagaggctgttgaacagttgcttgtttgtttacagtaagttccttgagattttcagtactgtagttgccctggacattgagtacagttcagccttactctgtttttaagtagttgtgttgtcaatttcatgcttttaagtcctgatgatccttggagatgggagaaaaagataccagggataattaaaatccacagccagtttcatcagtttcctcatccatcctgcaaataaaaatgttaacaaggagccaaacttattcgttctggttttacaatttattttgaccgttttttgggtgaaaattgcaaacagccaagcaagtggctggaatgccccagtctaagaaattcaaaaacaatcactgagtaagccctaattacattttactcttgactccaggaaaagaaagcaagcttttatctaatctagagggaagtattcgtgagcaataaaaatcacttttttgagttgaataataatcagttaagaatatttaccgcatagcaacacaacatataaagatttgttacaagttgtttacagatgtttgactatttttgctgaagtattttagagtattgaatgtcttctctcttcaagtttctttcatgttcctaatttcagctcctgtagccagagatcacaggtcttccctgtgaaactttggtttctttctataaatgtgtgtggttttcagcgctcaactcctgtcttcaaatggtagtaagttctacttctacttctgtcattcagaacattttatgtcaaatgatgtaatgcagaaattcttgtgcatatttgtaactgaaggaagctttttagatttatttttgtttttaataaaattcagattcctattctaaaaaaaaaaaaaaaaaaaaaaaaaaggggggggcggctaaaaaataacctagagggcaagtttaagcgtaccaggtttttggtcaaaagggccctaaggggggaataaaaggagggaggggcgtacaacgtcggtgggaaacggcgttgggctttggaagagcttcttttggtggcgtttggaatctaagaattagctaggaataatacgttatggtacacgttctgggaatgcgtaa

SEQ ID NO: 735242 - DNA, 7686 bp, Homo sapiens
  misc_feature (6604)..(6604): n is a, c, g, or t
  misc_feature (6611)..(6611): n is a, c, g, or t
  misc_feature (6631)..(6633): n is a, c, g, or t
  misc_feature (6639)..(6639): n is a, c, g, or t
  misc_feature (6644)..(6644): n is a, c, g, or t
  misc_feature (6653)..(6653): n is a, c, g, or t
  misc_feature (6656)..(6657): n is a, c, g, or t
  misc_feature (6662)..(6662): n is a, c, g, or t
  misc_feature (6680)..(6680): n is a, c, g, or t
  misc_feature (6686)..(6687): n is a, c, g, or t
  misc_feature (6692)..(6693): n is a, c, g, or t
  misc_feature (6698)..(6698): n is a, c, g, or t
  misc_feature (6700)..(6700): n is a, c, g, or t
  misc_feature (6715)..(6715): n is a, c, g, or t
  misc_feature (6719)..(6720): n is a, c, g, or t
  misc_feature (6722)..(6723): n is a, c, g, or t
  misc_feature (6729)..(6729): n is a, c, g, or t
  misc_feature (6732)..(6733): n is a, c, g, or t
  misc_feature (6735)..(6736): n is a, c, g, or t
  misc_feature (6739)..(6740): n is a, c, g, or t
  misc_feature (6745)..(6745): n is a, c, g, or t
  misc_feature (6753)..(6753): n is a, c, g, or t
  misc_feature (6755)..(6755): n is a, c, g, or t
  misc_feature (6758)..(6758): n is a, c, g, or t
  misc_feature (6760)..(6760): n is a, c, g, or t
  misc_feature (6762)..(6763): n is a, c, g, or t
  misc_feature (6770)..(6770): n is a, c, g, or t
  misc_feature (6773)..(6773): n is a, c, g, or t
  misc_feature (6775)..(6775): n is a, c, g, or t
  misc_feature (6790)..(6791): n is a, c, g, or t
  misc_feature (6798)..(6798): n is a, c, g, or t
  misc_feature (6801)..(6801): n is a, c, g, or t
  misc_feature (6808)..(6808): n is a, c, g, or t
  misc_feature (6813)..(6813): n is a, c, g, or t
  misc_feature (6816)..(6816): n is a, c, g, or t
  misc_feature (6820)..(6820): n is a, c, g, or t
  misc_feature (6823)..(6823): n is a, c, g, or t
  misc_feature (6827)..(6827): n is a, c, g, or t
  misc_feature (6830)..(6830): n is a, c, g, or t
  misc_feature (6833)..(6833): n is a, c, g, or t
  misc_feature (6837)..(6837): n is a, c, g, or t
  misc_feature (6847)..(6847): n is a, c, g, or t
  misc_feature (6850)..(6850): n is a, c, g, or t
  misc_feature (6853)..(6853): n is a, c, g, or t
  misc_feature (6863)..(6863): n is a, c, g, or t
  misc_feature (6868)..(6868): n is a, c, g, or t
  misc_feature (6872)..(6872): n is a, c, g, or t
  misc_feature (6892)..(6892): n is a, c, g, or t
  misc_feature (6920)..(6920): n is a, c, g, or t
  misc_feature (6943)..(6943): n is a, c, g, or t
  misc_feature (6947)..(6947): n is a, c, g, or t
ctcgtaatccataacttgagatgaacacaccaaattataaatatcttattcacctaatccgtggaaagtttgtaacaccaaaatattaacttctgttcttgatcactcagcctccatagttattcatgttgcatgatctgattcgctcttttagaatttctcatagcgtcaggtactagctcaaaataacaggagcaactgcttctttccatatcccacattgaggaaaacacattttgcaagccgtcttaaagaaacaggtcaacttagtttagggatgaaacttaaaagtaagcttcgtcacaaaaaacacagttcaacaccacctcgcccggctgcaggcagctcagaggacaggaagtgaggccaagacatatttcacgcagcacagactaaaccccagcttttatctttcccgctggtccttaagggaccaaccgtactgattttccgtcatgttccgcgccacttccgttcgcgcactttaattacgtcaggcgtcctctctcgcggtatcatccggttgctgaggccctgtaataaaggtctcgcgaaatttgttctagaggtccaagtttgcttcttagcttactccaccccacccccaacctgtccctccttttctttccaagtcacaaaattctcccctcccctaccccggagtttacggccctcctcctgtttccgatttcagcccggaaccggaagtgtagtgggcggggcccgtcggcggaaaacgcagcggagccagagccggacacggctgtggccgctgcctctacccccgccacggatcgccgggtagtaggactgcgcggctccaggctgagggtcggtccggaggcgggtgggcgcgggtctcacccggattgtccgggtggcaccgttcccggccccaccgggcgccgcgagggatcatgtctacagcctctgccgcctcctcctcctcctcgtcttcggccggtgagatgatcgaagccccttcccaggtcctcaactttgaagagatcgactacaaggagatcgaggtggaagaggttgttggaagaggagcctttggagttgtttgcaaagctaagtggagagcaaaagatgttgctattaaacaaatagaaagtgaatctgagaggaaagcgtttattgtagagcttcggcagttatcccgtgtgaaccatcctaatattgtaaagctttatggagcctgcttgaatccagtgtgtcttgtgatggaatatgctgaagggggctctttatataatgtgctgcatggtgctgaaccattgccatattatactgctgcccacgcaatgagttggtgtttacagtgttcccaaggagtggcttatcttcacagcatgcaacccaaagcgctaattcacagggacctgaaaccaccaaacttactgctggttgcaggggggacagttctaaaaatttgtgattttggtacagcctgtgacattcagacacacatgaccaataacaaggggagtgctgcttggatggcacctgaagtttttgaaggtagtaattacagtgaaaaatgtgacgtcttcagctggggtattattctttgggaagtgataacgcgtcggaaaccctttgatgagattggtggcccagctttccgaatcatgtgggctgttcataatggtactcgaccaccactgataaaaaatttacctaagcccattgagagcctgatgactcgttgttggtctaaagatccttcccagcgcccttcaatggaggaaattgtgaaaataatgactcacttgatgcgggtataatccttcttttgaggggctttggatttaggggaatttaatatgtgctgagttttaatggaattttaaaagggatgttattactatattctgctttatatattgctatgttttctaagtgagaatgggcatttattactcatagtcagaagaggaaacatttcgagagggaaaatctagttctttatcactggaaagatggctagactaggtttctagacttgcttttttctttttgcttacattagtggacaagtatgtttgtctctgggcctgttgcctcatttgtaatgtgggagaaactgaaatagatagtctctaaagccatcacaggacttggatatattaatattatgacttcaatacatgataaactaaattttacatttttctgataccaattttcatcaagcatttagtcatttatgcaaggcaataggttgcattctcagacacatttatttgagtgacttttactatttggcctattttcaggtttttatatcccagtaaaaagttaaactttcttctatttagaagaacccttttaaatgattatcaaattttcctagtctgtgaatcaagcgcctttagaattatttggaatattttacgcctctggtttttggtacattaacaaaaactgtgaagtggtatcttggctttaaaaagttcaaatatctatgaaagtgcctgaattttgaaacagtttgttcagtagaagaatcttacaatctccttaaatatagactaagtaatttcctaaatggtaaaacgttgtttattcaatctattgaaaatttcttacgcaaagcagcttgaactaatctactaaaagtttaccatcgtatttggataccagtcatatatagaagcctaggccttaaaggtgtgtgcataagaaaacaacttagtctctgtagtcagattacttaaaactttaggatatataagttattgcagttgtaattttgcttctctgttccttgtctaatttgaggagaatacgtttcctttttttctctaaattctaacatttttgtccagcagatactttgagtattatgcctccagtttgtagaaagacattcataatctatcctcttaatatttaaaatgttctaacaattattctatggtatactagtctcagtcttcagactaacagtcactggaagtttacatcactactgtaagaacatgagtatgttttacataattatgagaaatgatactattttatttcatatgtttctctagagaaatatttgctgttttcttcaagactatctagactccaatgtaagctagattcttaggtaggtgcatggcattgatcaaagttgaaatccaagagtacattattgtaatctttgtaaaataaaaaacttaggcacctacaaatttagtatataacttagggaaaataaaacattaatcaggatttaatttgtattaaggaaattttaagctgtggtttacttttttatatatagtactttccaggagcagatgagccattacagtatccttgtcagtattcagatgaaggacagagcaactctgccaccagtacaggctcattcatggacattgcttctacaaatacgagtaacaaaagtgacactaatatggagcaagttcctgccacaaatgatactattaagcgcttagaatcaaaattgttgaaaaatcaggcaaagcaacagagtgaatctggacgtttaagcttgggagcctcccgtgggagcagtgtggagagcttgcccccaacctctgagggcaagaggatgagtgctgacatgtctgaaatagaagctaggatcgccgcaaccacagcctattccaagcctaaacggggccaccgtaaaactgcttcatttggcaacattctggatgtccctgagatcgtcatatcaggcaacggacagccaagacgtagatccatccaagacttgactgtaactggaacagaacctggtcaggtgagcagtaggtcatccagtcccagtgtcagaatgattactacctcaggaccaacctcagaaaagccaactcgaagtcatccatggacccctgatgattccacagataccaatggatcagataactccatcccaatggcttatcttacactggatcaccaactacagcctctagcaccgtgcccaaactccaaagaatctatggcagtgtttgaacagcattgtaaaatggcacaagaatatatgaaagttcaaacagaaattgcattgttattacagagaaagcaagaactagttgcagaactggaccaggatgaaaaggaccagcaaaatacatctcgcctggtacaggaacataaaaagcttttagatgaaaacaaaagcctttctacttactaccagcaatgcaaaaaacaactagaggtcatcagaagtcagcagcagaaacgacaaggcacttcatgattctctgggaccgttacattttgaaatatgcaaagaaagactttttttttaaggaaaggaaaaccttataatgacgattcatgagtgttagctttttggcgtgttctgaatgccaactgcctatatttgctgcatttttttcattgtttattttccttttctcatggtggacatacaattttactgtttcattgcataacatggtagcatctgtgacttgaatgagcagcactttgcaacttcaaaacagatgcagtgaactgtggctgtatatgcatgctcattgtgtgaaggctagcctaacagaacaggaggtatcaaactagctgctatgtgcaaacagcgtccattttttcatattagaggtggaacctcaagaatgactttattcttgtatctcatctcaaaatattaataatttttttcccaaaagatggtatataccaagttaaagacagggtattataaatttagagtgattggtggtatattacggaaatacggaacctttagggatagttccgtgtaagggctttgatgccagcatccttggatcagtactgaactcagttccatccgtaaaatatgtaaaggtaagtggcagctgctctatttaatgaaagcagttttaccggattttgttagactaaaatttgattgtgatacattgaacaaaatggaactcatttttttttaaggagtaaagatttttaattctgtgattgtgtgtatgtgtgttgaaactgtaaagcttttatgactctaatattaatctcttaaatgaaattaaaaggcaaaagaacatgattgagcttaaatgatcatttcttcctgcagtgattcttggattgttttctcatgtatttgaaaaaaaaaaaatgaagaaaaataatggaaaatggaagtaattactccagctaaaaaaagcttggacttagatttctttttatgataccaaatgagaaataaaccaggcaaatcagaaggaagttaaagaagcaaatataaattcaacaagtgtcctaattatcctggatattggaatatttgattttccttacaatcccgttctagaatgcctgccgcctttcaacactttcaagagaatttcaacacttacagagtatttatattgttaacagtaattttgctaccaaaaccttcagaataactttaataataaaatgacactgaaataatagactatacaaactctatattttttcagttggtgttaaaataagtcacattttgataccagtacaagatgtcttttaaataaggatgtcatcagtctgatttttatagcattaatgttttatgaagaaaaagttcaaaatgaaagcattaattgctgtgattattagaattctatcatgactgtattgtagtttttgctctatttcagataagcaagatctaagaagttatcaaaactattctttaaaatgctaaagcaggtaactttttcttccattattttttcctcctaccactgagttttgtaatgaattccttgtgtatacaagcaatacaggtgaatactaaactgttatttttagcttcttcaaaagctattttagaaagcttcctggaaataaatgtcttctgtcatttaatttaaataaaaggagtgttaattgttcccaaatttgattacctagctgaaacagatattggattcagcatagtaatagtaaaataaaattggcagagaaaataactgtagactaggataaagcatgactcctccatagcattgttgcttgtatgtacatctgtcactccactgaaagggacctagtcactttaaagaggccttttatctcagcacgagatatccaagcgtgaatgctaaggcttgatgtttccattaggatttagcattcgagatttcagattttatttatagtcattgatgtgttttgctgtattataacacatttaaagggaaattttattatggtttttacatgtagtcatttcataaaaatatccagataggtaaatggaagaaaatagtagattttagtcatggtaccaaatgcaagaggctgttgaacagttgcttgtttgtttacagtaagttccttgagattttcagtactgtagttgccctggacattgagtacagttcagccttactctgtttttaagtagttgtgttgtcaatttcatgcttttaagtcctgatgatccttggagatgggagaaaaagataccagggataattaaaatccacagccagtttcatcagtttcctcatccatcctgcaaataaaaatgttaacaaggagccaaacttattcgttctggttttacaatttattttgaccgttttttgggtgaaaattgcaaacagccacncccgtcncccccccgcccccgcccaannnaccccnacccnacccccgcncannccccnaccccccccccccccccncccccnnccccnnacccncncccccacccaacccngagnnanncacccncgnncnnccnnaaccncccccccnanccnancnncaaccanccnanaacacccaccccacnncaacacnacncacaaanacccnccncaanccncccncanacncccnaccacccccnccnaancaccccagancaccnaacnccccccccccccaagccccntccatgcccccaatcccagcccccgcanccagagaccacaggccccccccncganaccctggcccccccccataaatgtgtgtggttttcagcgctcaactcctgtcttcaaatggtagtaagttctacttctacttctgtcattcagaacattttatgtcaaatgatgtaatgcagaaattcttgtgcatatttgtaactgaaggaagctttttagatttatttttgtttttaataaaattcagattcctattctaaactggtacataaaagtggtgaatgacttgtatcagcaaatgagctgcgaagtgttctgctctagcaccgtgtttaccttacacagaacctactaaaaactgaaatgtcacttttgtacgataatcatggtttttaagaggctgggtaattggccagttaacacatcatctcttgcatttcaaaattttgtgttaaatggagctcttcacaatttcatgagtcctaatttgtgtgaagcacaacacgtcatacattgctaagtgattcttctcatcagaaagctgatttcttagagtatttctaagttaaattaggtatttcattcctttatcaacctgctggctttccaaccctaacatatgcacacattcttataaactctaccttcattttagtaaatccatccattcatttgctcattcttttaataaatatttgtttatcatatattataaactgcactgctattaccaataccaagttacatgtccattccagtcacacagtagtttgatggtattcccatcttacagatg

SEQ ID NO: 735243 - DNA, 7387 bp, Homo sapiens
  misc_feature (6604)..(6604): n is a, c, g, or t
  misc_feature (6611)..(6611): n is a, c, g, or t
  misc_feature (6631)..(6633): n is a, c, g, or t
  misc_feature (6639)..(6639): n is a, c, g, or t
  misc_feature (6644)..(6644): n is a, c, g, or t
  misc_feature (6653)..(6653): n is a, c, g, or t
  misc_feature (6656)..(6657): n is a, c, g, or t
  misc_feature (6662)..(6662): n is a, c, g, or t
  misc_feature (6680)..(6680): n is a, c, g, or t
  misc_feature (6686)..(6687): n is a, c, g, or t
  misc_feature (6692)..(6693): n is a, c, g, or t
  misc_feature (6698)..(6698): n is a, c, g, or t
  misc_feature (6700)..(6700): n is a, c, g, or t
  misc_feature (6715)..(6715): n is a, c, g, or t
  misc_feature (6719)..(6720): n is a, c, g, or t
  misc_feature (6722)..(6723): n is a, c, g, or t
  misc_feature (6729)..(6729): n is a, c, g, or t
  misc_feature (6732)..(6733): n is a, c, g, or t
  misc_feature (6735)..(6736): n is a, c, g, or t
  misc_feature (6739)..(6740): n is a, c, g, or t
  misc_feature (6745)..(6745): n is a, c, g, or t
  misc_feature (6753)..(6753): n is a, c, g, or t
  misc_feature (6755)..(6755): n is a, c, g, or t
  misc_feature (6758)..(6758): n is a, c, g, or t
  misc_feature (6760)..(6760): n is a, c, g, or t
  misc_feature (6762)..(6763): n is a, c, g, or t
  misc_feature (6770)..(6770): n is a, c, g, or t
  misc_feature (6773)..(6773): n is a, c, g, or t
  misc_feature (6775)..(6775): n is a, c, g, or t
  misc_feature (6790)..(6791): n is a, c, g, or t
  misc_feature (6798)..(6798): n is a, c, g, or t
  misc_feature (6801)..(6801): n is a, c, g, or t
  misc_feature (6808)..(6808): n is a, c, g, or t
  misc_feature (6813)..(6813): n is a, c, g, or t
  misc_feature (6816)..(6816): n is a, c, g, or t
  misc_feature (6820)..(6820): n is a, c, g, or t
  misc_feature (6823)..(6823): n is a, c, g, or t
  misc_feature (6827)..(6827): n is a, c, g, or t
  misc_feature (6830)..(6830): n is a, c, g, or t
  misc_feature (6833)..(6833): n is a, c, g, or t
  misc_feature (6837)..(6837): n is a, c, g, or t
  misc_feature (6847)..(6847): n is a, c, g, or t
  misc_feature (6850)..(6850): n is a, c, g, or t
  misc_feature (6853)..(6853): n is a, c, g, or t
  misc_feature (6863)..(6863): n is a, c, g, or t
  misc_feature (6868)..(6868): n is a, c, g, or t
  misc_feature (6872)..(6872): n is a, c, g, or t
  misc_feature (6892)..(6892): n is a, c, g, or t
  misc_feature (6920)..(6920): n is a, c, g, or t
  misc_feature (6943)..(6943): n is a, c, g, or t
  misc_feature (6947)..(6947): n is a, c, g, or t
ctcgtaatccataacttgagatgaacacaccaaattataaatatcttattcacctaatccgtggaaagtttgtaacaccaaaatattaacttctgttcttgatcactcagcctccatagttattcatgttgcatgatctgattcgctcttttagaatttctcatagcgtcaggtactagctcaaaataacaggagcaactgcttctttccatatcccacattgaggaaaacacattttgcaagccgtcttaaagaaacaggtcaacttagtttagggatgaaacttaaaagtaagcttcgtcacaaaaaacacagttcaacaccacctcgcccggctgcaggcagctcagaggacaggaagtgaggccaagacatatttcacgcagcacagactaaaccccagcttttatctttcccgctggtccttaagggaccaaccgtactgattttccgtcatgttccgcgccacttccgttcgcgcactttaattacgtcaggcgtcctctctcgcggtatcatccggttgctgaggccctgtaataaaggtctcgcgaaatttgttctagaggtccaagtttgcttcttagcttactccaccccacccccaacctgtccctccttttctttccaagtcacaaaattctcccctcccctaccccggagtttacggccctcctcctgtttccgatttcagcccggaaccggaagtgtagtgggcggggcccgtcggcggaaaacgcagcggagccagagccggacacggctgtggccgctgcctctacccccgccacggatcgccgggtagtaggactgcgcggctccaggctgagggtcggtccggaggcgggtgggcgcgggtctcacccggattgtccgggtggcaccgttcccggccccaccgggcgccgcgagggatcatgtctacagcctctgccgcctcctcctcctcctcgtcttcggccggtgagatgatcgaagccccttcccaggtcctcaactttgaagagatcgactacaaggagatcgaggtggaagaggttgttggaagaggagcctttggagttgtttgcaaagctaagtggagagcaaaagatgttgctattaaacaaatagaaagtgaatctgagaggaaagcgtttattgtagagcttcggcagttatcccgtgtgaaccatcctaatattgtaaagctttatggagcctgcttgaatccagtgtgtcttgtgatggaatatgctgaagggggctctttatataatgtgctgcatggtgctgaaccattgccatattatactgctgcccacgcaatgagttggtgtttacagtgttcccaaggagtggcttatcttcacagcatgcaacccaaagcgctaattcacagggacctgaaaccaccaaacttactgctggttgcaggggggacagttctaaaaatttgtgattttggtacagcctgtgacattcagacacacatgaccaataacaaggggagtgctgcttggatggcacctgaagtttttgaaggtagtaattacagtgaaaaatgtgacgtcttcagctggggtattattctttgggaagtgataacgcgtcggaaaccctttgatgagattggtggcccagctttccgaatcatgtgggctgttcataatggtactcgaccaccactgataaaaaatttacctaagcccattgagagcctgatgactcgttgttggtctaaagatccttcccagcgcccttcaatggaggaaattgtgaaaataatgactcacttgatgcgggtataatccttcttttgaggggctttggatttaggggaatttaatatgtgctgagttttaatggaattttaaaagggatgttattactatattctgctttatatattgctatgttttctaagtgagaatgggcatttattactcatagtcagaagaggaaacatttcgagagggaaaatctagttctttatcactggaaagatggctagactaggtttctagacttgcttttttctttttgcttacattagtggacaagtatgtttgtctctgggcctgttgcctcatttgtaatgtgggagaaactgaaatagatagtctctaaagccatcacaggacttggatatattaatattatgacttcaatacatgataaactaaattttacatttttctgataccaattttcatcaagcatttagtcatttatgcaaggcaataggttgcattctcagacacatttatttgagtgacttttactatttggcctattttcaggtttttatatcccagtaaaaagttaaactttcttctatttagaagaacccttttaaatgattatcaaattttcctagtctgtgaatcaagcgcctttagaattatttggaatattttacgcctctggtttttggtacattaacaaaaactgtgaagtggtatcttggctttaaaaagttcaaatatctatgaaagtgcctgaattttgaaacagtttgttcagtagaagaatcttacaatctccttaaatatagactaagtaatttcctaaatggtaaaacgttgtttattcaatctattgaaaatttcttacgcaaagcagcttgaactaatctactaaaagtttaccatcgtatttggataccagtcatatatagaagcctaggccttaaaggtgtgtgcataagaaaacaacttagtctctgtagtcagattacttaaaactttaggatatataagttattgcagttgtaattttgcttctctgttccttgtctaatttgaggagaatacgtttcctttttttctctaaattctaacatttttgtccagcagatactttgagtattatgcctccagtttgtagaaagacattcataatctatcctcttaatatttaaaatgttctaacaattattctatggtatactagtctcagtcttcagactaacagtcactggaagtttacatcactactgtaagaacatgagtatgttttacataattatgagaaatgatactattttatttcatatgtttctctagagaaatatttgctgttttcttcaagactatctagactccaatgtaagctagattcttaggtaggtgcatggcattgatcaaagttgaaatccaagagtacattattgtaatctttgtaaaataaaaaacttaggcacctacaaatttagtatataacttagggaaaataaaacattaatcaggatttaatttgtattaaggaaattttaagctgtggtttacttttttatatatagtactttccaggagcagatgagccattacagtatccttgtcagtattcagatgaaggacagagcaactctgccaccagtacaggctcattcatggacattgcttctacaaatacgagtaacaaaagtgacactaatatggagcaagttcctgccacaaatgatactattaagcgcttagaatcaaaattgttgaaaaatcaggcaaagcaacagagtgaatctggacgtttaagcttgggagcctcccgtgggagcagtgtggagagcttgcccccaacctctgagggcaagaggatgagtgctgacatgtctgaaatagaagctaggatcgccgcaaccacagcctattccaagcctaaacggggccaccgtaaaactgcttcatttggcaacattctggatgtccctgagatcgtcatatcaggcaacggacagccaagacgtagatccatccaagacttgactgtaactggaacagaacctggtcaggtgagcagtaggtcatccagtcccagtgtcagaatgattactacctcaggaccaacctcagaaaagccaactcgaagtcatccatggacccctgatgattccacagataccaatggatcagataactccatcccaatggcttatcttacactggatcaccaactacagcctctagcaccgtgcccaaactccaaagaatctatggcagtgtttgaacagcattgtaaaatggcacaagaatatatgaaagttcaaacagaaattgcattgttattacagagaaagcaagaactagttgcagaactggaccaggatgaaaaggaccagcaaaatacatctcgcctggtacaggaacataaaaagcttttagatgaaaacaaaagcctttctacttactaccagcaatgcaaaaaacaactagaggtcatcagaagtcagcagcagaaacgacaaggcacttcatgattctctgggaccgttacattttgaaatatgcaaagaaagactttttttttaaggaaaggaaaaccttataatgacgattcatgagtgttagctttttggcgtgttctgaatgccaactgcctatatttgctgcatttttttcattgtttattttccttttctcatggtggacatacaattttactgtttcattgcataacatggtagcatctgtgacttgaatgagcagcactttgcaacttcaaaacagatgcagtgaactgtggctgtatatgcatgctcattgtgtgaaggctagcctaacagaacaggaggtatcaaactagctgctatgtgcaaacagcgtccattttttcatattagaggtggaacctcaagaatgactttattcttgtatctcatctcaaaatattaataatttttttcccaaaagatggtatataccaagttaaagacagggtattataaatttagagtgattggtggtatattacggaaatacggaacctttagggatagttccgtgtaagggctttgatgccagcatccttggatcagtactgaactcagttccatccgtaaaatatgtaaaggtaagtggcagctgctctatttaatgaaagcagttttaccggattttgttagactaaaatttgattgtgatacattgaacaaaatggaactcatttttttttaaggagtaaagatttttaattctgtgattgtgtgtatgtgtgttgaaactgtaaagcttttatgactctaatattaatctcttaaatgaaattaaaaggcaaaagaacatgattgagcttaaatgatcatttcttcctgcagtgattcttggattgttttctcatgtatttgaaaaaaaaaaaatgaagaaaaataatggaaaatggaagtaattactccagctaaaaaaagcttggacttagatttctttttatgataccaaatgagaaataaaccaggcaaatcagaaggaagttaaagaagcaaatataaattcaacaagtgtcctaattatcctggatattggaatatttgattttccttacaatcccgttctagaatgcctgccgcctttcaacactttcaagagaatttcaacacttacagagtatttatattgttaacagtaattttgctaccaaaaccttcagaataactttaataataaaatgacactgaaataatagactatacaaactctatattttttcagttggtgttaaaataagtcacattttgataccagtacaagatgtcttttaaataaggatgtcatcagtctgatttttatagcattaatgttttatgaagaaaaagttcaaaatgaaagcattaattgctgtgattattagaattctatcatgactgtattgtagtttttgctctatttcagataagcaagatctaagaagttatcaaaactattctttaaaatgctaaagcaggtaactttttcttccattattttttcctcctaccactgagttttgtaatgaattccttgtgtatacaagcaatacaggtgaatactaaactgttatttttagcttcttcaaaagctattttagaaagcttcctggaaataaatgtcttctgtcatttaatttaaataaaaggagtgttaattgttcccaaatttgattacctagctgaaacagatattggattcagcatagtaatagtaaaataaaattggcagagaaaataactgtagactaggataaagcatgactcctccatagcattgttgcttgtatgtacatctgtcactccactgaaagggacctagtcactttaaagaggccttttatctcagcacgagatatccaagcgtgaatgctaaggcttgatgtttccattaggatttagcattcgagatttcagattttatttatagtcattgatgtgttttgctgtattataacacatttaaagggaaattttattatggtttttacatgtagtcatttcataaaaatatccagataggtaaatggaagaaaatagtagattttagtcatggtaccaaatgcaagaggctgttgaacagttgcttgtttgtttacagtaagttccttgagattttcagtactgtagttgccctggacattgagtacagttcagccttactctgtttttaagtagttgtgttgtcaatttcatgcttttaagtcctgatgatccttggagatgggagaaaaagataccagggataattaaaatccacagccagtttcatcagtttcctcatccatcctgcaaataaaaatgttaacaaggagccaaacttattcgttctggttttacaatttattttgaccgttttttgggtgaaaattgcaaacagccacncccgtcncccccccgcccccgcccaannnaccccnacccnacccccgcncannccccnaccccccccccccccccncccccnnccccnnacccncncccccacccaacccngagnnanncacccncgnncnnccnnaaccncccccccnanccnancnncaaccanccnanaacacccaccccacnncaacacnacncacaaanacccnccncaanccncccncanacncccnaccacccccnccnaancaccccagancaccnaacnccccccccccccaagccccntccatgcccccaatcccagcccccgcanccagagaccacaggccccccccncganaccctggcccccccccataaatgtgtgtggttttcagcgctcaactcctgtcttcaaatggtagtaagttctacttctacttctgtcattcagaacattttatgtcaaatgatgtaatgcagaaattcttgtgcatatttgtaactgaaggaagctttttagatttatttttgtttttaataaaattcagattcctattctaaaaaaaaaaaaaaaaaaaaaaaaaaggggggggcggctaaaaaataacctagagggcaagtttaagcgtaccaggtttttggtcaaaagggccctaaggggggaataaaaggagggaggggcgtacaacgtcggtgggaaacggcgttgggctttggaagagcttcttttggtggcgtttggaatctaagaattagctaggaataatacgttatggtacacgttctgggaatgcgtaa

SEQ ID NO: 735244 - DNA, 6530 bp, Homo sapiens
ctcgtaatccataacttgagatgaacacaccaaattataaatatcttattcacctaatccgtggaaagtttgtaacaccaaaatattaacttctgttcttgatcactcagcctccatagttattcatgttgcatgatctgattcgctcttttagaatttctcatagcgtcaggtactagctcaaaataacaggagcaactgcttctttccatatcccacattgaggaaaacacattttgcaagccgtcttaaagaaacaggtcaacttagtttagggatgaaacttaaaagtaagcttcgtcacaaaaaacacagttcaacaccacctcgcccggctgcaggcagctcagaggacaggaagtgaggccaagacatatttcacgcagcacagactaaaccccagcttttatctttcccgctggtccttaagggaccaaccgtactgattttccgtcatgttccgcgccacttccgttcgcgcactttaattacgtcaggcgtcctctctcgcggtatcatccggttgctgaggccctgtaataaaggtctcgcgaaatttgttctagaggtccaagtttgcttcttagcttactccaccccacccccaacctgtccctccttttctttccaagtcacaaaattctcccctcccctaccccggagtttacggccctcctcctgtttccgatttcagcccggaaccggaagtgtagtgggcggggcccgtcggcggaaaacgcagcggagccagagccggacacggctgtggccgctgcctctacccccgccacggatcgccgggtagtaggactgcgcggctccaggctgagggtcggtccggaggcgggtgggcgcgggtctcacccggattgtccgggtggcaccgttcccggccccaccgggcgccgcgagggatcatgtctacagcctctgccgcctcctcctcctcctcgtcttcggccggtgagatgatcgaagccccttcccaggtcctcaactttgaagagatcgactacaaggagatcgaggtggaagaggttgttggaagaggagcctttggagttgtttgcaaagctaagtggagagcaaaagatgttgctattaaacaaatagaaagtgaatctgagaggaaagcgtttattgtagagcttcggcagttatcccgtgtgaaccatcctaatattgtaaagctttatggagcctgcttgaatccagtgtgtcttgtgatggaatatgctgaagggggctctttatataatgtgctgcatggtgctgaaccattgccatattatactgctgcccacgcaatgagttggtgtttacagtgttcccaaggagtggcttatcttcacagcatgcaacccaaagcgctaattcacagggacctgaaaccaccaaacttactgctggttgcaggggggacagttctaaaaatttgtgattttggtacagcctgtgacattcagacacacatgaccaataacaaggggagtgctgcttggatggcacctgaagtttttgaaggtagtaattacagtgaaaaatgtgacgtcttcagctggggtattattctttgggaagtgataacgcgtcggaaaccctttgatgagattggtggcccagctttccgaatcatgtgggctgttcataatggtactcgaccaccactgataaaaaatttacctaagcccattgagagcctgatgactcgttgttggtctaaagatccttcccagcgcccttcaatggaggaaattgtgaaaataatgactcacttgatgcgggtataatccttcttttgaggggctttggatttaggggaatttaatatgtgctgagttttaatggaattttaaaagggatgttattactatattctgctttatatattgctatgttttctaagtgagaatgggcatttattactcatagtcagaagaggaaacatttcgagagggaaaatctagttctttatcactggaaagatggctagactaggtttctagacttgcttttttctttttgcttacattagtggacaagtatgtttgtctctgggcctgttgcctcatttgtaatgtgggagaaactgaaatagatagtctctaaagccatcacaggacttggatatattaatattatgacttcaatacatgataaactaaattttacatttttctgataccaattttcatcaagcatttagtcatttatgcaaggcaataggttgcattctcagacacatttatttgagtgacttttactatttggcctattttcaggtttttatatcccagtaaaaagttaaactttcttctatttagaagaacccttttaaatgattatcaaattttcctagtctgtgaatcaagcgcctttagaattatttggaatattttacgcctctggtttttggtacattaacaaaaactgtgaagtggtatcttggctttaaaaagttcaaatatctatgaaagtgcctgaattttgaaacagtttgttcagtagaagaatcttacaatctccttaaatatagactaagtaatttcctaaatggtaaaacgttgtttattcaatctattgaaaatttcttacgcaaagcagcttgaactaatctactaaaagtttaccatcgtatttggataccagtcatatatagaagcctaggccttaaaggtgtgtgcataagaaaacaacttagtctctgtagtcagattacttaaaactttaggatatataagttattgcagttgtaattttgcttctctgttccttgtctaatttgaggagaatacgtttcctttttttctctaaattctaacatttttgtccagcagatactttgagtattatgcctccagtttgtagaaagacattcataatctatcctcttaatatttaaaatgttctaacaattattctatggtatactagtctcagtcttcagactaacagtcactggaagtttacatcactactgtaagaacatgagtatgttttacataattatgagaaatgatactattttatttcatatgtttctctagagaaatatttgctgttttcttcaagactatctagactccaatgtaagctagattcttaggtaggtgcatggcattgatcaaagttgaaatccaagagtacattattgtaatctttgtaaaataaaaaacttaggcacctacaaatttagtatataacttagggaaaataaaacattaatcaggatttaatttgtattaaggaaattttaagctgtggtttacttttttatatatagtactttccaggagcagatgagccattacagtatccttgtcagtattcagatgaaggacagagcaactctgccaccagtacaggctcattcatggacattgcttctacaaatacgagtaacaaaagtgacactaatatggagcaagttcctgccacaaatgatactattaagcgcttagaatcaaaattgttgaaaaatcaggcaaagcaacagagtgaatctggacgtttaagcttgggagcctcccgtgggagcagtgtggagagcttgcccccaacctctgagggcaagaggatgagtgctgacatgtctgaaatagaagctaggatcgccgcaaccacagcctattccaagcctaaacggggccaccgtaaaactgcttcatttggcaacattctggatgtccctgagatcgtcatatcaggcaacggacagccaagacgtagatccatccaagacttgactgtaactggaacagaacctggtcaggtgagcagtaggtcatccagtcccagtgtcagaatgattactacctcaggaccaacctcagaaaagccaactcgaagtcatccatggacccctgatgattccacagataccaatggatcagataactccatcccaatggcttatcttacactggatcaccaactacagcctctagcaccgtgcccaaactccaaagaatctatggcagtgtttgaacagcattgtaaaatggcacaagaatatatgaaagttcaaacagaaattgcattgttattacagagaaagcaagaactagttgcagaactggaccaggatgaaaaggaccagcaaaatacatctcgcctggtacaggaacataaaaagcttttagatgaaaacaaaagcctttctacttactaccagcaatgcaaaaaacaactagaggtcatcagaagtcagcagcagaaacgacaaggcacttcatgattctctgggaccgttacattttgaaatatgcaaagaaagactttttttttaaggaaaggaaaaccttataatgacgattcatgagtgttagctttttggcgtgttctgaatgccaactgcctatatttgctgcatttttttcattgtttattttccttttctcatggtggacatacaattttactgtttcattgcataacatggtagcatctgtgacttgaatgagcagcactttgcaacttcaaaacagatgcagtgaactgtggctgtatatgcatgctcattgtgtgaaggctagcctaacagaacaggaggtatcaaactagctgctatgtgcaaacagcgtccattttttcatattagaggtggaacctcaagaatgactttattcttgtatctcatctcaaaatattaataatttttttcccaaaagatggtatataccaagttaaagacagggtattataaatttagagtgattggtggtatattacggaaatacggaacctttagggatagttccgtgtaagggctttgatgccagcatccttggatcagtactgaactcagttccatccgtaaaatatgtaaaggtaagtggcagctgctctatttaatgaaagcagttttaccggattttgttagactaaaatttgattgtgatacattgaacaaaatggaactcatttttttttaaggagtaaagatttttaattctgtgattgtgtgtatgtgtgttgaaactgtaaagcttttatgactctaatattaatctcttaaatgaaattaaaaggcaaaagaacatgattgagcttaaatgatcatttcttcctgcagtgattcttggattgttttctcatgtatttgaaaaaaaaaaaatgaagaaaaataatggaaaatggaagtaattactccagctaaaaaaagcttggacttagatttctttttatgataccaaatgagaaataaaccaggcaaatcagaaggaagttaaagaagcaaatataaattcaacaagtgtcctaattatcctggatattggaatatttgattttccttacaatcccgttctagaatgcctgccgcctttcaacactttcaagagaatttcaacacttacagagtatttatattgttaacagtaattttgctaccaaaaccttcagaataactttaataataaaatgacactgaaataatagactatacaaactctatattttttcagttggtgttaaaataagtcacattttgataccagtacaagatgtcttttaaataaggatgtcatcagtctgatttttatagcattaatgttttatgaagaaaaagttcaaaatgaaagcattaattgctgtgattattagaattctatcatgactgtattgtagtttttgctctatttcagataagcaagatctaagaagttatcaaaactattctttaaaatgctaaagcaggtaactttttcttccattattttttcctcctaccactgagttttgtaatgaattccttgtgtatacaagcaatacaggtgaatactaaactgttatttttagcttcttcaaaagctattttagaaagcttcctggaaataaatgtcttctgtcatttaatttaaataaaaggagtgttaattgttcccaaatttgattacctagctgaaacagatattggattcagcatagtaatagtaaaataaaattggcagagaaaataactgtagactaggataaagcatgactcctccatagcattgttgcttgtatgtacatctgtcactccactgaaagggacctagtcactttaaagaggccttttatctcagcacgagatatccaagcgtgaatgctaaggcttgatgtttccattaggatttagcattcgagatttcagattttatttatagtcattgatgtgttttgctgtattataacacatttaaagggaaattttattatggtttttacatgtagtcatttcataaaaatatccagataggtaaatggaagaaaatagtagattttagtcatggtaccaaatgcaagaggctgttgaacagttgcttgtttgtttacagtaagttccttgagattttcagtactgtagttgccctggacattgagtacagttcagccttactctgtttttaagtagttgtgttgtcaatttcatgcttttaagtcctgatgatccttggagatgggagaaaaagataccagggataattaaaatccacagccagtttcatcagtttcctcatccatccgtcgacgcggccgcgaattta

SEQ ID NO: 735245 - DNA, 7632 bp, Homo sapiens
ctcgtaatccataacttgagatgaacacaccaaattataaatatcttattcacctaatccgtggaaagtttgtaacaccaaaatattaacttctgttcttgatcactcagcctccatagttattcatgttgcatgatctgattcgctcttttagaatttctcatagcgtcaggtactagctcaaaataacaggagcaactgcttctttccatatcccacattgaggaaaacacattttgcaagccgtcttaaagaaacaggtcaacttagtttagggatgaaacttaaaagtaagcttcgtcacaaaaaacacagttcaacaccacctcgcccggctgcaggcagctcagaggacaggaagtgaggccaagacatatttcacgcagcacagactaaaccccagcttttatctttcccgctggtccttaagggaccaaccgtactgattttccgtcatgttccgcgccacttccgttcgcgcactttaattacgtcaggcgtcctctctcgcggtatcatccggttgctgaggccctgtaataaaggtctcgcgaaatttgttctagaggtccaagtttgcttcttagcttactccaccccacccccaacctgtccctccttttctttccaagtcacaaaattctcccctcccctaccccggagtttacggccctcctcctgtttccgatttcagcccggaaccggaagtgtagtgggcggggcccgtcggcggaaaacgcagcggagccagagccggacacggctgtggccgctgcctctacccccgccacggatcgccgggtagtaggactgcgcggctccaggctgagggtcggtccggaggcgggtgggcgcgggtctcacccggattgtccgggtggcaccgttcccggccccaccgggcgccgcgagggatcatgtctacagcctctgccgcctcctcctcctcctcgtcttcggccggtgagatgatcgaagccccttcccaggtcctcaactttgaagagatcgactacaaggagatcgaggtggaagaggttgttggaagaggagcctttggagttgtttgcaaagctaagtggagagcaaaagatgttgctattaaacaaatagaaagtgaatctgagaggaaagcgtttattgtagagcttcggcagttatcccgtgtgaaccatcctaatattgtaaagctttatggagcctgcttgaatccagtgtgtcttgtgatggaatatgctgaagggggctctttatataatgtgctgcatggtgctgaaccattgccatattatactgctgcccacgcaatgagttggtgtttacagtgttcccaaggagtggcttatcttcacagcatgcaacccaaagcgctaattcacagggacctgaaaccaccaaacttactgctggttgcaggggggacagttctaaaaatttgtgattttggtacagcctgtgacattcagacacacatgaccaataacaaggggagtgctgcttggatggcacctgaagtttttgaaggtagtaattacagtgaaaaatgtgacgtcttcagctggggtattattctttgggaagtgataacgcgtcggaaaccctttgatgagattggtggcccagctttccgaatcatgtgggctgttcataatggtactcgaccaccactgataaaaaatttacctaagcccattgagagcctgatgactcgttgttggtctaaagatccttcccagcgcccttcaatggaggaaattgtgaaaataatgactcacttgatgcgggtataatccttcttttgaggggctttggatttaggggaatttaatatgtgctgagttttaatggaattttaaaagggatgttattactatattctgctttatatattgctatgttttctaagtgagaatgggcatttattactcatagtcagaagaggaaacatttcgagagggaaaatctagttctttatcactggaaagatggctagactaggtttctagacttgcttttttctttttgcttacattagtggacaagtatgtttgtctctgggcctgttgcctcatttgtaatgtgggagaaactgaaatagatagtctctaaagccatcacaggacttggatatattaatattatgacttcaatacatgataaactaaattttacatttttctgataccaattttcatcaagcatttagtcatttatgcaaggcaataggttgcattctcagacacatttatttgagtgacttttactatttggcctattttcaggtttttatatcccagtaaaaagttaaactttcttctatttagaagaacccttttaaatgattatcaaattttcctagtctgtgaatcaagcgcctttagaattatttggaatattttacgcctctggtttttggtacattaacaaaaactgtgaagtggtatcttggctttaaaaagttcaaatatctatgaaagtgcctgaattttgaaacagtttgttcagtagaagaatcttacaatctccttaaatatagactaagtaatttcctaaatggtaaaacgttgtttattcaatctattgaaaatttcttacgcaaagcagcttgaactaatctactaaaagtttaccatcgtatttggataccagtcatatatagaagcctaggccttaaaggtgtgtgcataagaaaacaacttagtctctgtagtcagattacttaaaactttaggatatataagttattgcagttgtaattttgcttctctgttccttgtctaatttgaggagaatacgtttcctttttttctctaaattctaacatttttgtccagcagatactttgagtattatgcctccagtttgtagaaagacattcataatctatcctcttaatatttaaaatgttctaacaattattctatggtatactagtctcagtcttcagactaacagtcactggaagtttacatcactactgtaagaacatgagtatgttttacataattatgagaaatgatactattttatttcatatgtttctctagagaaatatttgctgttttcttcaagactatctagactccaatgtaagctagattcttaggtaggtgcatggcattgatcaaagttgaaatccaagagtacattattgtaatctttgtaaaataaaaaacttaggcacctacaaatttagtatataacttagggaaaataaaacattaatcaggatttaatttgtattaaggaaattttaagctgtggtttacttttttatatatagtactttccaggagcagatgagccattacagtatccttgtcagtattcagatgaaggacagagcaactctgccaccagtacaggctcattcatggacattgcttctacaaatacgagtaacaaaagtgacactaatatggagcaagttcctgccacaaatgatactattaagcgcttagaatcaaaattgttgaaaaatcaggcaaagcaacagagtgaatctggacgtttaagcttgggagcctcccgtgggagcagtgtggagagcttgcccccaacctctgagggcaagaggatgagtgctgacatgtctgaaatagaagctaggatcgccgcaaccacagcctattccaagcctaaacggggccaccgtaaaactgcttcatttggcaacattctggatgtccctgagatcgtcatatcaggcaacggacagccaagacgtagatccatccaagacttgactgtaactggaacagaacctggtcaggtgagcagtaggtcatccagtcccagtgtcagaatgattactacctcaggaccaacctcagaaaagccaactcgaagtcatccatggacccctgatgattccacagataccaatggatcagataactccatcccaatggcttatcttacactggatcaccaactacagcctctagcaccgtgcccaaactccaaagaatctatggcagtgtttgaacagcattgtaaaatggcacaagaatatatgaaagttcaaacagaaattgcattgttattacagagaaagcaagaactagttgcagaactggaccaggatgaaaaggaccagcaaaatacatctcgcctggtacaggaacataaaaagcttttagatgaaaacaaaagcctttctacttactaccagcaatgcaaaaaacaactagaggtcatcagaagtcagcagcagaaacgacaaggcacttcatgattctctgggaccgttacattttgaaatatgcaaagaaagactttttttttaaggaaaggaaaaccttataatgacgattcatgagtgttagctttttggcgtgttctgaatgccaactgcctatatttgctgcatttttttcattgtttattttccttttctcatggtggacatacaattttactgtttcattgcataacatggtagcatctgtgacttgaatgagcagcactttgcaacttcaaaacagatgcagtgaactgtggctgtatatgcatgctcattgtgtgaaggctagcctaacagaacaggaggtatcaaactagctgctatgtgcaaacagcgtccattttttcatattagaggtggaacctcaagaatgactttattcttgtatctcatctcaaaatattaataatttttttcccaaaagatggtatataccaagttaaagacagggtattataaatttagagtgattggtggtatattacggaaatacggaacctttagggatagttccgtgtaagggctttgatgccagcatccttggatcagtactgaactcagttccatccgtaaaatatgtaaaggtaagtggcagctgctctatttaatgaaagcagttttaccggattttgttagactaaaatttgattgtgatacattgaacaaaatggaactcatttttttttaaggagtaaagatttttaattctgtgattgtgtgtatgtgtgttgaaactgtaaagcttttatgactctaatattaatctcttaaatgaaattaaaaggcaaaagaacatgattgagcttaaatgatcatttcttcctgcagtgattcttggattgttttctcatgtatttgaaaaaaaaaaaatgaagaaaaataatggaaaatggaagtaattactccagctaaaaaaagcttggacttagatttctttttatgataccaaatgagaaataaaccaggcaaatcagaaggaagttaaagaagcaaatataaattcaacaagtgtcctaattatcctggatattggaatatttgattttccttacaatcccgttctagaatgcctgccgcctttcaacactttcaagagaatttcaacacttacagagtatttatattgttaacagtaattttgctaccaaaaccttcagaataactttaataataaaatgacactgaaataatagactatacaaactctatattttttcagttggtgttaaaataagtcacattttgataccagtacaagatgtcttttaaataaggatgtcatcagtctgatttttatagcattaatgttttatgaagaaaaagttcaaaatgaaagcattaattgctgtgattattagaattctatcatgactgtattgtagtttttgctctatttcagataagcaagatctaagaagttatcaaaactattctttaaaatgctaaagcaggtaactttttcttccattattttttcctcctaccactgagttttgtaatgaattccttgtgtatacaagcaatacaggtgaatactaaactgttatttttagcttcttcaaaagctattttagaaagcttcctggaaataaatgtcttctgtcatttaatttaaataaaaggagtgttaattgttcccaaatttgattacctagctgaaacagatattggattcagcatagtaatagtaaaataaaattggcagagaaaataactgtagactaggataaagcatgactcctccatagcattgttgcttgtatgtacatctgtcactccactgaaagggacctagtcactttaaagaggccttttatctcagcacgagatatccaagcgtgaatgctaaggcttgatgtttccattaggatttagcattcgagatttcagattttatttatagtcattgatgtgttttgctgtattataacacatttaaagggaaattttattatggtttttacatgtagtcatttcataaaaatatccagataggtaaatggaagttgtttgtttacagtaagttccttgagattttcagtactgtagttgccctggacattgagtacagttcagccttactctgtttttaagtagttgtgttgtcaatttcatgcttttaagtcctgatgatccttggagatgggagaaaaagataccagggataattaaaatccacagccagtttcatcagtttcctcatccatcctgcaaataaaaatgttaacaaggagccaaacttattcgttctggttttacaatttattttgaccgttttttgggtgaaaattgcaaacagccaagcaagtggctggaatgccccagtctaagaaattcaaaaacaatcactgagtaagccctaattacattttactcttgactccaggaaaagaaagcaagcttttatctaatctagagggaagtattcgtgagcaataaaaatcacttttttgagttgaataataatcagttaagaatatttaccgcatagcaacacaacatataaagatttgttacaagttgtttacagatgtttgactatttttgctgaagtattttagagtattgaatgtcttctctcttcaagtttctttcatgttcctaatttcagctcctgtagccagagatcacaggtcttccctgtgaaactttggtttctttctataaatgtgtgtggttttcagcgctcaactcctgtcttcaaatggtagtaagttctacttctacttctgtcattcagaacattttatgtcaaatgatgtaatgcagaaattcttgtgcatatttgtaactgaaggaagctttttagatttatttttgtttttaataaaattcagattcctattctaaactggtacataaaagtggtgaatgacttgtatcagcaaatgagctgcgaagtgttctgctctagcaccgtgtttaccttacacagaacctactaaaaactgaaatgtcacttttgtacgataatcatggtttttaagaggctgggtaattggccagttaacacatcatctcttgcatttcaaaattttgtgttaaatggagctcttcacaatttcatgagtcctaatttgtgtgaagcacaacacgtcatacattgctaagtgattcttctcatcagaaagctgatttcttagagtatttctaagttaaattaggtatttcattcctttatcaacctgctggctttccaaccctaacatatgcacacattcttataaactctaccttcattttagtaaatccatccattcatttgctcattcttttaataaatatttgtttatcatatattataaactgcactgctattaccaataccaagttacatgtccattccagtcacacagtagtttgatggtattcccatcttacagatg

SEQ ID NO: 735246 - DNA, 7333 bp, Homo sapiens
ctcgtaatccataacttgagatgaacacaccaaattataaatatcttattcacctaatccgtggaaagtttgtaacaccaaaatattaacttctgttcttgatcactcagcctccatagttattcatgttgcatgatctgattcgctcttttagaatttctcatagcgtcaggtactagctcaaaataacaggagcaactgcttctttccatatcccacattgaggaaaacacattttgcaagccgtcttaaagaaacaggtcaacttagtttagggatgaaacttaaaagtaagcttcgtcacaaaaaacacagttcaacaccacctcgcccggctgcaggcagctcagaggacaggaagtgaggccaagacatatttcacgcagcacagactaaaccccagcttttatctttcccgctggtccttaagggaccaaccgtactgattttccgtcatgttccgcgccacttccgttcgcgcactttaattacgtcaggcgtcctctctcgcggtatcatccggttgctgaggccctgtaataaaggtctcgcgaaatttgttctagaggtccaagtttgcttcttagcttactccaccccacccccaacctgtccctccttttctttccaagtcacaaaattctcccctcccctaccccggagtttacggccctcctcctgtttccgatttcagcccggaaccggaagtgtagtgggcggggcccgtcggcggaaaacgcagcggagccagagccggacacggctgtggccgctgcctctacccccgccacggatcgccgggtagtaggactgcgcggctccaggctgagggtcggtccggaggcgggtgggcgcgggtctcacccggattgtccgggtggcaccgttcccggccccaccgggcgccgcgagggatcatgtctacagcctctgccgcctcctcctcctcctcgtcttcggccggtgagatgatcgaagccccttcccaggtcctcaactttgaagagatcgactacaaggagatcgaggtggaagaggttgttggaagaggagcctttggagttgtttgcaaagctaagtggagagcaaaagatgttgctattaaacaaatagaaagtgaatctgagaggaaagcgtttattgtagagcttcggcagttatcccgtgtgaaccatcctaatattgtaaagctttatggagcctgcttgaatccagtgtgtcttgtgatggaatatgctgaagggggctctttatataatgtgctgcatggtgctgaaccattgccatattatactgctgcccacgcaatgagttggtgtttacagtgttcccaaggagtggcttatcttcacagcatgcaacccaaagcgctaattcacagggacctgaaaccaccaaacttactgctggttgcaggggggacagttctaaaaatttgtgattttggtacagcctgtgacattcagacacacatgaccaataacaaggggagtgctgcttggatggcacctgaagtttttgaaggtagtaattacagtgaaaaatgtgacgtcttcagctggggtattattctttgggaagtgataacgcgtcggaaaccctttgatgagattggtggcccagctttccgaatcatgtgggctgttcataatggtactcgaccaccactgataaaaaatttacctaagcccattgagagcctgatgactcgttgttggtctaaagatccttcccagcgcccttcaatggaggaaattgtgaaaataatgactcacttgatgcgggtataatccttcttttgaggggctttggatttaggggaatttaatatgtgctgagttttaatggaattttaaaagggatgttattactatattctgctttatatattgctatgttttctaagtgagaatgggcatttattactcatagtcagaagaggaaacatttcgagagggaaaatctagttctttatcactggaaagatggctagactaggtttctagacttgcttttttctttttgcttacattagtggacaagtatgtttgtctctgggcctgttgcctcatttgtaatgtgggagaaactgaaatagatagtctctaaagccatcacaggacttggatatattaatattatgacttcaatacatgataaactaaattttacatttttctgataccaattttcatcaagcatttagtcatttatgcaaggcaataggttgcattctcagacacatttatttgagtgacttttactatttggcctattttcaggtttttatatcccagtaaaaagttaaactttcttctatttagaagaacccttttaaatgattatcaaattttcctagtctgtgaatcaagcgcctttagaattatttggaatattttacgcctctggtttttggtacattaacaaaaactgtgaagtggtatcttggctttaaaaagttcaaatatctatgaaagtgcctgaattttgaaacagtttgttcagtagaagaatcttacaatctccttaaatatagactaagtaatttcctaaatggtaaaacgttgtttattcaatctattgaaaatttcttacgcaaagcagcttgaactaatctactaaaagtttaccatcgtatttggataccagtcatatatagaagcctaggccttaaaggtgtgtgcataagaaaacaacttagtctctgtagtcagattacttaaaactttaggatatataagttattgcagttgtaattttgcttctctgttccttgtctaatttgaggagaatacgtttcctttttttctctaaattctaacatttttgtccagcagatactttgagtattatgcctccagtttgtagaaagacattcataatctatcctcttaatatttaaaatgttctaacaattattctatggtatactagtctcagtcttcagactaacagtcactggaagtttacatcactactgtaagaacatgagtatgttttacataattatgagaaatgatactattttatttcatatgtttctctagagaaatatttgctgttttcttcaagactatctagactccaatgtaagctagattcttaggtaggtgcatggcattgatcaaagttgaaatccaagagtacattattgtaatctttgtaaaataaaaaacttaggcacctacaaatttagtatataacttagggaaaataaaacattaatcaggatttaatttgtattaaggaaattttaagctgtggtttacttttttatatatagtactttccaggagcagatgagccattacagtatccttgtcagtattcagatgaaggacagagcaactctgccaccagtacaggctcattcatggacattgcttctacaaatacgagtaacaaaagtgacactaatatggagcaagttcctgccacaaatgatactattaagcgcttagaatcaaaattgttgaaaaatcaggcaaagcaacagagtgaatctggacgtttaagcttgggagcctcccgtgggagcagtgtggagagcttgcccccaacctctgagggcaagaggatgagtgctgacatgtctgaaatagaagctaggatcgccgcaaccacagcctattccaagcctaaacggggccaccgtaaaactgcttcatttggcaacattctggatgtccctgagatcgtcatatcaggcaacggacagccaagacgtagatccatccaagacttgactgtaactggaacagaacctggtcaggtgagcagtaggtcatccagtcccagtgtcagaatgattactacctcaggaccaacctcagaaaagccaactcgaagtcatccatggacccctgatgattccacagataccaatggatcagataactccatcccaatggcttatcttacactggatcaccaactacagcctctagcaccgtgcccaaactccaaagaatctatggcagtgtttgaacagcattgtaaaatggcacaagaatatatgaaagttcaaacagaaattgcattgttattacagagaaagcaagaactagttgcagaactggaccaggatgaaaaggaccagcaaaatacatctcgcctggtacaggaacataaaaagcttttagatgaaaacaaaagcctttctacttactaccagcaatgcaaaaaacaactagaggtcatcagaagtcagcagcagaaacgacaaggcacttcatgattctctgggaccgttacattttgaaatatgcaaagaaagactttttttttaaggaaaggaaaaccttataatgacgattcatgagtgttagctttttggcgtgttctgaatgccaactgcctatatttgctgcatttttttcattgtttattttccttttctcatggtggacatacaattttactgtttcattgcataacatggtagcatctgtgacttgaatgagcagcactttgcaacttcaaaacagatgcagtgaactgtggctgtatatgcatgctcattgtgtgaaggctagcctaacagaacaggaggtatcaaactagctgctatgtgcaaacagcgtccattttttcatattagaggtggaacctcaagaatgactttattcttgtatctcatctcaaaatattaataatttttttcccaaaagatggtatataccaagttaaagacagggtattataaatttagagtgattggtggtatattacggaaatacggaacctttagggatagttccgtgtaagggctttgatgccagcatccttggatcagtactgaactcagttccatccgtaaaatatgtaaaggtaagtggcagctgctctatttaatgaaagcagttttaccggattttgttagactaaaatttgattgtgatacattgaacaaaatggaactcatttttttttaaggagtaaagatttttaattctgtgattgtgtgtatgtgtgttgaaactgtaaagcttttatgactctaatattaatctcttaaatgaaattaaaaggcaaaagaacatgattgagcttaaatgatcatttcttcctgcagtgattcttggattgttttctcatgtatttgaaaaaaaaaaaatgaagaaaaataatggaaaatggaagtaattactccagctaaaaaaagcttggacttagatttctttttatgataccaaatgagaaataaaccaggcaaatcagaaggaagttaaagaagcaaatataaattcaacaagtgtcctaattatcctggatattggaatatttgattttccttacaatcccgttctagaatgcctgccgcctttcaacactttcaagagaatttcaacacttacagagtatttatattgttaacagtaattttgctaccaaaaccttcagaataactttaataataaaatgacactgaaataatagactatacaaactctatattttttcagttggtgttaaaataagtcacattttgataccagtacaagatgtcttttaaataaggatgtcatcagtctgatttttatagcattaatgttttatgaagaaaaagttcaaaatgaaagcattaattgctgtgattattagaattctatcatgactgtattgtagtttttgctctatttcagataagcaagatctaagaagttatcaaaactattctttaaaatgctaaagcaggtaactttttcttccattattttttcctcctaccactgagttttgtaatgaattccttgtgtatacaagcaatacaggtgaatactaaactgttatttttagcttcttcaaaagctattttagaaagcttcctggaaataaatgtcttctgtcatttaatttaaataaaaggagtgttaattgttcccaaatttgattacctagctgaaacagatattggattcagcatagtaatagtaaaataaaattggcagagaaaataactgtagactaggataaagcatgactcctccatagcattgttgcttgtatgtacatctgtcactccactgaaagggacctagtcactttaaagaggccttttatctcagcacgagatatccaagcgtgaatgctaaggcttgatgtttccattaggatttagcattcgagatttcagattttatttatagtcattgatgtgttttgctgtattataacacatttaaagggaaattttattatggtttttacatgtagtcatttcataaaaatatccagataggtaaatggaagttgtttgtttacagtaagttccttgagattttcagtactgtagttgccctggacattgagtacagttcagccttactctgtttttaagtagttgtgttgtcaatttcatgcttttaagtcctgatgatccttggagatgggagaaaaagataccagggataattaaaatccacagccagtttcatcagtttcctcatccatcctgcaaataaaaatgttaacaaggagccaaacttattcgttctggttttacaatttattttgaccgttttttgggtgaaaattgcaaacagccaagcaagtggctggaatgccccagtctaagaaattcaaaaacaatcactgagtaagccctaattacattttactcttgactccaggaaaagaaagcaagcttttatctaatctagagggaagtattcgtgagcaataaaaatcacttttttgagttgaataataatcagttaagaatatttaccgcatagcaacacaacatataaagatttgttacaagttgtttacagatgtttgactatttttgctgaagtattttagagtattgaatgtcttctctcttcaagtttctttcatgttcctaatttcagctcctgtagccagagatcacaggtcttccctgtgaaactttggtttctttctataaatgtgtgtggttttcagcgctcaactcctgtcttcaaatggtagtaagttctacttctacttctgtcattcagaacattttatgtcaaatgatgtaatgcagaaattcttgtgcatatttgtaactgaaggaagctttttagatttatttttgtttttaataaaattcagattcctattctaaaaaaaaaaaaaaaaaaaaaaaaaaggggggggcggctaaaaaataacctagagggcaagtttaagcgtaccaggtttttggtcaaaagggccctaaggggggaataaaaggagggaggggcgtacaacgtcggtgggaaacggcgttgggctttggaagagcttcttttggtggcgtttggaatctaagaattagctaggaataatacgttatggtacacgttctgggaatgcgtaa

SEQ ID NO: 735247 - DNA, 7632 bp, Homo sapiens
  misc_feature (6550)..(6550): n is a, c, g, or t
  misc_feature (6557)..(6557): n is a, c, g, or t
  misc_feature (6577)..(6579): n is a, c, g, or t
  misc_feature (6585)..(6585): n is a, c, g, or t
  misc_feature (6590)..(6590): n is a, c, g, or t
  misc_feature (6599)..(6599): n is a, c, g, or t
  misc_feature (6602)..(6603): n is a, c, g, or t
  misc_feature (6608)..(6608): n is a, c, g, or t
  misc_feature (6626)..(6626): n is a, c, g, or t
  misc_feature (6632)..(6633): n is a, c, g, or t
  misc_feature (6638)..(6639): n is a, c, g, or t
  misc_feature (6644)..(6644): n is a, c, g, or t
  misc_feature (6646)..(6646): n is a, c, g, or t
  misc_feature (6661)..(6661): n is a, c, g, or t
  misc_feature (6665)..(6666): n is a, c, g, or t
  misc_feature (6668)..(6669): n is a, c, g, or t
  misc_feature (6675)..(6675): n is a, c, g, or t
  misc_feature (6678)..(6679): n is a, c, g, or t
  misc_feature (6681)..(6682): n is a, c, g, or t
  misc_feature (6685)..(6686): n is a, c, g, or t
  misc_feature (6691)..(6691): n is a, c, g, or t
  misc_feature (6699)..(6699): n is a, c, g, or t
  misc_feature (6701)..(6701): n is a, c, g, or t
  misc_feature (6704)..(6704): n is a, c, g, or t
  misc_feature (6706)..(6706): n is a, c, g, or t
  misc_feature (6708)..(6709): n is a, c, g, or t
  misc_feature (6716)..(6716): n is a, c, g, or t
  misc_feature (6719)..(6719): n is a, c, g, or t
  misc_feature (6721)..(6721): n is a, c, g, or t
  misc_feature (6736)..(6737): n is a, c, g, or t
  misc_feature (6744)..(6744): n is a, c, g, or t
  misc_feature (6747)..(6747): n is a, c, g, or t
  misc_feature (6754)..(6754): n is a, c, g, or t
  misc_feature (6759)..(6759): n is a, c, g, or t
  misc_feature (6762)..(6762): n is a, c, g, or t
  misc_feature (6766)..(6766): n is a, c, g, or t
  misc_feature (6769)..(6769): n is a, c, g, or t
  misc_feature (6773)..(6773): n is a, c, g, or t
  misc_feature (6776)..(6776): n is a, c, g, or t
  misc_feature (6779)..(6779): n is a, c, g, or t
  misc_feature (6783)..(6783): n is a, c, g, or t
  misc_feature (6793)..(6793): n is a, c, g, or t
  misc_feature (6796)..(6796): n is a, c, g, or t
  misc_feature (6799)..(6799): n is a, c, g, or t
  misc_feature (6809)..(6809): n is a, c, g, or t
  misc_feature (6814)..(6814): n is a, c, g, or t
  misc_feature (6818)..(6818): n is a, c, g, or t
  misc_feature (6838)..(6838): n is a, c, g, or t
  misc_feature (6866)..(6866): n is a, c, g, or t
  misc_feature (6889)..(6889): n is a, c, g, or t
  misc_feature (6893)..(6893): n is a, c, g, or t
ctcgtaatccataacttgagatgaacacaccaaattataaatatcttattcacctaatccgtggaaagtttgtaacaccaaaatattaacttctgttcttgatcactcagcctccatagttattcatgttgcatgatctgattcgctcttttagaatttctcatagcgtcaggtactagctcaaaataacaggagcaactgcttctttccatatcccacattgaggaaaacacattttgcaagccgtcttaaagaaacaggtcaacttagtttagggatgaaacttaaaagtaagcttcgtcacaaaaaacacagttcaacaccacctcgcccggctgcaggcagctcagaggacaggaagtgaggccaagacatatttcacgcagcacagactaaaccccagcttttatctttcccgctggtccttaagggaccaaccgtactgattttccgtcatgttccgcgccacttccgttcgcgcactttaattacgtcaggcgtcctctctcgcggtatcatccggttgctgaggccctgtaataaaggtctcgcgaaatttgttctagaggtccaagtttgcttcttagcttactccaccccacccccaacctgtccctccttttctttccaagtcacaaaattctcccctcccctaccccggagtttacggccctcctcctgtttccgatttcagcccggaaccggaagtgtagtgggcggggcccgtcggcggaaaacgcagcggagccagagccggacacggctgtggccgctgcctctacccccgccacggatcgccgggtagtaggactgcgcggctccaggctgagggtcggtccggaggcgggtgggcgcgggtctcacccggattgtccgggtggcaccgttcccggccccaccgggcgccgcgagggatcatgtctacagcctctgccgcctcctcctcctcctcgtcttcggccggtgagatgatcgaagccccttcccaggtcctcaactttgaagagatcgactacaaggagatcgaggtggaagaggttgttggaagaggagcctttggagttgtttgcaaagctaagtggagagcaaaagatgttgctattaaacaaatagaaagtgaatctgagaggaaagcgtttattgtagagcttcggcagttatcccgtgtgaaccatcctaatattgtaaagctttatggagcctgcttgaatccagtgtgtcttgtgatggaatatgctgaagggggctctttatataatgtgctgcatggtgctgaaccattgccatattatactgctgcccacgcaatgagttggtgtttacagtgttcccaaggagtggcttatcttcacagcatgcaacccaaagcgctaattcacagggacctgaaaccaccaaacttactgctggttgcaggggggacagttctaaaaatttgtgattttggtacagcctgtgacattcagacacacatgaccaataacaaggggagtgctgcttggatggcacctgaagtttttgaaggtagtaattacagtgaaaaatgtgacgtcttcagctggggtattattctttgggaagtgataacgcgtcggaaaccctttgatgagattggtggcccagctttccgaatcatgtgggctgttcataatggtactcgaccaccactgataaaaaatttacctaagcccattgagagcctgatgactcgttgttggtctaaagatccttcccagcgcccttcaatggaggaaattgtgaaaataatgactcacttgatgcgggtataatccttcttttgaggggctttggatttaggggaatttaatatgtgctgagttttaatggaattttaaaagggatgttattactatattctgctttatatattgctatgttttctaagtgagaatgggcatttattactcatagtcagaagaggaaacatttcgagagggaaaatctagttctttatcactggaaagatggctagactaggtttctagacttgcttttttctttttgcttacattagtggacaagtatgtttgtctctgggcctgttgcctcatttgtaatgtgggagaaactgaaatagatagtctctaaagccatcacaggacttggatatattaatattatgacttcaatacatgataaactaaattttacatttttctgataccaattttcatcaagcatttagtcatttatgcaaggcaataggttgcattctcagacacatttatttgagtgacttttactatttggcctattttcaggtttttatatcccagtaaaaagttaaactttcttctatttagaagaacccttttaaatgattatcaaattttcctagtctgtgaatcaagcgcctttagaattatttggaatattttacgcctctggtttttggtacattaacaaaaactgtgaagtggtatcttggctttaaaaagttcaaatatctatgaaagtgcctgaattttgaaacagtttgttcagtagaagaatcttacaatctccttaaatatagactaagtaatttcctaaatggtaaaacgttgtttattcaatctattgaaaatttcttacgcaaagcagcttgaactaatctactaaaagtttaccatcgtatttggataccagtcatatatagaagcctaggccttaaaggtgtgtgcataagaaaacaacttagtctctgtagtcagattacttaaaactttaggatatataagttattgcagttgtaattttgcttctctgttccttgtctaatttgaggagaatacgtttcctttttttctctaaattctaacatttttgtccagcagatactttgagtattatgcctccagtttgtagaaagacattcataatctatcctcttaatatttaaaatgttctaacaattattctatggtatactagtctcagtcttcagactaacagtcactggaagtttacatcactactgtaagaacatgagtatgttttacataattatgagaaatgatactattttatttcatatgtttctctagagaaatatttgctgttttcttcaagactatctagactccaatgtaagctagattcttaggtaggtgcatggcattgatcaaagttgaaatccaagagtacattattgtaatctttgtaaaataaaaaacttaggcacctacaaatttagtatataacttagggaaaataaaacattaatcaggatttaatttgtattaaggaaattttaagctgtggtttacttttttatatatagtactttccaggagcagatgagccattacagtatccttgtcagtattcagatgaaggacagagcaactctgccaccagtacaggctcattcatggacattgcttctacaaatacgagtaacaaaagtgacactaatatggagcaagttcctgccacaaatgatactattaagcgcttagaatcaaaattgttgaaaaatcaggcaaagcaacagagtgaatctggacgtttaagcttgggagcctcccgtgggagcagtgtggagagcttgcccccaacctctgagggcaagaggatgagtgctgacatgtctgaaatagaagctaggatcgccgcaaccacagcctattccaagcctaaacggggccaccgtaaaactgcttcatttggcaacattctggatgtccctgagatcgtcatatcaggcaacggacagccaagacgtagatccatccaagacttgactgtaactggaacagaacctggtcaggtgagcagtaggtcatccagtcccagtgtcagaatgattactacctcaggaccaacctcagaaaagccaactcgaagtcatccatggacccctgatgattccacagataccaatggatcagataactccatcccaatggcttatcttacactggatcaccaactacagcctctagcaccgtgcccaaactccaaagaatctatggcagtgtttgaacagcattgtaaaatggcacaagaatatatgaaagttcaaacagaaattgcattgttattacagagaaagcaagaactagttgcagaactggaccaggatgaaaaggaccagcaaaatacatctcgcctggtacaggaacataaaaagcttttagatgaaaacaaaagcctttctacttactaccagcaatgcaaaaaacaactagaggtcatcagaagtcagcagcagaaacgacaaggcacttcatgattctctgggaccgttacattttgaaatatgcaaagaaagactttttttttaaggaaaggaaaaccttataatgacgattcatgagtgttagctttttggcgtgttctgaatgccaactgcctatatttgctgcatttttttcattgtttattttccttttctcatggtggacatacaattttactgtttcattgcataacatggtagcatctgtgacttgaatgagcagcactttgcaacttcaaaacagatgcagtgaactgtggctgtatatgcatgctcattgtgtgaaggctagcctaacagaacaggaggtatcaaactagctgctatgtgcaaacagcgtccattttttcatattagaggtggaacctcaagaatgactttattcttgtatctcatctcaaaatattaataatttttttcccaaaagatggtatataccaagttaaagacagggtattataaatttagagtgattggtggtatattacggaaatacggaacctttagggatagttccgtgtaagggctttgatgccagcatccttggatcagtactgaactcagttccatccgtaaaatatgtaaaggtaagtggcagctgctctatttaatgaaagcagttttaccggattttgttagactaaaatttgattgtgatacattgaacaaaatggaactcatttttttttaaggagtaaagatttttaattctgtgattgtgtgtatgtgtgttgaaactgtaaagcttttatgactctaatattaatctcttaaatgaaattaaaaggcaaaagaacatgattgagcttaaatgatcatttcttcctgcagtgattcttggattgttttctcatgtatttgaaaaaaaaaaaatgaagaaaaataatggaaaatggaagtaattactccagctaaaaaaagcttggacttagatttctttttatgataccaaatgagaaataaaccaggcaaatcagaaggaagttaaagaagcaaatataaattcaacaagtgtcctaattatcctggatattggaatatttgattttccttacaatcccgttctagaatgcctgccgcctttcaacactttcaagagaatttcaacacttacagagtatttatattgttaacagtaattttgctaccaaaaccttcagaataactttaataataaaatgacactgaaataatagactatacaaactctatattttttcagttggtgttaaaataagtcacattttgataccagtacaagatgtcttttaaataaggatgtcatcagtctgatttttatagcattaatgttttatgaagaaaaagttcaaaatgaaagcattaattgctgtgattattagaattctatcatgactgtattgtagtttttgctctatttcagataagcaagatctaagaagttatcaaaactattctttaaaatgctaaagcaggtaactttttcttccattattttttcctcctaccactgagttttgtaatgaattccttgtgtatacaagcaatacaggtgaatactaaactgttatttttagcttcttcaaaagctattttagaaagcttcctggaaataaatgtcttctgtcatttaatttaaataaaaggagtgttaattgttcccaaatttgattacctagctgaaacagatattggattcagcatagtaatagtaaaataaaattggcagagaaaataactgtagactaggataaagcatgactcctccatagcattgttgcttgtatgtacatctgtcactccactgaaagggacctagtcactttaaagaggccttttatctcagcacgagatatccaagcgtgaatgctaaggcttgatgtttccattaggatttagcattcgagatttcagattttatttatagtcattgatgtgttttgctgtattataacacatttaaagggaaattttattatggtttttacatgtagtcatttcataaaaatatccagataggtaaatggaagttgtttgtttacagtaagttccttgagattttcagtactgtagttgccctggacattgagtacagttcagccttactctgtttttaagtagttgtgttgtcaatttcatgcttttaagtcctgatgatccttggagatgggagaaaaagataccagggataattaaaatccacagccagtttcatcagtttcctcatccatcctgcaaataaaaatgttaacaaggagccaaacttattcgttctggttttacaatttattttgaccgttttttgggtgaaaattgcaaacagccacncccgtcncccccccgcccccgcccaannnaccccnacccnacccccgcncannccccnaccccccccccccccccncccccnnccccnnacccncncccccacccaacccngagnnanncacccncgnncnnccnnaaccncccccccnanccnancnncaaccanccnanaacacccaccccacnncaacacnacncacaaanacccnccncaanccncccncanacncccnaccacccccnccnaancaccccagancaccnaacnccccccccccccaagccccntccatgcccccaatcccagcccccgcanccagagaccacaggccccccccncganaccctggcccccccccataaatgtgtgtggttttcagcgctcaactcctgtcttcaaatggtagtaagttctacttctacttctgtcattcagaacattttatgtcaaatgatgtaatgcagaaattcttgtgcatatttgtaactgaaggaagctttttagatttatttttgtttttaataaaattcagattcctattctaaactggtacataaaagtggtgaatgacttgtatcagcaaatgagctgcgaagtgttctgctctagcaccgtgtttaccttacacagaacctactaaaaactgaaatgtcacttttgtacgataatcatggtttttaagaggctgggtaattggccagttaacacatcatctcttgcatttcaaaattttgtgttaaatggagctcttcacaatttcatgagtcctaatttgtgtgaagcacaacacgtcatacattgctaagtgattcttctcatcagaaagctgatttcttagagtatttctaagttaaattaggtatttcattcctttatcaacctgctggctttccaaccctaacatatgcacacattcttataaactctaccttcattttagtaaatccatccattcatttgctcattcttttaataaatatttgtttatcatatattataaactgcactgctattaccaataccaagttacatgtccattccagtcacacagtagtttgatggtattcccatcttacagatg

SEQ ID NO: 735248 - DNA, 7333 bp, Homo sapiens
  misc_feature (6550)..(6550): n is a, c, g, or t
  misc_feature (6557)..(6557): n is a, c, g, or t
  misc_feature (6577)..(6579): n is a, c, g, or t
  misc_feature (6585)..(6585): n is a, c, g, or t
  misc_feature (6590)..(6590): n is a, c, g, or t
  misc_feature (6599)..(6599): n is a, c, g, or t
  misc_feature (6602)..(6603): n is a, c, g, or t
  misc_feature (6608)..(6608): n is a, c, g, or t
  misc_feature (6626)..(6626): n is a, c, g, or t
  misc_feature (6632)..(6633): n is a, c, g, or t
  misc_feature (6638)..(6639): n is a, c, g, or t
  misc_feature (6644)..(6644): n is a, c, g, or t
  misc_feature (6646)..(6646): n is a, c, g, or t
  misc_feature (6661)..(6661): n is a, c, g, or t
  misc_feature (6665)..(6666): n is a, c, g, or t
  misc_feature (6668)..(6669): n is a, c, g, or t
  misc_feature (6675)..(6675): n is a, c, g, or t
  misc_feature (6678)..(6679): n is a, c, g, or t
  misc_feature (6681)..(6682): n is a, c, g, or t
  misc_feature (6685)..(6686): n is a, c, g, or t
  misc_feature (6691)..(6691): n is a, c, g, or t
  misc_feature (6699)..(6699): n is a, c, g, or t
  misc_feature (6701)..(6701): n is a, c, g, or t
  misc_feature (6704)..(6704): n is a, c, g, or t
  misc_feature (6706)..(6706): n is a, c, g, or t
  misc_feature (6708)..(6709): n is a, c, g, or t
  misc_feature (6716)..(6716): n is a, c, g, or t
  misc_feature (6719)..(6719): n is a, c, g, or t
  misc_feature (6721)..(6721): n is a, c, g, or t
  misc_feature (6736)..(6737): n is a, c, g, or t
  misc_feature (6744)..(6744): n is a, c, g, or t
  misc_feature (6747)..(6747): n is a, c, g, or t
  misc_feature (6754)..(6754): n is a, c, g, or t
  misc_feature (6759)..(6759): n is a, c, g, or t
  misc_feature (6762)..(6762): n is a, c, g, or t
  misc_feature (6766)..(6766): n is a, c, g, or t
  misc_feature (6769)..(6769): n is a, c, g, or t
  misc_feature (6773)..(6773): n is a, c, g, or t
  misc_feature (6776)..(6776): n is a, c, g, or t
  misc_feature (6779)..(6779): n is a, c, g, or t
  misc_feature (6783)..(6783): n is a, c, g, or t
  misc_feature (6793)..(6793): n is a, c, g, or t
  misc_feature (6796)..(6796): n is a, c, g, or t
  misc_feature (6799)..(6799): n is a, c, g, or t
  misc_feature (6809)..(6809): n is a, c, g, or t
  misc_feature (6814)..(6814): n is a, c, g, or t
  misc_feature (6818)..(6818): n is a, c, g, or t
  misc_feature (6838)..(6838): n is a, c, g, or t
  misc_feature (6866)..(6866): n is a, c, g, or t
  misc_feature (6889)..(6889): n is a, c, g, or t
  misc_feature (6893)..(6893): n is a, c, g, or t
ctcgtaatccataacttgagatgaacacaccaaattataaatatcttattcacctaatccgtggaaagtttgtaacaccaaaatattaacttctgttcttgatcactcagcctccatagttattcatgttgcatgatctgattcgctcttttagaatttctcatagcgtcaggtactagctcaaaataacaggagcaactgcttctttccatatcccacattgaggaaaacacattttgcaagccgtcttaaagaaacaggtcaacttagtttagggatgaaacttaaaagtaagcttcgtcacaaaaaacacagttcaacaccacctcgcccggctgcaggcagctcagaggacaggaagtgaggccaagacatatttcacgcagcacagactaaaccccagcttttatctttcccgctggtccttaagggaccaaccgtactgattttccgtcatgttccgcgccacttccgttcgcgcactttaattacgtcaggcgtcctctctcgcggtatcatccggttgctgaggccctgtaataaaggtctcgcgaaatttgttctagaggtccaagtttgcttcttagcttactccaccccacccccaacctgtccctccttttctttccaagtcacaaaattctcccctcccctaccccggagtttacggccctcctcctgtttccgatttcagcccggaaccggaagtgtagtgggcggggcccgtcggcggaaaacgcagcggagccagagccggacacggctgtggccgctgcctctacccccgccacggatcgccgggtagtaggactgcgcggctccaggctgagggtcggtccggaggcgggtgggcgcgggtctcacccggattgtccgggtggcaccgttcccggccccaccgggcgccgcgagggatcatgtctacagcctctgccgcctcctcctcctcctcgtcttcggccggtgagatgatcgaagccccttcccaggtcctcaactttgaagagatcgactacaaggagatcgaggtggaagaggttgttggaagaggagcctttggagttgtttgcaaagctaagtggagagcaaaagatgttgctattaaacaaatagaaagtgaatctgagaggaaagcgtttattgtagagcttcggcagttatcccgtgtgaaccatcctaatattgtaaagctttatggagcctgcttgaatccagtgtgtcttgtgatggaatatgctgaagggggctctttatataatgtgctgcatggtgctgaaccattgccatattatactgctgcccacgcaatgagttggtgtttacagtgttcccaaggagtggcttatcttcacagcatgcaacccaaagcgctaattcacagggacctgaaaccaccaaacttactgctggttgcaggggggacagttctaaaaatttgtgattttggtacagcctgtgacattcagacacacatgaccaataacaaggggagtgctgcttggatggcacctgaagtttttgaaggtagtaattacagtgaaaaatgtgacgtcttcagctggggtattattctttgggaagtgataacgcgtcggaaaccctttgatgagattggtggcccagctttccgaatcatgtgggctgttcataatggtactcgaccaccactgataaaaaatttacctaagcccattgagagcctgatgactcgttgttggtctaaagatccttcccagcgcccttcaatggaggaaattgtgaaaataatgactcacttgatgcgggtataatccttcttttgaggggctttggatttaggggaatttaatatgtgctgagttttaatggaattttaaaagggatgttattactatattctgctttatatattgctatgttttctaagtgagaatgggcatttattactcatagtcagaagaggaaacatttcgagagggaaaatctagttctttatcactggaaagatggctagactaggtttctagacttgcttttttctttttgcttacattagtggacaagtatgtttgtctctgggcctgttgcctcatttgtaatgtgggagaaactgaaatagatagtctctaaagccatcacaggacttggatatattaatattatgacttcaatacatgataaactaaattttacatttttctgataccaattttcatcaagcatttagtcatttatgcaaggcaataggttgcattctcagacacatttatttgagtgacttttactatttggcctattttcaggtttttatatcccagtaaaaagttaaactttcttctatttagaagaacccttttaaatgattatcaaattttcctagtctgtgaatcaagcgcctttagaattatttggaatattttacgcctctggtttttggtacattaacaaaaactgtgaagtggtatcttggctttaaaaagttcaaatatctatgaaagtgcctgaattttgaaacagtttgttcagtagaagaatcttacaatctccttaaatatagactaagtaatttcctaaatggtaaaacgttgtttattcaatctattgaaaatttcttacgcaaagcagcttgaactaatctactaaaagtttaccatcgtatttggataccagtcatatatagaagcctaggccttaaaggtgtgtgcataagaaaacaacttagtctctgtagtcagattacttaaaactttaggatatataagttattgcagttgtaattttgcttctctgttccttgtctaatttgaggagaatacgtttcctttttttctctaaattctaacatttttgtccagcagatactttgagtattatgcctccagtttgtagaaagacattcataatctatcctcttaatatttaaaatgttctaacaattattctatggtatactagtctcagtcttcagactaacagtcactggaagtttacatcactactgtaagaacatgagtatgttttacataattatgagaaatgatactattttatttcatatgtttctctagagaaatatttgctgttttcttcaagactatctagactccaatgtaagctagattcttaggtaggtgcatggcattgatcaaagttgaaatccaagagtacattattgtaatctttgtaaaataaaaaacttaggcacctacaaatttagtatataacttagggaaaataaaacattaatcaggatttaatttgtattaaggaaattttaagctgtggtttacttttttatatatagtactttccaggagcagatgagccattacagtatccttgtcagtattcagatgaaggacagagcaactctgccaccagtacaggctcattcatggacattgcttctacaaatacgagtaacaaaagtgacactaatatggagcaagttcctgccacaaatgatactattaagcgcttagaatcaaaattgttgaaaaatcaggcaaagcaacagagtgaatctggacgtttaagcttgggagcctcccgtgggagcagtgtggagagcttgcccccaacctctgagggcaagaggatgagtgctgacatgtctgaaatagaagctaggatcgccgcaaccacagcctattccaagcctaaacggggccaccgtaaaactgcttcatttggcaacattctggatgtccctgagatcgtcatatcaggcaacggacagccaagacgtagatccatccaagacttgactgtaactggaacagaacctggtcaggtgagcagtaggtcatccagtcccagtgtcagaatgattactacctcaggaccaacctcagaaaagccaactcgaagtcatccatggacccctgatgattccacagataccaatggatcagataactccatcccaatggcttatcttacactggatcaccaactacagcctctagcaccgtgcccaaactccaaagaatctatggcagtgtttgaacagcattgtaaaatggcacaagaatatatgaaagttcaaacagaaattgcattgttattacagagaaagcaagaactagttgcagaactggaccaggatgaaaaggaccagcaaaatacatctcgcctggtacaggaacataaaaagcttttagatgaaaacaaaagcctttctacttactaccagcaatgcaaaaaacaactagaggtcatcagaagtcagcagcagaaacgacaaggcacttcatgattctctgggaccgttacattttgaaatatgcaaagaaagactttttttttaaggaaaggaaaaccttataatgacgattcatgagtgttagctttttggcgtgttctgaatgccaactgcctatatttgctgcatttttttcattgtttattttccttttctcatggtggacatacaattttactgtttcattgcataacatggtagcatctgtgacttgaatgagcagcactttgcaacttcaaaacagatgcagtgaactgtggctgtatatgcatgctcattgtgtgaaggctagcctaacagaacaggaggtatcaaactagctgctatgtgcaaacagcgtccattttttcatattagaggtggaacctcaagaatgactttattcttgtatctcatctcaaaatattaataatttttttcccaaaagatggtatataccaagttaaagacagggtattataaatttagagtgattggtggtatattacggaaatacggaacctttagggatagttccgtgtaagggctttgatgccagcatccttggatcagtactgaactcagttccatccgtaaaatatgtaaaggtaagtggcagctgctctatttaatgaaagcagttttaccggattttgttagactaaaatttgattgtgatacattgaacaaaatggaactcatttttttttaaggagtaaagatttttaattctgtgattgtgtgtatgtgtgttgaaactgtaaagcttttatgactctaatattaatctcttaaatgaaattaaaaggcaaaagaacatgattgagcttaaatgatcatttcttcctgcagtgattcttggattgttttctcatgtatttgaaaaaaaaaaaatgaagaaaaataatggaaaatggaagtaattactccagctaaaaaaagcttggacttagatttctttttatgataccaaatgagaaataaaccaggcaaatcagaaggaagttaaagaagcaaatataaattcaacaagtgtcctaattatcctggatattggaatatttgattttccttacaatcccgttctagaatgcctgccgcctttcaacactttcaagagaatttcaacacttacagagtatttatattgttaacagtaattttgctaccaaaaccttcagaataactttaataataaaatgacactgaaataatagactatacaaactctatattttttcagttggtgttaaaataagtcacattttgataccagtacaagatgtcttttaaataaggatgtcatcagtctgatttttatagcattaatgttttatgaagaaaaagttcaaaatgaaagcattaattgctgtgattattagaattctatcatgactgtattgtagtttttgctctatttcagataagcaagatctaagaagttatcaaaactattctttaaaatgctaaagcaggtaactttttcttccattattttttcctcctaccactgagttttgtaatgaattccttgtgtatacaagcaatacaggtgaatactaaactgttatttttagcttcttcaaaagctattttagaaagcttcctggaaataaatgtcttctgtcatttaatttaaataaaaggagtgttaattgttcccaaatttgattacctagctgaaacagatattggattcagcatagtaatagtaaaataaaattggcagagaaaataactgtagactaggataaagcatgactcctccatagcattgttgcttgtatgtacatctgtcactccactgaaagggacctagtcactttaaagaggccttttatctcagcacgagatatccaagcgtgaatgctaaggcttgatgtttccattaggatttagcattcgagatttcagattttatttatagtcattgatgtgttttgctgtattataacacatttaaagggaaattttattatggtttttacatgtagtcatttcataaaaatatccagataggtaaatggaagttgtttgtttacagtaagttccttgagattttcagtactgtagttgccctggacattgagtacagttcagccttactctgtttttaagtagttgtgttgtcaatttcatgcttttaagtcctgatgatccttggagatgggagaaaaagataccagggataattaaaatccacagccagtttcatcagtttcctcatccatcctgcaaataaaaatgttaacaaggagccaaacttattcgttctggttttacaatttattttgaccgttttttgggtgaaaattgcaaacagccacncccgtcncccccccgcccccgcccaannnaccccnacccnacccccgcncannccccnaccccccccccccccccncccccnnccccnnacccncncccccacccaacccngagnnanncacccncgnncnnccnnaaccncccccccnanccnancnncaaccanccnanaacacccaccccacnncaacacnacncacaaanacccnccncaanccncccncanacncccnaccacccccnccnaancaccccagancaccnaacnccccccccccccaagccccntccatgcccccaatcccagcccccgcanccagagaccacaggccccccccncganaccctggcccccccccataaatgtgtgtggttttcagcgctcaactcctgtcttcaaatggtagtaagttctacttctacttctgtcattcagaacattttatgtcaaatgatgtaatgcagaaattcttgtgcatatttgtaactgaaggaagctttttagatttatttttgtttttaataaaattcagattcctattctaaaaaaaaaaaaaaaaaaaaaaaaaaggggggggcggctaaaaaataacctagagggcaagtttaagcgtaccaggtttttggtcaaaagggccctaaggggggaataaaaggagggaggggcgtacaacgtcggtgggaaacggcgttgggctttggaagagcttcttttggtggcgtttggaatctaagaattagctaggaataatacgttatggtacacgttctgggaatgcgtaa

SEQ ID NO: 735249 - DNA, 6476 bp, Homo sapiens
ctcgtaatccataacttgagatgaacacaccaaattataaatatcttattcacctaatccgtggaaagtttgtaacaccaaaatattaacttctgttcttgatcactcagcctccatagttattcatgttgcatgatctgattcgctcttttagaatttctcatagcgtcaggtactagctcaaaataacaggagcaactgcttctttccatatcccacattgaggaaaacacattttgcaagccgtcttaaagaaacaggtcaacttagtttagggatgaaacttaaaagtaagcttcgtcacaaaaaacacagttcaacaccacctcgcccggctgcaggcagctcagaggacaggaagtgaggccaagacatatttcacgcagcacagactaaaccccagcttttatctttcccgctggtccttaagggaccaaccgtactgattttccgtcatgttccgcgccacttccgttcgcgcactttaattacgtcaggcgtcctctctcgcggtatcatccggttgctgaggccctgtaataaaggtctcgcgaaatttgttctagaggtccaagtttgcttcttagcttactccaccccacccccaacctgtccctccttttctttccaagtcacaaaattctcccctcccctaccccggagtttacggccctcctcctgtttccgatttcagcccggaaccggaagtgtagtgggcggggcccgtcggcggaaaacgcagcggagccagagccggacacggctgtggccgctgcctctacccccgccacggatcgccgggtagtaggactgcgcggctccaggctgagggtcggtccggaggcgggtgggcgcgggtctcacccggattgtccgggtggcaccgttcccggccccaccgggcgccgcgagggatcatgtctacagcctctgccgcctcctcctcctcctcgtcttcggccggtgagatgatcgaagccccttcccaggtcctcaactttgaagagatcgactacaaggagatcgaggtggaagaggttgttggaagaggagcctttggagttgtttgcaaagctaagtggagagcaaaagatgttgctattaaacaaatagaaagtgaatctgagaggaaagcgtttattgtagagcttcggcagttatcccgtgtgaaccatcctaatattgtaaagctttatggagcctgcttgaatccagtgtgtcttgtgatggaatatgctgaagggggctctttatataatgtgctgcatggtgctgaaccattgccatattatactgctgcccacgcaatgagttggtgtttacagtgttcccaaggagtggcttatcttcacagcatgcaacccaaagcgctaattcacagggacctgaaaccaccaaacttactgctggttgcaggggggacagttctaaaaatttgtgattttggtacagcctgtgacattcagacacacatgaccaataacaaggggagtgctgcttggatggcacctgaagtttttgaaggtagtaattacagtgaaaaatgtgacgtcttcagctggggtattattctttgggaagtgataacgcgtcggaaaccctttgatgagattggtggcccagctttccgaatcatgtgggctgttcataatggtactcgaccaccactgataaaaaatttacctaagcccattgagagcctgatgactcgttgttggtctaaagatccttcccagcgcccttcaatggaggaaattgtgaaaataatgactcacttgatgcgggtataatccttcttttgaggggctttggatttaggggaatttaatatgtgctgagttttaatggaattttaaaagggatgttattactatattctgctttatatattgctatgttttctaagtgagaatgggcatttattactcatagtcagaagaggaaacatttcgagagggaaaatctagttctttatcactggaaagatggctagactaggtttctagacttgcttttttctttttgcttacattagtggacaagtatgtttgtctctgggcctgttgcctcatttgtaatgtgggagaaactgaaatagatagtctctaaagccatcacaggacttggatatattaatattatgacttcaatacatgataaactaaattttacatttttctgataccaattttcatcaagcatttagtcatttatgcaaggcaataggttgcattctcagacacatttatttgagtgacttttactatttggcctattttcaggtttttatatcccagtaaaaagttaaactttcttctatttagaagaacccttttaaatgattatcaaattttcctagtctgtgaatcaagcgcctttagaattatttggaatattttacgcctctggtttttggtacattaacaaaaactgtgaagtggtatcttggctttaaaaagttcaaatatctatgaaagtgcctgaattttgaaacagtttgttcagtagaagaatcttacaatctccttaaatatagactaagtaatttcctaaatggtaaaacgttgtttattcaatctattgaaaatttcttacgcaaagcagcttgaactaatctactaaaagtttaccatcgtatttggataccagtcatatatagaagcctaggccttaaaggtgtgtgcataagaaaacaacttagtctctgtagtcagattacttaaaactttaggatatataagttattgcagttgtaattttgcttctctgttccttgtctaatttgaggagaatacgtttcctttttttctctaaattctaacatttttgtccagcagatactttgagtattatgcctccagtttgtagaaagacattcataatctatcctcttaatatttaaaatgttctaacaattattctatggtatactagtctcagtcttcagactaacagtcactggaagtttacatcactactgtaagaacatgagtatgttttacataattatgagaaatgatactattttatttcatatgtttctctagagaaatatttgctgttttcttcaagactatctagactccaatgtaagctagattcttaggtaggtgcatggcattgatcaaagttgaaatccaagagtacattattgtaatctttgtaaaataaaaaacttaggcacctacaaatttagtatataacttagggaaaataaaacattaatcaggatttaatttgtattaaggaaattttaagctgtggtttacttttttatatatagtactttccaggagcagatgagccattacagtatccttgtcagtattcagatgaaggacagagcaactctgccaccagtacaggctcattcatggacattgcttctacaaatacgagtaacaaaagtgacactaatatggagcaagttcctgccacaaatgatactattaagcgcttagaatcaaaattgttgaaaaatcaggcaaagcaacagagtgaatctggacgtttaagcttgggagcctcccgtgggagcagtgtggagagcttgcccccaacctctgagggcaagaggatgagtgctgacatgtctgaaatagaagctaggatcgccgcaaccacagcctattccaagcctaaacggggccaccgtaaaactgcttcatttggcaacattctggatgtccctgagatcgtcatatcaggcaacggacagccaagacgtagatccatccaagacttgactgtaactggaacagaacctggtcaggtgagcagtaggtcatccagtcccagtgtcagaatgattactacctcaggaccaacctcagaaaagccaactcgaagtcatccatggacccctgatgattccacagataccaatggatcagataactccatcccaatggcttatcttacactggatcaccaactacagcctctagcaccgtgcccaaactccaaagaatctatggcagtgtttgaacagcattgtaaaatggcacaagaatatatgaaagttcaaacagaaattgcattgttattacagagaaagcaagaactagttgcagaactggaccaggatgaaaaggaccagcaaaatacatctcgcctggtacaggaacataaaaagcttttagatgaaaacaaaagcctttctacttactaccagcaatgcaaaaaacaactagaggtcatcagaagtcagcagcagaaacgacaaggcacttcatgattctctgggaccgttacattttgaaatatgcaaagaaagactttttttttaaggaaaggaaaaccttataatgacgattcatgagtgttagctttttggcgtgttctgaatgccaactgcctatatttgctgcatttttttcattgtttattttccttttctcatggtggacatacaattttactgtttcattgcataacatggtagcatctgtgacttgaatgagcagcactttgcaacttcaaaacagatgcagtgaactgtggctgtatatgcatgctcattgtgtgaaggctagcctaacagaacaggaggtatcaaactagctgctatgtgcaaacagcgtccattttttcatattagaggtggaacctcaagaatgactttattcttgtatctcatctcaaaatattaataatttttttcccaaaagatggtatataccaagttaaagacagggtattataaatttagagtgattggtggtatattacggaaatacggaacctttagggatagttccgtgtaagggctttgatgccagcatccttggatcagtactgaactcagttccatccgtaaaatatgtaaaggtaagtggcagctgctctatttaatgaaagcagttttaccggattttgttagactaaaatttgattgtgatacattgaacaaaatggaactcatttttttttaaggagtaaagatttttaattctgtgattgtgtgtatgtgtgttgaaactgtaaagcttttatgactctaatattaatctcttaaatgaaattaaaaggcaaaagaacatgattgagcttaaatgatcatttcttcctgcagtgattcttggattgttttctcatgtatttgaaaaaaaaaaaatgaagaaaaataatggaaaatggaagtaattactccagctaaaaaaagcttggacttagatttctttttatgataccaaatgagaaataaaccaggcaaatcagaaggaagttaaagaagcaaatataaattcaacaagtgtcctaattatcctggatattggaatatttgattttccttacaatcccgttctagaatgcctgccgcctttcaacactttcaagagaatttcaacacttacagagtatttatattgttaacagtaattttgctaccaaaaccttcagaataactttaataataaaatgacactgaaataatagactatacaaactctatattttttcagttggtgttaaaataagtcacattttgataccagtacaagatgtcttttaaataaggatgtcatcagtctgatttttatagcattaatgttttatgaagaaaaagttcaaaatgaaagcattaattgctgtgattattagaattctatcatgactgtattgtagtttttgctctatttcagataagcaagatctaagaagttatcaaaactattctttaaaatgctaaagcaggtaactttttcttccattattttttcctcctaccactgagttttgtaatgaattccttgtgtatacaagcaatacaggtgaatactaaactgttatttttagcttcttcaaaagctattttagaaagcttcctggaaataaatgtcttctgtcatttaatttaaataaaaggagtgttaattgttcccaaatttgattacctagctgaaacagatattggattcagcatagtaatagtaaaataaaattggcagagaaaataactgtagactaggataaagcatgactcctccatagcattgttgcttgtatgtacatctgtcactccactgaaagggacctagtcactttaaagaggccttttatctcagcacgagatatccaagcgtgaatgctaaggcttgatgtttccattaggatttagcattcgagatttcagattttatttatagtcattgatgtgttttgctgtattataacacatttaaagggaaattttattatggtttttacatgtagtcatttcataaaaatatccagataggtaaatggaagttgtttgtttacagtaagttccttgagattttcagtactgtagttgccctggacattgagtacagttcagccttactctgtttttaagtagttgtgttgtcaatttcatgcttttaagtcctgatgatccttggagatgggagaaaaagataccagggataattaaaatccacagccagtttcatcagtttcctcatccatccgtcgacgcggccgcgaattta

SEQ ID NO: 735250 - DNA, 6472 bp, Homo sapiens
ctcgtaatccataacttgagatgaacacaccaaattataaatatcttattcacctaatccgtggaaagtttgtaacaccaaaatattaacttctgttcttgatcactcagcctccatagttattcatgttgcatgatctgattcgctcttttagaatttctcatagcgtcaggtactagctcaaaataacaggagcaactgcttctttccatatcccacattgaggaaaacacattttgcaagccgtcttaaagaaacaggtcaacttagtttagggatgaaacttaaaagtaagcttcgtcacaaaaaacacagttcaacaccacctcgcccggctgcaggcagctcagaggacaggaagtgaggccaagacatatttcacgcagcacagactaaaccccagcttttatctttcccgctggtccttaagggaccaaccgtactgattttccgtcatgttccgcgccacttccgttcgcgcactttaattacgtcaggcgtcctctctcgcggtatcatccggttgctgaggccctgtaataaaggtctcgcgaaatttgttctagaggtccaagtttgcttcttagcttactccaccccacccccaacctgtccctccttttctttccaagtcacaaaattctcccctcccctaccccggagtttacggccctcctcctgtttccgatttcagcccggaaccggaagtgtagtgggcggggcccgtcggcggaaaacgcagcggagccagagccggacacggctgtggccgctgcctctacccccgccacggatcgccgggtagtaggactgcgcggctccaggctgagggtcggtccggaggcgggtgggcgcgggtctcacccggattgtccgggtggcaccgttcccggccccaccgggcgccgcgagggatcatgtctacagcctctgccgcctcctcctcctcctcgtcttcggccggtgagatgatcgaagccccttcccaggtcctcaactttgaagagatcgactacaaggagatcgaggtggaagaggttgttggaagaggagcctttggagttgtttgcaaagctaagtggagagcaaaagatgttgctattaaacaaatagaaagtgaatctgagaggaaagcgtttattgtagagcttcggcagttatcccgtgtgaaccatcctaatattgtaaagctttatggagcctgcttgaatccagtgtgtcttgtgatggaatatgctgaagggggctctttatataatgtgctgcatggtgctgaaccattgccatattatactgctgcccacgcaatgagttggtgtttacagtgttcccaaggagtggcttatcttcacagcatgcaacccaaagcgctaattcacagggacctgaaaccaccaaacttactgctggttgcaggggggacagttctaaaaatttgtgattttggtacagcctgtgacattcagacacacatgaccaataacaaggggagtgctgcttggatggcacctgaagtttttgaaggtagtaattacagtgaaaaatgtgacgtcttcagctggggtattattctttgggaagtgataacgcgtcggaaaccctttgatgagattggtggcccagctttccgaatcatgtgggctgttcataatggtactcgaccaccactgataaaaaatttacctaagcccattgagagcctgatgactcgttgttggtctaaagatccttcccagcgcccttcaatggaggaaattgtgaaaataatgactcacttgatgcgggtataatccttcttttgaggggctttggatttaggggaatttaatatgtgctgagttttaatggaattttaaaagggatgttattactatattctgctttatatattgctatgttttctaagtgagaatgggcatttattactcatagtcagaagaggaaacatttcgagagggaaaatctagttctttatcactggaaagatggctagactaggtttctagacttgcttttttctttttgcttacattagtggacaagtatgtttgtctctgggcctgttgcctcatttgtaatgtgggagaaactgaaatagatagtctctaaagccatcacaggacttggatatattaatattatgacttcaatacatgataaactaaattttacatttttctgataccaattttcatcaagcatttagtcatttatgcaaggcaataggttgcattctcagacacatttatttgagtgacttttactatttggcctattttcaggtttttatatcccagtaaaaagttaaactttcttctatttagaagaacccttttaaatgattatcaaattttcctagtctgtgaatcaagcgcctttagaattatttggaatattttacgcctctggtttttggtacattaacaaaaactgtgaagtggtatcttggctttaaaaagttcaaatatctatgaaagtgcctgaattttgaaacagtttgttcagtagaagaatcttacaatctccttaaatatagactaagtaatttcctaaatggtaaaacgttgtttattcaatctattgaaaatttcttacgcaaagcagcttgaactaatctactaaaagtttaccatcgtatttggataccagtcatatatagaagcctaggccttaaaggtgtgtgcataagaaaacaacttagtctctgtagtcagattacttaaaactttaggatatataagttattgcagttgtaattttgcttctctgttccttgtctaatttgaggagaatacgtttcctttttttctctaaattctaacatttttgtccagcagatactttgagtattatgcctccagtttgtagaaagacattcataatctatcctcttaatatttaaaatgttctaacaattattctatggtatactagtctcagtcttcagactaacagtcactggaagtttacatcactactgtaagaacatgagtatgttttacataattatgagaaatgatactattttatttcatatgtttctctagagaaatatttgctgttttcttcaagactatctagactccaatgtaagctagattcttaggtaggtgcatggcattgatcaaagttgaaatccaagagtacattattgtaatctttgtaaaataaaaaacttaggcacctacaaatttagtatataacttagggaaaataaaacattaatcaggatttaatttgtattaaggaaattttaagctgtggtttacttttttatatatagtactttccaggagcagatgagccattacagtatccttgtcagtattcagatgaaggacagagcaactctgccaccagtacaggctcattcatggacattgcttctacaaatacgagtaacaaaagtgacactaatatggagcaagttcctgccacaaatgatactattaagcgcttagaatcaaaattgttgaaaaatcaggcaaagcaacagagtgaatctggacgtttaagcttgggagcctcccgtgggagcagtgtggagagcttgcccccaacctctgagggcaagaggatgagtgctgacatgtctgaaatagaagctaggatcgccgcaaccacagcctattccaagcctaaacggggccaccgtaaaactgcttcatttggcaacattctggatgtccctgagatcgtcatatcaggcaacggacagccaagacgtagatccatccaagacttgactgtaactggaacagaacctggtcaggtgagcagtaggtcatccagtcccagtgtcagaatgattactacctcaggaccaacctcagaaaagccaactcgaagtcatccatggacccctgatgattccacagataccaatggatcagataactccatcccaatggcttatcttacactggatcaccaactacagcctctagcaccgtgcccaaactccaaagaatctatggcagtgtttgaacagcattgtaaaatggcacaagaatatatgaaagttcaaacagaaattgcattgttattacagagaaagcaagaactagttgcagaactggaccaggatgaaaaggaccagcaaaatacatctcgcctggtacaggaacataaaaagcttttagatgaaaacaaaagcctttctacttactaccagcaatgcaaaaaacaactagaggtcatcagaagtcagcagcagaaacgacaaggcacttcatgattctctgggaccgttacattttgaaatatgcaaagaaagactttttttttaaggaaaggaaaaccttataatgacgattcatgagtgttagctttttggcgtgttctgaatgccaactgcctatatttgctgcatttttttcattgtttattttccttttctcatggtggacatacaattttactgtttcattgcataacatggtagcatctgtgacttgaatgagcagcactttgcaacttcaaaacagatgcagtgaactgtggctgtatatgcatgctcattgtgtgaaggctagcctaacagaacaggaggtatcaaactagctgctatgtgcaaacagcgtccattttttcatattagaggtggaacctcaagaatgactttattcttgtatctcatctcaaaatattaataatttttttcccaaaagatggtatataccaagttaaagacagggtattataaatttagagtgattggtggtatattacggaaatacggaacctttagggatagttccgtgtaagggctttgatgccagcatccttggatcagtactgaactcagttccatccgtaaaatatgtaaaggtaagtggcagctgctctatttaatgaaagcagttttaccggattttgttagactaaaatttgattgtgatacattgaacaaaatggaactcatttttttttaaggagtaaagatttttaattctgtgattgtgtgtatgtgtgttgaaactgtaaagcttttatgactctaatattaatctcttaaatgaaattaaaaggcaaaagaacatgattgagcttaaatgatcatttcttcctgcagtgattcttggattgttttctcatgtatttgaaaaaaaaaaaatgaagaaaaataatggaaaatggaagtaattactccagctaaaaaaagcttggacttagatttctttttatgataccaaatgagaaataaaccaggcaaatcagaaggaagttaaagaagcaaatataaattcaacaagtgtcctaattatcctggatattggaatatttgattttccttacaatcccgttctagaatgcctgccgcctttcaacactttcaagagaatttcaacacttacagagtatttatattgttaacagtaattttgctaccaaaaccttcagaataactttaataataaaatgacactgaaataatagactatacaaactctatattttttcagttggtgttaaaataagtcacattttgataccagtacaagatgtcttttaaataaggatgtcatcagtctgatttttatagcattaatgttttatgaagaaaaagttcaaaatgaaagcattaattgctgtgattattagaattctatcatgactgtattgtagtttttgctctatttcagataagcaagatctaagaagttatcaaaactattctttaaaatgctaaagcagctcctgtagccagagatcacaggtcttccctgtgaaactttggtttctttctataaatgtgtgtggttttcagcgctcaactcctgtcttcaaatggtagtaagttctacttctacttctgtcattcagaacattttatgtcaaatgatgtaatgcagaaattcttgtgcatatttgtaactgaaggaagctttttagatttatttttgtttttaataaaattcagattcctattctaaactggtacataaaagtggtgaatgacttgtatcagcaaatgagctgcgaagtgttctgctctagcaccgtgtttaccttacacagaacctactaaaaactgaaatgtcacttttgtacgataatcatggtttttaagaggctgggtaattggccagttaacacatcatctcttgcatttcaaaattttgtgttaaatggagctcttcacaatttcatgagtcctaatttgtgtgaagcacaacacgtcatacattgctaagtgattcttctcatcagaaagctgatttcttagagtatttctaagttaaattaggtatttcattcctttatcaacctgctggctttccaaccctaacatatgcacacattcttataaactctaccttcattttagtaaatccatccattcatttgctcattcttttaataaatatttgtttatcatatattataaactgcactgctattaccaataccaagttacatgtccattccagtcacacagtagtttgatggtattcccatcttacagatg

SEQ ID NO: 735251 - DNA, 6173 bp, Homo sapiens
ctcgtaatccataacttgagatgaacacaccaaattataaatatcttattcacctaatccgtggaaagtttgtaacaccaaaatattaacttctgttcttgatcactcagcctccatagttattcatgttgcatgatctgattcgctcttttagaatttctcatagcgtcaggtactagctcaaaataacaggagcaactgcttctttccatatcccacattgaggaaaacacattttgcaagccgtcttaaagaaacaggtcaacttagtttagggatgaaacttaaaagtaagcttcgtcacaaaaaacacagttcaacaccacctcgcccggctgcaggcagctcagaggacaggaagtgaggccaagacatatttcacgcagcacagactaaaccccagcttttatctttcccgctggtccttaagggaccaaccgtactgattttccgtcatgttccgcgccacttccgttcgcgcactttaattacgtcaggcgtcctctctcgcggtatcatccggttgctgaggccctgtaataaaggtctcgcgaaatttgttctagaggtccaagtttgcttcttagcttactccaccccacccccaacctgtccctccttttctttccaagtcacaaaattctcccctcccctaccccggagtttacggccctcctcctgtttccgatttcagcccggaaccggaagtgtagtgggcggggcccgtcggcggaaaacgcagcggagccagagccggacacggctgtggccgctgcctctacccccgccacggatcgccgggtagtaggactgcgcggctccaggctgagggtcggtccggaggcgggtgggcgcgggtctcacccggattgtccgggtggcaccgttcccggccccaccgggcgccgcgagggatcatgtctacagcctctgccgcctcctcctcctcctcgtcttcggccggtgagatgatcgaagccccttcccaggtcctcaactttgaagagatcgactacaaggagatcgaggtggaagaggttgttggaagaggagcctttggagttgtttgcaaagctaagtggagagcaaaagatgttgctattaaacaaatagaaagtgaatctgagaggaaagcgtttattgtagagcttcggcagttatcccgtgtgaaccatcctaatattgtaaagctttatggagcctgcttgaatccagtgtgtcttgtgatggaatatgctgaagggggctctttatataatgtgctgcatggtgctgaaccattgccatattatactgctgcccacgcaatgagttggtgtttacagtgttcccaaggagtggcttatcttcacagcatgcaacccaaagcgctaattcacagggacctgaaaccaccaaacttactgctggttgcaggggggacagttctaaaaatttgtgattttggtacagcctgtgacattcagacacacatgaccaataacaaggggagtgctgcttggatggcacctgaagtttttgaaggtagtaattacagtgaaaaatgtgacgtcttcagctggggtattattctttgggaagtgataacgcgtcggaaaccctttgatgagattggtggcccagctttccgaatcatgtgggctgttcataatggtactcgaccaccactgataaaaaatttacctaagcccattgagagcctgatgactcgttgttggtctaaagatccttcccagcgcccttcaatggaggaaattgtgaaaataatgactcacttgatgcgggtataatccttcttttgaggggctttggatttaggggaatttaatatgtgctgagttttaatggaattttaaaagggatgttattactatattctgctttatatattgctatgttttctaagtgagaatgggcatttattactcatagtcagaagaggaaacatttcgagagggaaaatctagttctttatcactggaaagatggctagactaggtttctagacttgcttttttctttttgcttacattagtggacaagtatgtttgtctctgggcctgttgcctcatttgtaatgtgggagaaactgaaatagatagtctctaaagccatcacaggacttggatatattaatattatgacttcaatacatgataaactaaattttacatttttctgataccaattttcatcaagcatttagtcatttatgcaaggcaataggttgcattctcagacacatttatttgagtgacttttactatttggcctattttcaggtttttatatcccagtaaaaagttaaactttcttctatttagaagaacccttttaaatgattatcaaattttcctagtctgtgaatcaagcgcctttagaattatttggaatattttacgcctctggtttttggtacattaacaaaaactgtgaagtggtatcttggctttaaaaagttcaaatatctatgaaagtgcctgaattttgaaacagtttgttcagtagaagaatcttacaatctccttaaatatagactaagtaatttcctaaatggtaaaacgttgtttattcaatctattgaaaatttcttacgcaaagcagcttgaactaatctactaaaagtttaccatcgtatttggataccagtcatatatagaagcctaggccttaaaggtgtgtgcataagaaaacaacttagtctctgtagtcagattacttaaaactttaggatatataagttattgcagttgtaattttgcttctctgttccttgtctaatttgaggagaatacgtttcctttttttctctaaattctaacatttttgtccagcagatactttgagtattatgcctccagtttgtagaaagacattcataatctatcctcttaatatttaaaatgttctaacaattattctatggtatactagtctcagtcttcagactaacagtcactggaagtttacatcactactgtaagaacatgagtatgttttacataattatgagaaatgatactattttatttcatatgtttctctagagaaatatttgctgttttcttcaagactatctagactccaatgtaagctagattcttaggtaggtgcatggcattgatcaaagttgaaatccaagagtacattattgtaatctttgtaaaataaaaaacttaggcacctacaaatttagtatataacttagggaaaataaaacattaatcaggatttaatttgtattaaggaaattttaagctgtggtttacttttttatatatagtactttccaggagcagatgagccattacagtatccttgtcagtattcagatgaaggacagagcaactctgccaccagtacaggctcattcatggacattgcttctacaaatacgagtaacaaaagtgacactaatatggagcaagttcctgccacaaatgatactattaagcgcttagaatcaaaattgttgaaaaatcaggcaaagcaacagagtgaatctggacgtttaagcttgggagcctcccgtgggagcagtgtggagagcttgcccccaacctctgagggcaagaggatgagtgctgacatgtctgaaatagaagctaggatcgccgcaaccacagcctattccaagcctaaacggggccaccgtaaaactgcttcatttggcaacattctggatgtccctgagatcgtcatatcaggcaacggacagccaagacgtagatccatccaagacttgactgtaactggaacagaacctggtcaggtgagcagtaggtcatccagtcccagtgtcagaatgattactacctcaggaccaacctcagaaaagccaactcgaagtcatccatggacccctgatgattccacagataccaatggatcagataactccatcccaatggcttatcttacactggatcaccaactacagcctctagcaccgtgcccaaactccaaagaatctatggcagtgtttgaacagcattgtaaaatggcacaagaatatatgaaagttcaaacagaaattgcattgttattacagagaaagcaagaactagttgcagaactggaccaggatgaaaaggaccagcaaaatacatctcgcctggtacaggaacataaaaagcttttagatgaaaacaaaagcctttctacttactaccagcaatgcaaaaaacaactagaggtcatcagaagtcagcagcagaaacgacaaggcacttcatgattctctgggaccgttacattttgaaatatgcaaagaaagactttttttttaaggaaaggaaaaccttataatgacgattcatgagtgttagctttttggcgtgttctgaatgccaactgcctatatttgctgcatttttttcattgtttattttccttttctcatggtggacatacaattttactgtttcattgcataacatggtagcatctgtgacttgaatgagcagcactttgcaacttcaaaacagatgcagtgaactgtggctgtatatgcatgctcattgtgtgaaggctagcctaacagaacaggaggtatcaaactagctgctatgtgcaaacagcgtccattttttcatattagaggtggaacctcaagaatgactttattcttgtatctcatctcaaaatattaataatttttttcccaaaagatggtatataccaagttaaagacagggtattataaatttagagtgattggtggtatattacggaaatacggaacctttagggatagttccgtgtaagggctttgatgccagcatccttggatcagtactgaactcagttccatccgtaaaatatgtaaaggtaagtggcagctgctctatttaatgaaagcagttttaccggattttgttagactaaaatttgattgtgatacattgaacaaaatggaactcatttttttttaaggagtaaagatttttaattctgtgattgtgtgtatgtgtgttgaaactgtaaagcttttatgactctaatattaatctcttaaatgaaattaaaaggcaaaagaacatgattgagcttaaatgatcatttcttcctgcagtgattcttggattgttttctcatgtatttgaaaaaaaaaaaatgaagaaaaataatggaaaatggaagtaattactccagctaaaaaaagcttggacttagatttctttttatgataccaaatgagaaataaaccaggcaaatcagaaggaagttaaagaagcaaatataaattcaacaagtgtcctaattatcctggatattggaatatttgattttccttacaatcccgttctagaatgcctgccgcctttcaacactttcaagagaatttcaacacttacagagtatttatattgttaacagtaattttgctaccaaaaccttcagaataactttaataataaaatgacactgaaataatagactatacaaactctatattttttcagttggtgttaaaataagtcacattttgataccagtacaagatgtcttttaaataaggatgtcatcagtctgatttttatagcattaatgttttatgaagaaaaagttcaaaatgaaagcattaattgctgtgattattagaattctatcatgactgtattgtagtttttgctctatttcagataagcaagatctaagaagttatcaaaactattctttaaaatgctaaagcagctcctgtagccagagatcacaggtcttccctgtgaaactttggtttctttctataaatgtgtgtggttttcagcgctcaactcctgtcttcaaatggtagtaagttctacttctacttctgtcattcagaacattttatgtcaaatgatgtaatgcagaaattcttgtgcatatttgtaactgaaggaagctttttagatttatttttgtttttaataaaattcagattcctattctaaaaaaaaaaaaaaaaaaaaaaaaaaggggggggcggctaaaaaataacctagagggcaagtttaagcgtaccaggtttttggtcaaaagggccctaaggggggaataaaaggagggaggggcgtacaacgtcggtgggaaacggcgttgggctttggaagagcttcttttggtggcgtttggaatctaagaattagctaggaataatacgttatggtacacgttctgggaatgcgtaa

SEQ ID NO: 735252 - DNA, 6871 bp, Homo sapiens
ctcgtaatccataacttgagatgaacacaccaaattataaatatcttattcacctaatccgtggaaagtttgtaacaccaaaatattaacttctgttcttgatcactcagcctccatagttattcatgttgcatgatctgattcgctcttttagaatttctcatagcgtcaggtactagctcaaaataacaggagcaactgcttctttccatatcccacattgaggaaaacacattttgcaagccgtcttaaagaaacaggtcaacttagtttagggatgaaacttaaaagtaagcttcgtcacaaaaaacacagttcaacaccacctcgcccggctgcaggcagctcagaggacaggaagtgaggccaagacatatttcacgcagcacagactaaaccccagcttttatctttcccgctggtccttaagggaccaaccgtactgattttccgtcatgttccgcgccacttccgttcgcgcactttaattacgtcaggcgtcctctctcgcggtatcatccggttgctgaggccctgtaataaaggtctcgcgaaatttgttctagaggtccaagtttgcttcttagcttactccaccccacccccaacctgtccctccttttctttccaagtcacaaaattctcccctcccctaccccggagtttacggccctcctcctgtttccgatttcagcccggaaccggaagtgtagtgggcggggcccgtcggcggaaaacgcagcggagccagagccggacacggctgtggccgctgcctctacccccgccacggatcgccgggtagtaggactgcgcggctccaggctgagggtcggtccggaggcgggtgggcgcgggtctcacccggattgtccgggtggcaccgttcccggccccaccgggcgccgcgagggatcatgtctacagcctctgccgcctcctcctcctcctcgtcttcggccggtgagatgatcgaagccccttcccaggtcctcaactttgaagagatcgactacaaggagatcgaggtggaagaggttgttggaagaggagcctttggagttgtttgcaaagctaagtggagagcaaaagatgttgctattaaacaaatagaaagtgaatctgagaggaaagcgtttattgtagagcttcggcagttatcccgtgtgaaccatcctaatattgtaaagctttatggagcctgcttgaatccagtgtgtcttgtgatggaatatgctgaagggggctctttatataatgtgctgcatggtgctgaaccattgccatattatactgctgcccacgcaatgagttggtgtttacagtgttcccaaggagtggcttatcttcacagcatgcaacccaaagcgctaattcacagggacctgaaaccaccaaacttactgctggttgcaggggggacagttctaaaaatttgtgattttggtacagcctgtgacattcagacacacatgaccaataacaaggggagtgctgcttggatggcacctgaagtttttgaaggtagtaattacagtgaaaaatgtgacgtcttcagctggggtattattctttgggaagtgataacgcgtcggaaaccctttgatgagattggtggcccagctttccgaatcatgtgggctgttcataatggtactcgaccaccactgataaaaaatttacctaagcccattgagagcctgatgactcgttgttggtctaaagatccttcccagcgcccttcaatggaggaaattgtgaaaataatgactcacttgatgcgggtataatccttcttttgaggggctttggatttaggggaatttaatatgtgctgagttttaatggaattttaaaagggatgttattactatattctgctttatatattgctatgttttctaagtgagaatgggcatttattactcatagtcagaagaggaaacatttcgagagggaaaatctagttctttatcactggaaagatggctagactaggtttctagacttgcttttttctttttgcttacattagtggacaagtatgtttgtctctgggcctgttgcctcatttgtaatgtgggagaaactgaaatagatagtctctaaagccatcacaggacttggatatattaatattatgacttcaatacatgataaactaaattttacatttttctgataccaattttcatcaagcatttagtcatttatgcaaggcaataggttgcattctcagacacatttatttgagtgacttttactatttggcctattttcaggtttttatatcccagtaaaaagttaaactttcttctatttagaagaacccttttaaatgattatcaaattttcctagtctgtgaatcaagcgcctttagaattatttggaatattttacgcctctggtttttggtacattaacaaaaactgtgaagtggtatcttggctttaaaaagttcaaatatctatgaaagtgcctgaattttgaaacagtttgttcagtagaagaatcttacaatctccttaaatatagactaagtaatttcctaaatggtaaaacgttgtttattcaatctattgaaaatttcttacgcaaagcagcttgaactaatctactaaaagtttaccatcgtatttggataccagtcatatatagaagcctaggccttaaaggtgtgtgcataagaaaacaacttagtctctgtagtcagattacttaaaactttaggatatataagttattgcagttgtaattttgcttctctgttccttgtctaatttgaggagaatacgtttcctttttttctctaaattctaacatttttgtccagcagatactttgagtattatgcctccagtttgtagaaagacattcataatctatcctcttaatatttaaaatgttctaacaattattctatggtatactagtctcagtcttcagactaacagtcactggaagtttacatcactactgtaagaacatgagtatgttttacataattatgagaaatgatactattttatttcatatgtttctctagagaaatatttgctgttttcttcaagactatctagactccaatgtaagctagattcttaggtaggtgcatggcattgatcaaagttgaaatccaagagtacattattgtaatctttgtaaaataaaaaacttaggcacctacaaatttagtatataacttagggaaaataaaacattaatcaggatttaatttgtattaaggaaattttaagctgtggtttacttttttatatatagtactttccaggagcagatgagccattacagtatccttgtcagtattcagatgaaggacagagcaactctgccaccagtacaggctcattcatggacattgcttctacaaatacgagtaacaaaagtgacactaatatggagcaagttcctgccacaaatgatactattaagcgcttagaatcaaaattgttgaaaaatcaggcaaagcaacagagtgaatctggacgtttaagcttgggagcctcccgtgggagcagtgtggagagcttgcccccaacctctgagggcaagaggatgagtgctgacatgtctgaaatagaagctaggatcgccgcaaccacagcctattccaagcctaaacggggccaccgtaaaactgcttcatttggcaacattctggatgtccctgagatcgtcatatcaggcaacggacagccaagacgtagatccatccaagacttgactgtaactggaacagaacctggtcaggtgagcagtaggtcatccagtcccagtgtcagaatgattactacctcaggaccaacctcagaaaagccaactcgaagtcatccatggacccctgatgattccacagataccaatggatcagataactccatcccaatggcttatcttacactggatcaccaactacagcctctagcaccgtgcccaaactccaaagaatctatggcagtgtttgaacagcattgtaaaatggcacaagaatatatgaaagttcaaacagaaattgcattgttattacagagaaagcaagaactagttgcagaactggaccaggatgaaaaggaccagcaaaatacatctcgcctggtacaggaacataaaaagcttttagatgaaaacaaaagcctttctacttactaccagcaatgcaaaaaacaactagaggtcatcagaagtcagcagcagaaacgacaaggcacttcatgattctctgggaccgttacattttgaaatatgcaaagaaagactttttttttaaggaaaggaaaaccttataatgacgattcatgagtgttagctttttggcgtgttctgaatgccaactgcctatatttgctgcatttttttcattgtttattttccttttctcatggtggacatacaattttactgtttcattgcataacatggtagcatctgtgacttgaatgagcagcactttgcaacttcaaaacagatgcagtgaactgtggctgtatatgcatgctcattgtgtgaaggctagcctaacagaacaggaggtatcaaactagctgctatgtgcaaacagcgtccattttttcatattagaggtggaacctcaagaatgactttattcttgtatctcatctcaaaatattaataatttttttcccaaaagatggtatataccaagttaaagacagggtattataaatttagagtgattggtggtatattacggaaatacggaacctttagggatagttccgtgtaagggctttgatgccagcatccttggatcagtactgaactcagttccatccgtaaaatatgtaaagataagcaagatctaagaagttatcaaaactattctttaaaatgctaaagcaggtaactttttcttccattattttttcctcctaccactgagttttgtaatgaattccttgtgtatacaagcaatacaggtgaatactaaactgttatttttagcttcttcaaaagctattttagaaagcttcctggaaataaatgtcttctgtcatttaatttaaataaaaggagtgttaattgttcccaaatttgattacctagctgaaacagatattggattcagcatagtaatagtaaaataaaattggcagagaaaataactgtagactaggataaagcatgactcctccatagcattgttgcttgtatgtacatctgtcactccactgaaagggacctagtcactttaaagaggccttttatctcagcacgagatatccaagcgtgaatgctaaggcttgatgtttccattaggatttagcattcgagatttcagattttatttatagtcattgatgtgttttgctgtattataacacatttaaagggaaattttattatggtttttacatgtagtcatttcataaaaatatccagataggtaaatggaagaaaatagtagattttagtcatggtaccaaatgcaagaggctgttgaacagttgcttgtttgtttacagtaagttccttgagattttcagtactgtagttgccctggacattgagtacagttcagccttactctgtttttaagtagttgtgttgtcaatttcatgcttttaagtcctgatgatccttggagatgggagaaaaagataccagggataattaaaatccacagccagtttcatcagtttcctcatccatcctgcaaataaaaatgttaacaaggagccaaacttattcgttctggttttacaatttattttgaccgttttttgggtgaaaattgcaaacagccaagcaagtggctggaatgccccagtctaagaaattcaaaaacaatcactgagtaagccctaattacattttactcttgactccaggaaaagaaagcaagcttttatctaatctagagggaagtattcgtgagcaataaaaatcacttttttgagttgaataataatcagttaagaatatttaccgcatagcaacacaacatataaagatttgttacaagttgtttacagatgtttgactatttttgctgaagtattttagagtattgaatgtcttctctcttcaagtttctttcatgttcctaatttcagctcctgtagccagagatcacaggtcttccctgtgaaactttggtttctttctataaatgtgtgtggttttcagcgctcaactcctgtcttcaaatggtagtaagttctacttctacttctgtcattcagaacattttatgtcaaatgatgtaatgcagaaattcttgtgcatatttgtaactgaaggaagctttttagatttatttttgtttttaataaaattcagattcctattctaaactggtacataaaagtggtgaatgacttgtatcagcaaatgagctgcgaagtgttctgctctagcaccgtgtttaccttacacagaacctactaaaaactgaaatgtcacttttgtacgataatcatggtttttaagaggctgggtaattggccagttaacacatcatctcttgcatttcaaaattttgtgttaaatggagctcttcacaatttcatgagtcctaatttgtgtgaagcacaacacgtcatacattgctaagtgattcttctcatcagaaagctgatttcttagagtatttctaagttaaattaggtatttcattcctttatcaacctgctggctttccaaccctaacatatgcacacattcttataaactctaccttcattttagtaaatccatccattcatttgctcattcttttaataaatatttgtttatcatatattataaactgcactgctattaccaataccaagttacatgtccattccagtcacacagtagtttgatggtattcccatcttacagatg

SEQ ID NO: 735253 - DNA, 6572 bp, Homo sapiens
ctcgtaatccataacttgagatgaacacaccaaattataaatatcttattcacctaatccgtggaaagtttgtaacaccaaaatattaacttctgttcttgatcactcagcctccatagttattcatgttgcatgatctgattcgctcttttagaatttctcatagcgtcaggtactagctcaaaataacaggagcaactgcttctttccatatcccacattgaggaaaacacattttgcaagccgtcttaaagaaacaggtcaacttagtttagggatgaaacttaaaagtaagcttcgtcacaaaaaacacagttcaacaccacctcgcccggctgcaggcagctcagaggacaggaagtgaggccaagacatatttcacgcagcacagactaaaccccagcttttatctttcccgctggtccttaagggaccaaccgtactgattttccgtcatgttccgcgccacttccgttcgcgcactttaattacgtcaggcgtcctctctcgcggtatcatccggttgctgaggccctgtaataaaggtctcgcgaaatttgttctagaggtccaagtttgcttcttagcttactccaccccacccccaacctgtccctccttttctttccaagtcacaaaattctcccctcccctaccccggagtttacggccctcctcctgtttccgatttcagcccggaaccggaagtgtagtgggcggggcccgtcggcggaaaacgcagcggagccagagccggacacggctgtggccgctgcctctacccccgccacggatcgccgggtagtaggactgcgcggctccaggctgagggtcggtccggaggcgggtgggcgcgggtctcacccggattgtccgggtggcaccgttcccggccccaccgggcgccgcgagggatcatgtctacagcctctgccgcctcctcctcctcctcgtcttcggccggtgagatgatcgaagccccttcccaggtcctcaactttgaagagatcgactacaaggagatcgaggtggaagaggttgttggaagaggagcctttggagttgtttgcaaagctaagtggagagcaaaagatgttgctattaaacaaatagaaagtgaatctgagaggaaagcgtttattgtagagcttcggcagttatcccgtgtgaaccatcctaatattgtaaagctttatggagcctgcttgaatccagtgtgtcttgtgatggaatatgctgaagggggctctttatataatgtgctgcatggtgctgaaccattgccatattatactgctgcccacgcaatgagttggtgtttacagtgttcccaaggagtggcttatcttcacagcatgcaacccaaagcgctaattcacagggacctgaaaccaccaaacttactgctggttgcaggggggacagttctaaaaatttgtgattttggtacagcctgtgacattcagacacacatgaccaataacaaggggagtgctgcttggatggcacctgaagtttttgaaggtagtaattacagtgaaaaatgtgacgtcttcagctggggtattattctttgggaagtgataacgcgtcggaaaccctttgatgagattggtggcccagctttccgaatcatgtgggctgttcataatggtactcgaccaccactgataaaaaatttacctaagcccattgagagcctgatgactcgttgttggtctaaagatccttcccagcgcccttcaatggaggaaattgtgaaaataatgactcacttgatgcgggtataatccttcttttgaggggctttggatttaggggaatttaatatgtgctgagttttaatggaattttaaaagggatgttattactatattctgctttatatattgctatgttttctaagtgagaatgggcatttattactcatagtcagaagaggaaacatttcgagagggaaaatctagttctttatcactggaaagatggctagactaggtttctagacttgcttttttctttttgcttacattagtggacaagtatgtttgtctctgggcctgttgcctcatttgtaatgtgggagaaactgaaatagatagtctctaaagccatcacaggacttggatatattaatattatgacttcaatacatgataaactaaattttacatttttctgataccaattttcatcaagcatttagtcatttatgcaaggcaataggttgcattctcagacacatttatttgagtgacttttactatttggcctattttcaggtttttatatcccagtaaaaagttaaactttcttctatttagaagaacccttttaaatgattatcaaattttcctagtctgtgaatcaagcgcctttagaattatttggaatattttacgcctctggtttttggtacattaacaaaaactgtgaagtggtatcttggctttaaaaagttcaaatatctatgaaagtgcctgaattttgaaacagtttgttcagtagaagaatcttacaatctccttaaatatagactaagtaatttcctaaatggtaaaacgttgtttattcaatctattgaaaatttcttacgcaaagcagcttgaactaatctactaaaagtttaccatcgtatttggataccagtcatatatagaagcctaggccttaaaggtgtgtgcataagaaaacaacttagtctctgtagtcagattacttaaaactttaggatatataagttattgcagttgtaattttgcttctctgttccttgtctaatttgaggagaatacgtttcctttttttctctaaattctaacatttttgtccagcagatactttgagtattatgcctccagtttgtagaaagacattcataatctatcctcttaatatttaaaatgttctaacaattattctatggtatactagtctcagtcttcagactaacagtcactggaagtttacatcactactgtaagaacatgagtatgttttacataattatgagaaatgatactattttatttcatatgtttctctagagaaatatttgctgttttcttcaagactatctagactccaatgtaagctagattcttaggtaggtgcatggcattgatcaaagttgaaatccaagagtacattattgtaatctttgtaaaataaaaaacttaggcacctacaaatttagtatataacttagggaaaataaaacattaatcaggatttaatttgtattaaggaaattttaagctgtggtttacttttttatatatagtactttccaggagcagatgagccattacagtatccttgtcagtattcagatgaaggacagagcaactctgccaccagtacaggctcattcatggacattgcttctacaaatacgagtaacaaaagtgacactaatatggagcaagttcctgccacaaatgatactattaagcgcttagaatcaaaattgttgaaaaatcaggcaaagcaacagagtgaatctggacgtttaagcttgggagcctcccgtgggagcagtgtggagagcttgcccccaacctctgagggcaagaggatgagtgctgacatgtctgaaatagaagctaggatcgccgcaaccacagcctattccaagcctaaacggggccaccgtaaaactgcttcatttggcaacattctggatgtccctgagatcgtcatatcaggcaacggacagccaagacgtagatccatccaagacttgactgtaactggaacagaacctggtcaggtgagcagtaggtcatccagtcccagtgtcagaatgattactacctcaggaccaacctcagaaaagccaactcgaagtcatccatggacccctgatgattccacagataccaatggatcagataactccatcccaatggcttatcttacactggatcaccaactacagcctctagcaccgtgcccaaactccaaagaatctatggcagtgtttgaacagcattgtaaaatggcacaagaatatatgaaagttcaaacagaaattgcattgttattacagagaaagcaagaactagttgcagaactggaccaggatgaaaaggaccagcaaaatacatctcgcctggtacaggaacataaaaagcttttagatgaaaacaaaagcctttctacttactaccagcaatgcaaaaaacaactagaggtcatcagaagtcagcagcagaaacgacaaggcacttcatgattctctgggaccgttacattttgaaatatgcaaagaaagactttttttttaaggaaaggaaaaccttataatgacgattcatgagtgttagctttttggcgtgttctgaatgccaactgcctatatttgctgcatttttttcattgtttattttccttttctcatggtggacatacaattttactgtttcattgcataacatggtagcatctgtgacttgaatgagcagcactttgcaacttcaaaacagatgcagtgaactgtggctgtatatgcatgctcattgtgtgaaggctagcctaacagaacaggaggtatcaaactagctgctatgtgcaaacagcgtccattttttcatattagaggtggaacctcaagaatgactttattcttgtatctcatctcaaaatattaataatttttttcccaaaagatggtatataccaagttaaagacagggtattataaatttagagtgattggtggtatattacggaaatacggaacctttagggatagttccgtgtaagggctttgatgccagcatccttggatcagtactgaactcagttccatccgtaaaatatgtaaagataagcaagatctaagaagttatcaaaactattctttaaaatgctaaagcaggtaactttttcttccattattttttcctcctaccactgagttttgtaatgaattccttgtgtatacaagcaatacaggtgaatactaaactgttatttttagcttcttcaaaagctattttagaaagcttcctggaaataaatgtcttctgtcatttaatttaaataaaaggagtgttaattgttcccaaatttgattacctagctgaaacagatattggattcagcatagtaatagtaaaataaaattggcagagaaaataactgtagactaggataaagcatgactcctccatagcattgttgcttgtatgtacatctgtcactccactgaaagggacctagtcactttaaagaggccttttatctcagcacgagatatccaagcgtgaatgctaaggcttgatgtttccattaggatttagcattcgagatttcagattttatttatagtcattgatgtgttttgctgtattataacacatttaaagggaaattttattatggtttttacatgtagtcatttcataaaaatatccagataggtaaatggaagaaaatagtagattttagtcatggtaccaaatgcaagaggctgttgaacagttgcttgtttgtttacagtaagttccttgagattttcagtactgtagttgccctggacattgagtacagttcagccttactctgtttttaagtagttgtgttgtcaatttcatgcttttaagtcctgatgatccttggagatgggagaaaaagataccagggataattaaaatccacagccagtttcatcagtttcctcatccatcctgcaaataaaaatgttaacaaggagccaaacttattcgttctggttttacaatttattttgaccgttttttgggtgaaaattgcaaacagccaagcaagtggctggaatgccccagtctaagaaattcaaaaacaatcactgagtaagccctaattacattttactcttgactccaggaaaagaaagcaagcttttatctaatctagagggaagtattcgtgagcaataaaaatcacttttttgagttgaataataatcagttaagaatatttaccgcatagcaacacaacatataaagatttgttacaagttgtttacagatgtttgactatttttgctgaagtattttagagtattgaatgtcttctctcttcaagtttctttcatgttcctaatttcagctcctgtagccagagatcacaggtcttccctgtgaaactttggtttctttctataaatgtgtgtggttttcagcgctcaactcctgtcttcaaatggtagtaagttctacttctacttctgtcattcagaacattttatgtcaaatgatgtaatgcagaaattcttgtgcatatttgtaactgaaggaagctttttagatttatttttgtttttaataaaattcagattcctattctaaaaaaaaaaaaaaaaaaaaaaaaaaggggggggcggctaaaaaataacctagagggcaagtttaagcgtaccaggtttttggtcaaaagggccctaaggggggaataaaaggagggaggggcgtacaacgtcggtgggaaacggcgttgggctttggaagagcttcttttggtggcgtttggaatctaagaattagctaggaataatacgttatggtacacgttctgggaatgcgtaa

SEQ ID NO: 735254 - DNA, 6871 bp, Homo sapiens
  misc_feature (5789)..(5789): n is a, c, g, or t
  misc_feature (5796)..(5796): n is a, c, g, or t
  misc_feature (5816)..(5818): n is a, c, g, or t
  misc_feature (5824)..(5824): n is a, c, g, or t
  misc_feature (5829)..(5829): n is a, c, g, or t
  misc_feature (5838)..(5838): n is a, c, g, or t
  misc_feature (5841)..(5842): n is a, c, g, or t
  misc_feature (5847)..(5847): n is a, c, g, or t
  misc_feature (5865)..(5865): n is a, c, g, or t
  misc_feature (5871)..(5872): n is a, c, g, or t
  misc_feature (5877)..(5878): n is a, c, g, or t
  misc_feature (5883)..(5883): n is a, c, g, or t
  misc_feature (5885)..(5885): n is a, c, g, or t
  misc_feature (5900)..(5900): n is a, c, g, or t
  misc_feature (5904)..(5905): n is a, c, g, or t
  misc_feature (5907)..(5908): n is a, c, g, or t
  misc_feature (5914)..(5914): n is a, c, g, or t
  misc_feature (5917)..(5918): n is a, c, g, or t
  misc_feature (5920)..(5921): n is a, c, g, or t
  misc_feature (5924)..(5925): n is a, c, g, or t
  misc_feature (5930)..(5930): n is a, c, g, or t
  misc_feature (5938)..(5938): n is a, c, g, or t
  misc_feature (5940)..(5940): n is a, c, g, or t
  misc_feature (5943)..(5943): n is a, c, g, or t
  misc_feature (5945)..(5945): n is a, c, g, or t
  misc_feature (5947)..(5948): n is a, c, g, or t
  misc_feature (5955)..(5955): n is a, c, g, or t
  misc_feature (5958)..(5958): n is a, c, g, or t
  misc_feature (5960)..(5960): n is a, c, g, or t
  misc_feature (5975)..(5976): n is a, c, g, or t
  misc_feature (5983)..(5983): n is a, c, g, or t
  misc_feature (5986)..(5986): n is a, c, g, or t
  misc_feature (5993)..(5993): n is a, c, g, or t
  misc_feature (5998)..(5998): n is a, c, g, or t
  misc_feature (6001)..(6001): n is a, c, g, or t
  misc_feature (6005)..(6005): n is a, c, g, or t
  misc_feature (6008)..(6008): n is a, c, g, or t
  misc_feature (6012)..(6012): n is a, c, g, or t
  misc_feature (6015)..(6015): n is a, c, g, or t
  misc_feature (6018)..(6018): n is a, c, g, or t
  misc_feature (6022)..(6022): n is a, c, g, or t
  misc_feature (6032)..(6032): n is a, c, g, or t
  misc_feature (6035)..(6035): n is a, c, g, or t
  misc_feature (6038)..(6038): n is a, c, g, or t
  misc_feature (6048)..(6048): n is a, c, g, or t
  misc_feature (6053)..(6053): n is a, c, g, or t
  misc_feature (6057)..(6057): n is a, c, g, or t
  misc_feature (6077)..(6077): n is a, c, g, or t
  misc_feature (6105)..(6105): n is a, c, g, or t
  misc_feature (6128)..(6128): n is a, c, g, or t
  misc_feature (6132)..(6132): n is a, c, g, or t
ctcgtaatccataacttgagatgaacacaccaaattataaatatcttattcacctaatccgtggaaagtttgtaacaccaaaatattaacttctgttcttgatcactcagcctccatagttattcatgttgcatgatctgattcgctcttttagaatttctcatagcgtcaggtactagctcaaaataacaggagcaactgcttctttccatatcccacattgaggaaaacacattttgcaagccgtcttaaagaaacaggtcaacttagtttagggatgaaacttaaaagtaagcttcgtcacaaaaaacacagttcaacaccacctcgcccggctgcaggcagctcagaggacaggaagtgaggccaagacatatttcacgcagcacagactaaaccccagcttttatctttcccgctggtccttaagggaccaaccgtactgattttccgtcatgttccgcgccacttccgttcgcgcactttaattacgtcaggcgtcctctctcgcggtatcatccggttgctgaggccctgtaataaaggtctcgcgaaatttgttctagaggtccaagtttgcttcttagcttactccaccccacccccaacctgtccctccttttctttccaagtcacaaaattctcccctcccctaccccggagtttacggccctcctcctgtttccgatttcagcccggaaccggaagtgtagtgggcggggcccgtcggcggaaaacgcagcggagccagagccggacacggctgtggccgctgcctctacccccgccacggatcgccgggtagtaggactgcgcggctccaggctgagggtcggtccggaggcgggtgggcgcgggtctcacccggattgtccgggtggcaccgttcccggccccaccgggcgccgcgagggatcatgtctacagcctctgccgcctcctcctcctcctcgtcttcggccggtgagatgatcgaagccccttcccaggtcctcaactttgaagagatcgactacaaggagatcgaggtggaagaggttgttggaagaggagcctttggagttgtttgcaaagctaagtggagagcaaaagatgttgctattaaacaaatagaaagtgaatctgagaggaaagcgtttattgtagagcttcggcagttatcccgtgtgaaccatcctaatattgtaaagctttatggagcctgcttgaatccagtgtgtcttgtgatggaatatgctgaagggggctctttatataatgtgctgcatggtgctgaaccattgccatattatactgctgcccacgcaatgagttggtgtttacagtgttcccaaggagtggcttatcttcacagcatgcaacccaaagcgctaattcacagggacctgaaaccaccaaacttactgctggttgcaggggggacagttctaaaaatttgtgattttggtacagcctgtgacattcagacacacatgaccaataacaaggggagtgctgcttggatggcacctgaagtttttgaaggtagtaattacagtgaaaaatgtgacgtcttcagctggggtattattctttgggaagtgataacgcgtcggaaaccctttgatgagattggtggcccagctttccgaatcatgtgggctgttcataatggtactcgaccaccactgataaaaaatttacctaagcccattgagagcctgatgactcgttgttggtctaaagatccttcccagcgcccttcaatggaggaaattgtgaaaataatgactcacttgatgcgggtataatccttcttttgaggggctttggatttaggggaatttaatatgtgctgagttttaatggaattttaaaagggatgttattactatattctgctttatatattgctatgttttctaagtgagaatgggcatttattactcatagtcagaagaggaaacatttcgagagggaaaatctagttctttatcactggaaagatggctagactaggtttctagacttgcttttttctttttgcttacattagtggacaagtatgtttgtctctgggcctgttgcctcatttgtaatgtgggagaaactgaaatagatagtctctaaagccatcacaggacttggatatattaatattatgacttcaatacatgataaactaaattttacatttttctgataccaattttcatcaagcatttagtcatttatgcaaggcaataggttgcattctcagacacatttatttgagtgacttttactatttggcctattttcaggtttttatatcccagtaaaaagttaaactttcttctatttagaagaacccttttaaatgattatcaaattttcctagtctgtgaatcaagcgcctttagaattatttggaatattttacgcctctggtttttggtacattaacaaaaactgtgaagtggtatcttggctttaaaaagttcaaatatctatgaaagtgcctgaattttgaaacagtttgttcagtagaagaatcttacaatctccttaaatatagactaagtaatttcctaaatggtaaaacgttgtttattcaatctattgaaaatttcttacgcaaagcagcttgaactaatctactaaaagtttaccatcgtatttggataccagtcatatatagaagcctaggccttaaaggtgtgtgcataagaaaacaacttagtctctgtagtcagattacttaaaactttaggatatataagttattgcagttgtaattttgcttctctgttccttgtctaatttgaggagaatacgtttcctttttttctctaaattctaacatttttgtccagcagatactttgagtattatgcctccagtttgtagaaagacattcataatctatcctcttaatatttaaaatgttctaacaattattctatggtatactagtctcagtcttcagactaacagtcactggaagtttacatcactactgtaagaacatgagtatgttttacataattatgagaaatgatactattttatttcatatgtttctctagagaaatatttgctgttttcttcaagactatctagactccaatgtaagctagattcttaggtaggtgcatggcattgatcaaagttgaaatccaagagtacattattgtaatctttgtaaaataaaaaacttaggcacctacaaatttagtatataacttagggaaaataaaacattaatcaggatttaatttgtattaaggaaattttaagctgtggtttacttttttatatatagtactttccaggagcagatgagccattacagtatccttgtcagtattcagatgaaggacagagcaactctgccaccagtacaggctcattcatggacattgcttctacaaatacgagtaacaaaagtgacactaatatggagcaagttcctgccacaaatgatactattaagcgcttagaatcaaaattgttgaaaaatcaggcaaagcaacagagtgaatctggacgtttaagcttgggagcctcccgtgggagcagtgtggagagcttgcccccaacctctgagggcaagaggatgagtgctgacatgtctgaaatagaagctaggatcgccgcaaccacagcctattccaagcctaaacggggccaccgtaaaactgcttcatttggcaacattctggatgtccctgagatcgtcatatcaggcaacggacagccaagacgtagatccatccaagacttgactgtaactggaacagaacctggtcaggtgagcagtaggtcatccagtcccagtgtcagaatgattactacctcaggaccaacctcagaaaagccaactcgaagtcatccatggacccctgatgattccacagataccaatggatcagataactccatcccaatggcttatcttacactggatcaccaactacagcctctagcaccgtgcccaaactccaaagaatctatggcagtgtttgaacagcattgtaaaatggcacaagaatatatgaaagttcaaacagaaattgcattgttattacagagaaagcaagaactagttgcagaactggaccaggatgaaaaggaccagcaaaatacatctcgcctggtacaggaacataaaaagcttttagatgaaaacaaaagcctttctacttactaccagcaatgcaaaaaacaactagaggtcatcagaagtcagcagcagaaacgacaaggcacttcatgattctctgggaccgttacattttgaaatatgcaaagaaagactttttttttaaggaaaggaaaaccttataatgacgattcatgagtgttagctttttggcgtgttctgaatgccaactgcctatatttgctgcatttttttcattgtttattttccttttctcatggtggacatacaattttactgtttcattgcataacatggtagcatctgtgacttgaatgagcagcactttgcaacttcaaaacagatgcagtgaactgtggctgtatatgcatgctcattgtgtgaaggctagcctaacagaacaggaggtatcaaactagctgctatgtgcaaacagcgtccattttttcatattagaggtggaacctcaagaatgactttattcttgtatctcatctcaaaatattaataatttttttcccaaaagatggtatataccaagttaaagacagggtattataaatttagagtgattggtggtatattacggaaatacggaacctttagggatagttccgtgtaagggctttgatgccagcatccttggatcagtactgaactcagttccatccgtaaaatatgtaaagataagcaagatctaagaagttatcaaaactattctttaaaatgctaaagcaggtaactttttcttccattattttttcctcctaccactgagttttgtaatgaattccttgtgtatacaagcaatacaggtgaatactaaactgttatttttagcttcttcaaaagctattttagaaagcttcctggaaataaatgtcttctgtcatttaatttaaataaaaggagtgttaattgttcccaaatttgattacctagctgaaacagatattggattcagcatagtaatagtaaaataaaattggcagagaaaataactgtagactaggataaagcatgactcctccatagcattgttgcttgtatgtacatctgtcactccactgaaagggacctagtcactttaaagaggccttttatctcagcacgagatatccaagcgtgaatgctaaggcttgatgtttccattaggatttagcattcgagatttcagattttatttatagtcattgatgtgttttgctgtattataacacatttaaagggaaattttattatggtttttacatgtagtcatttcataaaaatatccagataggtaaatggaagaaaatagtagattttagtcatggtaccaaatgcaagaggctgttgaacagttgcttgtttgtttacagtaagttccttgagattttcagtactgtagttgccctggacattgagtacagttcagccttactctgtttttaagtagttgtgttgtcaatttcatgcttttaagtcctgatgatccttggagatgggagaaaaagataccagggataattaaaatccacagccagtttcatcagtttcctcatccatcctgcaaataaaaatgttaacaaggagccaaacttattcgttctggttttacaatttattttgaccgttttttgggtgaaaattgcaaacagccacncccgtcncccccccgcccccgcccaannnaccccnacccnacccccgcncannccccnaccccccccccccccccncccccnnccccnnacccncncccccacccaacccngagnnanncacccncgnncnnccnnaaccncccccccnanccnancnncaaccanccnanaacacccaccccacnncaacacnacncacaaanacccnccncaanccncccncanacncccnaccacccccnccnaancaccccagancaccnaacnccccccccccccaagccccntccatgcccccaatcccagcccccgcanccagagaccacaggccccccccncganaccctggcccccccccataaatgtgtgtggttttcagcgctcaactcctgtcttcaaatggtagtaagttctacttctacttctgtcattcagaacattttatgtcaaatgatgtaatgcagaaattcttgtgcatatttgtaactgaaggaagctttttagatttatttttgtttttaataaaattcagattcctattctaaactggtacataaaagtggtgaatgacttgtatcagcaaatgagctgcgaagtgttctgctctagcaccgtgtttaccttacacagaacctactaaaaactgaaatgtcacttttgtacgataatcatggtttttaagaggctgggtaattggccagttaacacatcatctcttgcatttcaaaattttgtgttaaatggagctcttcacaatttcatgagtcctaatttgtgtgaagcacaacacgtcatacattgctaagtgattcttctcatcagaaagctgatttcttagagtatttctaagttaaattaggtatttcattcctttatcaacctgctggctttccaaccctaacatatgcacacattcttataaactctaccttcattttagtaaatccatccattcatttgctcattcttttaataaatatttgtttatcatatattataaactgcactgctattaccaataccaagttacatgtccattccagtcacacagtagtttgatggtattcccatcttacagatg

SEQ ID NO: 735255 - DNA, 6572 bp, Homo sapiens
  misc_feature (5789)..(5789): n is a, c, g, or t
  misc_feature (5796)..(5796): n is a, c, g, or t
  misc_feature (5816)..(5818): n is a, c, g, or t
  misc_feature (5824)..(5824): n is a, c, g, or t
  misc_feature (5829)..(5829): n is a, c, g, or t
  misc_feature (5838)..(5838): n is a, c, g, or t
  misc_feature (5841)..(5842): n is a, c, g, or t
  misc_feature (5847)..(5847): n is a, c, g, or t
  misc_feature (5865)..(5865): n is a, c, g, or t
  misc_feature (5871)..(5872): n is a, c, g, or t
  misc_feature (5877)..(5878): n is a, c, g, or t
  misc_feature (5883)..(5883): n is a, c, g, or t
  misc_feature (5885)..(5885): n is a, c, g, or t
  misc_feature (5900)..(5900): n is a, c, g, or t
  misc_feature (5904)..(5905): n is a, c, g, or t
  misc_feature (5907)..(5908): n is a, c, g, or t
  misc_feature (5914)..(5914): n is a, c, g, or t
  misc_feature (5917)..(5918): n is a, c, g, or t
  misc_feature (5920)..(5921): n is a, c, g, or t
  misc_feature (5924)..(5925): n is a, c, g, or t
  misc_feature (5930)..(5930): n is a, c, g, or t
  misc_feature (5938)..(5938): n is a, c, g, or t
  misc_feature (5940)..(5940): n is a, c, g, or t
  misc_feature (5943)..(5943): n is a, c, g, or t
  misc_feature (5945)..(5945): n is a, c, g, or t
  misc_feature (5947)..(5948): n is a, c, g, or t
  misc_feature (5955)..(5955): n is a, c, g, or t
  misc_feature (5958)..(5958): n is a, c, g, or t
  misc_feature (5960)..(5960): n is a, c, g, or t
  misc_feature (5975)..(5976): n is a, c, g, or t
  misc_feature (5983)..(5983): n is a, c, g, or t
  misc_feature (5986)..(5986): n is a, c, g, or t
  misc_feature (5993)..(5993): n is a, c, g, or t
  misc_feature (5998)..(5998): n is a, c, g, or t
  misc_feature (6001)..(6001): n is a, c, g, or t
  misc_feature (6005)..(6005): n is a, c, g, or t
  misc_feature (6008)..(6008): n is a, c, g, or t
  misc_feature (6012)..(6012): n is a, c, g, or t
  misc_feature (6015)..(6015): n is a, c, g, or t
  misc_feature (6018)..(6018): n is a, c, g, or t
  misc_feature (6022)..(6022): n is a, c, g, or t
  misc_feature (6032)..(6032): n is a, c, g, or t
  misc_feature (6035)..(6035): n is a, c, g, or t
  misc_feature (6038)..(6038): n is a, c, g, or t
  misc_feature (6048)..(6048): n is a, c, g, or t
  misc_feature (6053)..(6053): n is a, c, g, or t
  misc_feature (6057)..(6057): n is a, c, g, or t
  misc_feature (6077)..(6077): n is a, c, g, or t
  misc_feature (6105)..(6105): n is a, c, g, or t
  misc_feature (6128)..(6128): n is a, c, g, or t
  misc_feature (6132)..(6132): n is a, c, g, or t
ctcgtaatccataacttgagatgaacacaccaaattataaatatcttattcacctaatccgtggaaagtttgtaacaccaaaatattaacttctgttcttgatcactcagcctccatagttattcatgttgcatgatctgattcgctcttttagaatttctcatagcgtcaggtactagctcaaaataacaggagcaactgcttctttccatatcccacattgaggaaaacacattttgcaagccgtcttaaagaaacaggtcaacttagtttagggatgaaacttaaaagtaagcttcgtcacaaaaaacacagttcaacaccacctcgcccggctgcaggcagctcagaggacaggaagtgaggccaagacatatttcacgcagcacagactaaaccccagcttttatctttcccgctggtccttaagggaccaaccgtactgattttccgtcatgttccgcgccacttccgttcgcgcactttaattacgtcaggcgtcctctctcgcggtatcatccggttgctgaggccctgtaataaaggtctcgcgaaatttgttctagaggtccaagtttgcttcttagcttactccaccccacccccaacctgtccctccttttctttccaagtcacaaaattctcccctcccctaccccggagtttacggccctcctcctgtttccgatttcagcccggaaccggaagtgtagtgggcggggcccgtcggcggaaaacgcagcggagccagagccggacacggctgtggccgctgcctctacccccgccacggatcgccgggtagtaggactgcgcggctccaggctgagggtcggtccggaggcgggtgggcgcgggtctcacccggattgtccgggtggcaccgttcccggccccaccgggcgccgcgagggatcatgtctacagcctctgccgcctcctcctcctcctcgtcttcggccggtgagatgatcgaagccccttcccaggtcctcaactttgaagagatcgactacaaggagatcgaggtggaagaggttgttggaagaggagcctttggagttgtttgcaaagctaagtggagagcaaaagatgttgctattaaacaaatagaaagtgaatctgagaggaaagcgtttattgtagagcttcggcagttatcccgtgtgaaccatcctaatattgtaaagctttatggagcctgcttgaatccagtgtgtcttgtgatggaatatgctgaagggggctctttatataatgtgctgcatggtgctgaaccattgccatattatactgctgcccacgcaatgagttggtgtttacagtgttcccaaggagtggcttatcttcacagcatgcaacccaaagcgctaattcacagggacctgaaaccaccaaacttactgctggttgcaggggggacagttctaaaaatttgtgattttggtacagcctgtgacattcagacacacatgaccaataacaaggggagtgctgcttggatggcacctgaagtttttgaaggtagtaattacagtgaaaaatgtgacgtcttcagctggggtattattctttgggaagtgataacgcgtcggaaaccctttgatgagattggtggcccagctttccgaatcatgtgggctgttcataatggtactcgaccaccactgataaaaaatttacctaagcccattgagagcctgatgactcgttgttggtctaaagatccttcccagcgcccttcaatggaggaaattgtgaaaataatgactcacttgatgcgggtataatccttcttttgaggggctttggatttaggggaatttaatatgtgctgagttttaatggaattttaaaagggatgttattactatattctgctttatatattgctatgttttctaagtgagaatgggcatttattactcatagtcagaagaggaaacatttcgagagggaaaatctagttctttatcactggaaagatggctagactaggtttctagacttgcttttttctttttgcttacattagtggacaagtatgtttgtctctgggcctgttgcctcatttgtaatgtgggagaaactgaaatagatagtctctaaagccatcacaggacttggatatattaatattatgacttcaatacatgataaactaaattttacatttttctgataccaattttcatcaagcatttagtcatttatgcaaggcaataggttgcattctcagacacatttatttgagtgacttttactatttggcctattttcaggtttttatatcccagtaaaaagttaaactttcttctatttagaagaacccttttaaatgattatcaaattttcctagtctgtgaatcaagcgcctttagaattatttggaatattttacgcctctggtttttggtacattaacaaaaactgtgaagtggtatcttggctttaaaaagttcaaatatctatgaaagtgcctgaattttgaaacagtttgttcagtagaagaatcttacaatctccttaaatatagactaagtaatttcctaaatggtaaaacgttgtttattcaatctattgaaaatttcttacgcaaagcagcttgaactaatctactaaaagtttaccatcgtatttggataccagtcatatatagaagcctaggccttaaaggtgtgtgcataagaaaacaacttagtctctgtagtcagattacttaaaactttaggatatataagttattgcagttgtaattttgcttctctgttccttgtctaatttgaggagaatacgtttcctttttttctctaaattctaacatttttgtccagcagatactttgagtattatgcctccagtttgtagaaagacattcataatctatcctcttaatatttaaaatgttctaacaattattctatggtatactagtctcagtcttcagactaacagtcactggaagtttacatcactactgtaagaacatgagtatgttttacataattatgagaaatgatactattttatttcatatgtttctctagagaaatatttgctgttttcttcaagactatctagactccaatgtaagctagattcttaggtaggtgcatggcattgatcaaagttgaaatccaagagtacattattgtaatctttgtaaaataaaaaacttaggcacctacaaatttagtatataacttagggaaaataaaacattaatcaggatttaatttgtattaaggaaattttaagctgtggtttacttttttatatatagtactttccaggagcagatgagccattacagtatccttgtcagtattcagatgaaggacagagcaactctgccaccagtacaggctcattcatggacattgcttctacaaatacgagtaacaaaagtgacactaatatggagcaagttcctgccacaaatgatactattaagcgcttagaatcaaaattgttgaaaaatcaggcaaagcaacagagtgaatctggacgtttaagcttgggagcctcccgtgggagcagtgtggagagcttgcccccaacctctgagggcaagaggatgagtgctgacatgtctgaaatagaagctaggatcgccgcaaccacagcctattccaagcctaaacggggccaccgtaaaactgcttcatttggcaacattctggatgtccctgagatcgtcatatcaggcaacggacagccaagacgtagatccatccaagacttgactgtaactggaacagaacctggtcaggtgagcagtaggtcatccagtcccagtgtcagaatgattactacctcaggaccaacctcagaaaagccaactcgaagtcatccatggacccctgatgattccacagataccaatggatcagataactccatcccaatggcttatcttacactggatcaccaactacagcctctagcaccgtgcccaaactccaaagaatctatggcagtgtttgaacagcattgtaaaatggcacaagaatatatgaaagttcaaacagaaattgcattgttattacagagaaagcaagaactagttgcagaactggaccaggatgaaaaggaccagcaaaatacatctcgcctggtacaggaacataaaaagcttttagatgaaaacaaaagcctttctacttactaccagcaatgcaaaaaacaactagaggtcatcagaagtcagcagcagaaacgacaaggcacttcatgattctctgggaccgttacattttgaaatatgcaaagaaagactttttttttaaggaaaggaaaaccttataatgacgattcatgagtgttagctttttggcgtgttctgaatgccaactgcctatatttgctgcatttttttcattgtttattttccttttctcatggtggacatacaattttactgtttcattgcataacatggtagcatctgtgacttgaatgagcagcactttgcaacttcaaaacagatgcagtgaactgtggctgtatatgcatgctcattgtgtgaaggctagcctaacagaacaggaggtatcaaactagctgctatgtgcaaacagcgtccattttttcatattagaggtggaacctcaagaatgactttattcttgtatctcatctcaaaatattaataatttttttcccaaaagatggtatataccaagttaaagacagggtattataaatttagagtgattggtggtatattacggaaatacggaacctttagggatagttccgtgtaagggctttgatgccagcatccttggatcagtactgaactcagttccatccgtaaaatatgtaaagataagcaagatctaagaagttatcaaaactattctttaaaatgctaaagcaggtaactttttcttccattattttttcctcctaccactgagttttgtaatgaattccttgtgtatacaagcaatacaggtgaatactaaactgttatttttagcttcttcaaaagctattttagaaagcttcctggaaataaatgtcttctgtcatttaatttaaataaaaggagtgttaattgttcccaaatttgattacctagctgaaacagatattggattcagcatagtaatagtaaaataaaattggcagagaaaataactgtagactaggataaagcatgactcctccatagcattgttgcttgtatgtacatctgtcactccactgaaagggacctagtcactttaaagaggccttttatctcagcacgagatatccaagcgtgaatgctaaggcttgatgtttccattaggatttagcattcgagatttcagattttatttatagtcattgatgtgttttgctgtattataacacatttaaagggaaattttattatggtttttacatgtagtcatttcataaaaatatccagataggtaaatggaagaaaatagtagattttagtcatggtaccaaatgcaagaggctgttgaacagttgcttgtttgtttacagtaagttccttgagattttcagtactgtagttgccctggacattgagtacagttcagccttactctgtttttaagtagttgtgttgtcaatttcatgcttttaagtcctgatgatccttggagatgggagaaaaagataccagggataattaaaatccacagccagtttcatcagtttcctcatccatcctgcaaataaaaatgttaacaaggagccaaacttattcgttctggttttacaatttattttgaccgttttttgggtgaaaattgcaaacagccacncccgtcncccccccgcccccgcccaannnaccccnacccnacccccgcncannccccnaccccccccccccccccncccccnnccccnnacccncncccccacccaacccngagnnanncacccncgnncnnccnnaaccncccccccnanccnancnncaaccanccnanaacacccaccccacnncaacacnacncacaaanacccnccncaanccncccncanacncccnaccacccccnccnaancaccccagancaccnaacnccccccccccccaagccccntccatgcccccaatcccagcccccgcanccagagaccacaggccccccccncganaccctggcccccccccataaatgtgtgtggttttcagcgctcaactcctgtcttcaaatggtagtaagttctacttctacttctgtcattcagaacattttatgtcaaatgatgtaatgcagaaattcttgtgcatatttgtaactgaaggaagctttttagatttatttttgtttttaataaaattcagattcctattctaaaaaaaaaaaaaaaaaaaaaaaaaaggggggggcggctaaaaaataacctagagggcaagtttaagcgtaccaggtttttggtcaaaagggccctaaggggggaataaaaggagggaggggcgtacaacgtcggtgggaaacggcgttgggctttggaagagcttcttttggtggcgtttggaatctaagaattagctaggaataatacgttatggtacacgttctgggaatgcgtaa

SEQ ID NO: 735256 - DNA, 5715 bp, Homo sapiens
ctcgtaatccataacttgagatgaacacaccaaattataaatatcttattcacctaatccgtggaaagtttgtaacaccaaaatattaacttctgttcttgatcactcagcctccatagttattcatgttgcatgatctgattcgctcttttagaatttctcatagcgtcaggtactagctcaaaataacaggagcaactgcttctttccatatcccacattgaggaaaacacattttgcaagccgtcttaaagaaacaggtcaacttagtttagggatgaaacttaaaagtaagcttcgtcacaaaaaacacagttcaacaccacctcgcccggctgcaggcagctcagaggacaggaagtgaggccaagacatatttcacgcagcacagactaaaccccagcttttatctttcccgctggtccttaagggaccaaccgtactgattttccgtcatgttccgcgccacttccgttcgcgcactttaattacgtcaggcgtcctctctcgcggtatcatccggttgctgaggccctgtaataaaggtctcgcgaaatttgttctagaggtccaagtttgcttcttagcttactccaccccacccccaacctgtccctccttttctttccaagtcacaaaattctcccctcccctaccccggagtttacggccctcctcctgtttccgatttcagcccggaaccggaagtgtagtgggcggggcccgtcggcggaaaacgcagcggagccagagccggacacggctgtggccgctgcctctacccccgccacggatcgccgggtagtaggactgcgcggctccaggctgagggtcggtccggaggcgggtgggcgcgggtctcacccggattgtccgggtggcaccgttcccggccccaccgggcgccgcgagggatcatgtctacagcctctgccgcctcctcctcctcctcgtcttcggccggtgagatgatcgaagccccttcccaggtcctcaactttgaagagatcgactacaaggagatcgaggtggaagaggttgttggaagaggagcctttggagttgtttgcaaagctaagtggagagcaaaagatgttgctattaaacaaatagaaagtgaatctgagaggaaagcgtttattgtagagcttcggcagttatcccgtgtgaaccatcctaatattgtaaagctttatggagcctgcttgaatccagtgtgtcttgtgatggaatatgctgaagggggctctttatataatgtgctgcatggtgctgaaccattgccatattatactgctgcccacgcaatgagttggtgtttacagtgttcccaaggagtggcttatcttcacagcatgcaacccaaagcgctaattcacagggacctgaaaccaccaaacttactgctggttgcaggggggacagttctaaaaatttgtgattttggtacagcctgtgacattcagacacacatgaccaataacaaggggagtgctgcttggatggcacctgaagtttttgaaggtagtaattacagtgaaaaatgtgacgtcttcagctggggtattattctttgggaagtgataacgcgtcggaaaccctttgatgagattggtggcccagctttccgaatcatgtgggctgttcataatggtactcgaccaccactgataaaaaatttacctaagcccattgagagcctgatgactcgttgttggtctaaagatccttcccagcgcccttcaatggaggaaattgtgaaaataatgactcacttgatgcgggtataatccttcttttgaggggctttggatttaggggaatttaatatgtgctgagttttaatggaattttaaaagggatgttattactatattctgctttatatattgctatgttttctaagtgagaatgggcatttattactcatagtcagaagaggaaacatttcgagagggaaaatctagttctttatcactggaaagatggctagactaggtttctagacttgcttttttctttttgcttacattagtggacaagtatgtttgtctctgggcctgttgcctcatttgtaatgtgggagaaactgaaatagatagtctctaaagccatcacaggacttggatatattaatattatgacttcaatacatgataaactaaattttacatttttctgataccaattttcatcaagcatttagtcatttatgcaaggcaataggttgcattctcagacacatttatttgagtgacttttactatttggcctattttcaggtttttatatcccagtaaaaagttaaactttcttctatttagaagaacccttttaaatgattatcaaattttcctagtctgtgaatcaagcgcctttagaattatttggaatattttacgcctctggtttttggtacattaacaaaaactgtgaagtggtatcttggctttaaaaagttcaaatatctatgaaagtgcctgaattttgaaacagtttgttcagtagaagaatcttacaatctccttaaatatagactaagtaatttcctaaatggtaaaacgttgtttattcaatctattgaaaatttcttacgcaaagcagcttgaactaatctactaaaagtttaccatcgtatttggataccagtcatatatagaagcctaggccttaaaggtgtgtgcataagaaaacaacttagtctctgtagtcagattacttaaaactttaggatatataagttattgcagttgtaattttgcttctctgttccttgtctaatttgaggagaatacgtttcctttttttctctaaattctaacatttttgtccagcagatactttgagtattatgcctccagtttgtagaaagacattcataatctatcctcttaatatttaaaatgttctaacaattattctatggtatactagtctcagtcttcagactaacagtcactggaagtttacatcactactgtaagaacatgagtatgttttacataattatgagaaatgatactattttatttcatatgtttctctagagaaatatttgctgttttcttcaagactatctagactccaatgtaagctagattcttaggtaggtgcatggcattgatcaaagttgaaatccaagagtacattattgtaatctttgtaaaataaaaaacttaggcacctacaaatttagtatataacttagggaaaataaaacattaatcaggatttaatttgtattaaggaaattttaagctgtggtttacttttttatatatagtactttccaggagcagatgagccattacagtatccttgtcagtattcagatgaaggacagagcaactctgccaccagtacaggctcattcatggacattgcttctacaaatacgagtaacaaaagtgacactaatatggagcaagttcctgccacaaatgatactattaagcgcttagaatcaaaattgttgaaaaatcaggcaaagcaacagagtgaatctggacgtttaagcttgggagcctcccgtgggagcagtgtggagagcttgcccccaacctctgagggcaagaggatgagtgctgacatgtctgaaatagaagctaggatcgccgcaaccacagcctattccaagcctaaacggggccaccgtaaaactgcttcatttggcaacattctggatgtccctgagatcgtcatatcaggcaacggacagccaagacgtagatccatccaagacttgactgtaactggaacagaacctggtcaggtgagcagtaggtcatccagtcccagtgtcagaatgattactacctcaggaccaacctcagaaaagccaactcgaagtcatccatggacccctgatgattccacagataccaatggatcagataactccatcccaatggcttatcttacactggatcaccaactacagcctctagcaccgtgcccaaactccaaagaatctatggcagtgtttgaacagcattgtaaaatggcacaagaatatatgaaagttcaaacagaaattgcattgttattacagagaaagcaagaactagttgcagaactggaccaggatgaaaaggaccagcaaaatacatctcgcctggtacaggaacataaaaagcttttagatgaaaacaaaagcctttctacttactaccagcaatgcaaaaaacaactagaggtcatcagaagtcagcagcagaaacgacaaggcacttcatgattctctgggaccgttacattttgaaatatgcaaagaaagactttttttttaaggaaaggaaaaccttataatgacgattcatgagtgttagctttttggcgtgttctgaatgccaactgcctatatttgctgcatttttttcattgtttattttccttttctcatggtggacatacaattttactgtttcattgcataacatggtagcatctgtgacttgaatgagcagcactttgcaacttcaaaacagatgcagtgaactgtggctgtatatgcatgctcattgtgtgaaggctagcctaacagaacaggaggtatcaaactagctgctatgtgcaaacagcgtccattttttcatattagaggtggaacctcaagaatgactttattcttgtatctcatctcaaaatattaataatttttttcccaaaagatggtatataccaagttaaagacagggtattataaatttagagtgattggtggtatattacggaaatacggaacctttagggatagttccgtgtaagggctttgatgccagcatccttggatcagtactgaactcagttccatccgtaaaatatgtaaagataagcaagatctaagaagttatcaaaactattctttaaaatgctaaagcaggtaactttttcttccattattttttcctcctaccactgagttttgtaatgaattccttgtgtatacaagcaatacaggtgaatactaaactgttatttttagcttcttcaaaagctattttagaaagcttcctggaaataaatgtcttctgtcatttaatttaaataaaaggagtgttaattgttcccaaatttgattacctagctgaaacagatattggattcagcatagtaatagtaaaataaaattggcagagaaaataactgtagactaggataaagcatgactcctccatagcattgttgcttgtatgtacatctgtcactccactgaaagggacctagtcactttaaagaggccttttatctcagcacgagatatccaagcgtgaatgctaaggcttgatgtttccattaggatttagcattcgagatttcagattttatttatagtcattgatgtgttttgctgtattataacacatttaaagggaaattttattatggtttttacatgtagtcatttcataaaaatatccagataggtaaatggaagaaaatagtagattttagtcatggtaccaaatgcaagaggctgttgaacagttgcttgtttgtttacagtaagttccttgagattttcagtactgtagttgccctggacattgagtacagttcagccttactctgtttttaagtagttgtgttgtcaatttcatgcttttaagtcctgatgatccttggagatgggagaaaaagataccagggataattaaaatccacagccagtttcatcagtttcctcatccatccgtcgacgcggccgcgaattta

SEQ ID NO: 735257 - DNA, 6817 bp, Homo sapiens
ctcgtaatccataacttgagatgaacacaccaaattataaatatcttattcacctaatccgtggaaagtttgtaacaccaaaatattaacttctgttcttgatcactcagcctccatagttattcatgttgcatgatctgattcgctcttttagaatttctcatagcgtcaggtactagctcaaaataacaggagcaactgcttctttccatatcccacattgaggaaaacacattttgcaagccgtcttaaagaaacaggtcaacttagtttagggatgaaacttaaaagtaagcttcgtcacaaaaaacacagttcaacaccacctcgcccggctgcaggcagctcagaggacaggaagtgaggccaagacatatttcacgcagcacagactaaaccccagcttttatctttcccgctggtccttaagggaccaaccgtactgattttccgtcatgttccgcgccacttccgttcgcgcactttaattacgtcaggcgtcctctctcgcggtatcatccggttgctgaggccctgtaataaaggtctcgcgaaatttgttctagaggtccaagtttgcttcttagcttactccaccccacccccaacctgtccctccttttctttccaagtcacaaaattctcccctcccctaccccggagtttacggccctcctcctgtttccgatttcagcccggaaccggaagtgtagtgggcggggcccgtcggcggaaaacgcagcggagccagagccggacacggctgtggccgctgcctctacccccgccacggatcgccgggtagtaggactgcgcggctccaggctgagggtcggtccggaggcgggtgggcgcgggtctcacccggattgtccgggtggcaccgttcccggccccaccgggcgccgcgagggatcatgtctacagcctctgccgcctcctcctcctcctcgtcttcggccggtgagatgatcgaagccccttcccaggtcctcaactttgaagagatcgactacaaggagatcgaggtggaagaggttgttggaagaggagcctttggagttgtttgcaaagctaagtggagagcaaaagatgttgctattaaacaaatagaaagtgaatctgagaggaaagcgtttattgtagagcttcggcagttatcccgtgtgaaccatcctaatattgtaaagctttatggagcctgcttgaatccagtgtgtcttgtgatggaatatgctgaagggggctctttatataatgtgctgcatggtgctgaaccattgccatattatactgctgcccacgcaatgagttggtgtttacagtgttcccaaggagtggcttatcttcacagcatgcaacccaaagcgctaattcacagggacctgaaaccaccaaacttactgctggttgcaggggggacagttctaaaaatttgtgattttggtacagcctgtgacattcagacacacatgaccaataacaaggggagtgctgcttggatggcacctgaagtttttgaaggtagtaattacagtgaaaaatgtgacgtcttcagctggggtattattctttgggaagtgataacgcgtcggaaaccctttgatgagattggtggcccagctttccgaatcatgtgggctgttcataatggtactcgaccaccactgataaaaaatttacctaagcccattgagagcctgatgactcgttgttggtctaaagatccttcccagcgcccttcaatggaggaaattgtgaaaataatgactcacttgatgcgggtataatccttcttttgaggggctttggatttaggggaatttaatatgtgctgagttttaatggaattttaaaagggatgttattactatattctgctttatatattgctatgttttctaagtgagaatgggcatttattactcatagtcagaagaggaaacatttcgagagggaaaatctagttctttatcactggaaagatggctagactaggtttctagacttgcttttttctttttgcttacattagtggacaagtatgtttgtctctgggcctgttgcctcatttgtaatgtgggagaaactgaaatagatagtctctaaagccatcacaggacttggatatattaatattatgacttcaatacatgataaactaaattttacatttttctgataccaattttcatcaagcatttagtcatttatgcaaggcaataggttgcattctcagacacatttatttgagtgacttttactatttggcctattttcaggtttttatatcccagtaaaaagttaaactttcttctatttagaagaacccttttaaatgattatcaaattttcctagtctgtgaatcaagcgcctttagaattatttggaatattttacgcctctggtttttggtacattaacaaaaactgtgaagtggtatcttggctttaaaaagttcaaatatctatgaaagtgcctgaattttgaaacagtttgttcagtagaagaatcttacaatctccttaaatatagactaagtaatttcctaaatggtaaaacgttgtttattcaatctattgaaaatttcttacgcaaagcagcttgaactaatctactaaaagtttaccatcgtatttggataccagtcatatatagaagcctaggccttaaaggtgtgtgcataagaaaacaacttagtctctgtagtcagattacttaaaactttaggatatataagttattgcagttgtaattttgcttctctgttccttgtctaatttgaggagaatacgtttcctttttttctctaaattctaacatttttgtccagcagatactttgagtattatgcctccagtttgtagaaagacattcataatctatcctcttaatatttaaaatgttctaacaattattctatggtatactagtctcagtcttcagactaacagtcactggaagtttacatcactactgtaagaacatgagtatgttttacataattatgagaaatgatactattttatttcatatgtttctctagagaaatatttgctgttttcttcaagactatctagactccaatgtaagctagattcttaggtaggtgcatggcattgatcaaagttgaaatccaagagtacattattgtaatctttgtaaaataaaaaacttaggcacctacaaatttagtatataacttagggaaaataaaacattaatcaggatttaatttgtattaaggaaattttaagctgtggtttacttttttatatatagtactttccaggagcagatgagccattacagtatccttgtcagtattcagatgaaggacagagcaactctgccaccagtacaggctcattcatggacattgcttctacaaatacgagtaacaaaagtgacactaatatggagcaagttcctgccacaaatgatactattaagcgcttagaatcaaaattgttgaaaaatcaggcaaagcaacagagtgaatctggacgtttaagcttgggagcctcccgtgggagcagtgtggagagcttgcccccaacctctgagggcaagaggatgagtgctgacatgtctgaaatagaagctaggatcgccgcaaccacagcctattccaagcctaaacggggccaccgtaaaactgcttcatttggcaacattctggatgtccctgagatcgtcatatcaggcaacggacagccaagacgtagatccatccaagacttgactgtaactggaacagaacctggtcaggtgagcagtaggtcatccagtcccagtgtcagaatgattactacctcaggaccaacctcagaaaagccaactcgaagtcatccatggacccctgatgattccacagataccaatggatcagataactccatcccaatggcttatcttacactggatcaccaactacagcctctagcaccgtgcccaaactccaaagaatctatggcagtgtttgaacagcattgtaaaatggcacaagaatatatgaaagttcaaacagaaattgcattgttattacagagaaagcaagaactagttgcagaactggaccaggatgaaaaggaccagcaaaatacatctcgcctggtacaggaacataaaaagcttttagatgaaaacaaaagcctttctacttactaccagcaatgcaaaaaacaactagaggtcatcagaagtcagcagcagaaacgacaaggcacttcatgattctctgggaccgttacattttgaaatatgcaaagaaagactttttttttaaggaaaggaaaaccttataatgacgattcatgagtgttagctttttggcgtgttctgaatgccaactgcctatatttgctgcatttttttcattgtttattttccttttctcatggtggacatacaattttactgtttcattgcataacatggtagcatctgtgacttgaatgagcagcactttgcaacttcaaaacagatgcagtgaactgtggctgtatatgcatgctcattgtgtgaaggctagcctaacagaacaggaggtatcaaactagctgctatgtgcaaacagcgtccattttttcatattagaggtggaacctcaagaatgactttattcttgtatctcatctcaaaatattaataatttttttcccaaaagatggtatataccaagttaaagacagggtattataaatttagagtgattggtggtatattacggaaatacggaacctttagggatagttccgtgtaagggctttgatgccagcatccttggatcagtactgaactcagttccatccgtaaaatatgtaaagataagcaagatctaagaagttatcaaaactattctttaaaatgctaaagcaggtaactttttcttccattattttttcctcctaccactgagttttgtaatgaattccttgtgtatacaagcaatacaggtgaatactaaactgttatttttagcttcttcaaaagctattttagaaagcttcctggaaataaatgtcttctgtcatttaatttaaataaaaggagtgttaattgttcccaaatttgattacctagctgaaacagatattggattcagcatagtaatagtaaaataaaattggcagagaaaataactgtagactaggataaagcatgactcctccatagcattgttgcttgtatgtacatctgtcactccactgaaagggacctagtcactttaaagaggccttttatctcagcacgagatatccaagcgtgaatgctaaggcttgatgtttccattaggatttagcattcgagatttcagattttatttatagtcattgatgtgttttgctgtattataacacatttaaagggaaattttattatggtttttacatgtagtcatttcataaaaatatccagataggtaaatggaagttgtttgtttacagtaagttccttgagattttcagtactgtagttgccctggacattgagtacagttcagccttactctgtttttaagtagttgtgttgtcaatttcatgcttttaagtcctgatgatccttggagatgggagaaaaagataccagggataattaaaatccacagccagtttcatcagtttcctcatccatcctgcaaataaaaatgttaacaaggagccaaacttattcgttctggttttacaatttattttgaccgttttttgggtgaaaattgcaaacagccaagcaagtggctggaatgccccagtctaagaaattcaaaaacaatcactgagtaagccctaattacattttactcttgactccaggaaaagaaagcaagcttttatctaatctagagggaagtattcgtgagcaataaaaatcacttttttgagttgaataataatcagttaagaatatttaccgcatagcaacacaacatataaagatttgttacaagttgtttacagatgtttgactatttttgctgaagtattttagagtattgaatgtcttctctcttcaagtttctttcatgttcctaatttcagctcctgtagccagagatcacaggtcttccctgtgaaactttggtttctttctataaatgtgtgtggttttcagcgctcaactcctgtcttcaaatggtagtaagttctacttctacttctgtcattcagaacattttatgtcaaatgatgtaatgcagaaattcttgtgcatatttgtaactgaaggaagctttttagatttatttttgtttttaataaaattcagattcctattctaaactggtacataaaagtggtgaatgacttgtatcagcaaatgagctgcgaagtgttctgctctagcaccgtgtttaccttacacagaacctactaaaaactgaaatgtcacttttgtacgataatcatggtttttaagaggctgggtaattggccagttaacacatcatctcttgcatttcaaaattttgtgttaaatggagctcttcacaatttcatgagtcctaatttgtgtgaagcacaacacgtcatacattgctaagtgattcttctcatcagaaagctgatttcttagagtatttctaagttaaattaggtatttcattcctttatcaacctgctggctttccaaccctaacatatgcacacattcttataaactctaccttcattttagtaaatccatccattcatttgctcattcttttaataaatatttgtttatcatatattataaactgcactgctattaccaataccaagttacatgtccattccagtcacacagtagtttgatggtattcccatcttacagatg

SEQ ID NO: 735258 - DNA, 6518 bp, Homo sapiens
ctcgtaatccataacttgagatgaacacaccaaattataaatatcttattcacctaatccgtggaaagtttgtaacaccaaaatattaacttctgttcttgatcactcagcctccatagttattcatgttgcatgatctgattcgctcttttagaatttctcatagcgtcaggtactagctcaaaataacaggagcaactgcttctttccatatcccacattgaggaaaacacattttgcaagccgtcttaaagaaacaggtcaacttagtttagggatgaaacttaaaagtaagcttcgtcacaaaaaacacagttcaacaccacctcgcccggctgcaggcagctcagaggacaggaagtgaggccaagacatatttcacgcagcacagactaaaccccagcttttatctttcccgctggtccttaagggaccaaccgtactgattttccgtcatgttccgcgccacttccgttcgcgcactttaattacgtcaggcgtcctctctcgcggtatcatccggttgctgaggccctgtaataaaggtctcgcgaaatttgttctagaggtccaagtttgcttcttagcttactccaccccacccccaacctgtccctccttttctttccaagtcacaaaattctcccctcccctaccccggagtttacggccctcctcctgtttccgatttcagcccggaaccggaagtgtagtgggcggggcccgtcggcggaaaacgcagcggagccagagccggacacggctgtggccgctgcctctacccccgccacggatcgccgggtagtaggactgcgcggctccaggctgagggtcggtccggaggcgggtgggcgcgggtctcacccggattgtccgggtggcaccgttcccggccccaccgggcgccgcgagggatcatgtctacagcctctgccgcctcctcctcctcctcgtcttcggccggtgagatgatcgaagccccttcccaggtcctcaactttgaagagatcgactacaaggagatcgaggtggaagaggttgttggaagaggagcctttggagttgtttgcaaagctaagtggagagcaaaagatgttgctattaaacaaatagaaagtgaatctgagaggaaagcgtttattgtagagcttcggcagttatcccgtgtgaaccatcctaatattgtaaagctttatggagcctgcttgaatccagtgtgtcttgtgatggaatatgctgaagggggctctttatataatgtgctgcatggtgctgaaccattgccatattatactgctgcccacgcaatgagttggtgtttacagtgttcccaaggagtggcttatcttcacagcatgcaacccaaagcgctaattcacagggacctgaaaccaccaaacttactgctggttgcaggggggacagttctaaaaatttgtgattttggtacagcctgtgacattcagacacacatgaccaataacaaggggagtgctgcttggatggcacctgaagtttttgaaggtagtaattacagtgaaaaatgtgacgtcttcagctggggtattattctttgggaagtgataacgcgtcggaaaccctttgatgagattggtggcccagctttccgaatcatgtgggctgttcataatggtactcgaccaccactgataaaaaatttacctaagcccattgagagcctgatgactcgttgttggtctaaagatccttcccagcgcccttcaatggaggaaattgtgaaaataatgactcacttgatgcgggtataatccttcttttgaggggctttggatttaggggaatttaatatgtgctgagttttaatggaattttaaaagggatgttattactatattctgctttatatattgctatgttttctaagtgagaatgggcatttattactcatagtcagaagaggaaacatttcgagagggaaaatctagttctttatcactggaaagatggctagactaggtttctagacttgcttttttctttttgcttacattagtggacaagtatgtttgtctctgggcctgttgcctcatttgtaatgtgggagaaactgaaatagatagtctctaaagccatcacaggacttggatatattaatattatgacttcaatacatgataaactaaattttacatttttctgataccaattttcatcaagcatttagtcatttatgcaaggcaataggttgcattctcagacacatttatttgagtgacttttactatttggcctattttcaggtttttatatcccagtaaaaagttaaactttcttctatttagaagaacccttttaaatgattatcaaattttcctagtctgtgaatcaagcgcctttagaattatttggaatattttacgcctctggtttttggtacattaacaaaaactgtgaagtggtatcttggctttaaaaagttcaaatatctatgaaagtgcctgaattttgaaacagtttgttcagtagaagaatcttacaatctccttaaatatagactaagtaatttcctaaatggtaaaacgttgtttattcaatctattgaaaatttcttacgcaaagcagcttgaactaatctactaaaagtttaccatcgtatttggataccagtcatatatagaagcctaggccttaaaggtgtgtgcataagaaaacaacttagtctctgtagtcagattacttaaaactttaggatatataagttattgcagttgtaattttgcttctctgttccttgtctaatttgaggagaatacgtttcctttttttctctaaattctaacatttttgtccagcagatactttgagtattatgcctccagtttgtagaaagacattcataatctatcctcttaatatttaaaatgttctaacaattattctatggtatactagtctcagtcttcagactaacagtcactggaagtttacatcactactgtaagaacatgagtatgttttacataattatgagaaatgatactattttatttcatatgtttctctagagaaatatttgctgttttcttcaagactatctagactccaatgtaagctagattcttaggtaggtgcatggcattgatcaaagttgaaatccaagagtacattattgtaatctttgtaaaataaaaaacttaggcacctacaaatttagtatataacttagggaaaataaaacattaatcaggatttaatttgtattaaggaaattttaagctgtggtttacttttttatatatagtactttccaggagcagatgagccattacagtatccttgtcagtattcagatgaaggacagagcaactctgccaccagtacaggctcattcatggacattgcttctacaaatacgagtaacaaaagtgacactaatatggagcaagttcctgccacaaatgatactattaagcgcttagaatcaaaattgttgaaaaatcaggcaaagcaacagagtgaatctggacgtttaagcttgggagcctcccgtgggagcagtgtggagagcttgcccccaacctctgagggcaagaggatgagtgctgacatgtctgaaatagaagctaggatcgccgcaaccacagcctattccaagcctaaacggggccaccgtaaaactgcttcatttggcaacattctggatgtccctgagatcgtcatatcaggcaacggacagccaagacgtagatccatccaagacttgactgtaactggaacagaacctggtcaggtgagcagtaggtcatccagtcccagtgtcagaatgattactacctcaggaccaacctcagaaaagccaactcgaagtcatccatggacccctgatgattccacagataccaatggatcagataactccatcccaatggcttatcttacactggatcaccaactacagcctctagcaccgtgcccaaactccaaagaatctatggcagtgtttgaacagcattgtaaaatggcacaagaatatatgaaagttcaaacagaaattgcattgttattacagagaaagcaagaactagttgcagaactggaccaggatgaaaaggaccagcaaaatacatctcgcctggtacaggaacataaaaagcttttagatgaaaacaaaagcctttctacttactaccagcaatgcaaaaaacaactagaggtcatcagaagtcagcagcagaaacgacaaggcacttcatgattctctgggaccgttacattttgaaatatgcaaagaaagactttttttttaaggaaaggaaaaccttataatgacgattcatgagtgttagctttttggcgtgttctgaatgccaactgcctatatttgctgcatttttttcattgtttattttccttttctcatggtggacatacaattttactgtttcattgcataacatggtagcatctgtgacttgaatgagcagcactttgcaacttcaaaacagatgcagtgaactgtggctgtatatgcatgctcattgtgtgaaggctagcctaacagaacaggaggtatcaaactagctgctatgtgcaaacagcgtccattttttcatattagaggtggaacctcaagaatgactttattcttgtatctcatctcaaaatattaataatttttttcccaaaagatggtatataccaagttaaagacagggtattataaatttagagtgattggtggtatattacggaaatacggaacctttagggatagttccgtgtaagggctttgatgccagcatccttggatcagtactgaactcagttccatccgtaaaatatgtaaagataagcaagatctaagaagttatcaaaactattctttaaaatgctaaagcaggtaactttttcttccattattttttcctcctaccactgagttttgtaatgaattccttgtgtatacaagcaatacaggtgaatactaaactgttatttttagcttcttcaaaagctattttagaaagcttcctggaaataaatgtcttctgtcatttaatttaaataaaaggagtgttaattgttcccaaatttgattacctagctgaaacagatattggattcagcatagtaatagtaaaataaaattggcagagaaaataactgtagactaggataaagcatgactcctccatagcattgttgcttgtatgtacatctgtcactccactgaaagggacctagtcactttaaagaggccttttatctcagcacgagatatccaagcgtgaatgctaaggcttgatgtttccattaggatttagcattcgagatttcagattttatttatagtcattgatgtgttttgctgtattataacacatttaaagggaaattttattatggtttttacatgtagtcatttcataaaaatatccagataggtaaatggaagttgtttgtttacagtaagttccttgagattttcagtactgtagttgccctggacattgagtacagttcagccttactctgtttttaagtagttgtgttgtcaatttcatgcttttaagtcctgatgatccttggagatgggagaaaaagataccagggataattaaaatccacagccagtttcatcagtttcctcatccatcctgcaaataaaaatgttaacaaggagccaaacttattcgttctggttttacaatttattttgaccgttttttgggtgaaaattgcaaacagccaagcaagtggctggaatgccccagtctaagaaattcaaaaacaatcactgagtaagccctaattacattttactcttgactccaggaaaagaaagcaagcttttatctaatctagagggaagtattcgtgagcaataaaaatcacttttttgagttgaataataatcagttaagaatatttaccgcatagcaacacaacatataaagatttgttacaagttgtttacagatgtttgactatttttgctgaagtattttagagtattgaatgtcttctctcttcaagtttctttcatgttcctaatttcagctcctgtagccagagatcacaggtcttccctgtgaaactttggtttctttctataaatgtgtgtggttttcagcgctcaactcctgtcttcaaatggtagtaagttctacttctacttctgtcattcagaacattttatgtcaaatgatgtaatgcagaaattcttgtgcatatttgtaactgaaggaagctttttagatttatttttgtttttaataaaattcagattcctattctaaaaaaaaaaaaaaaaaaaaaaaaaaggggggggcggctaaaaaataacctagagggcaagtttaagcgtaccaggtttttggtcaaaagggccctaaggggggaataaaaggagggaggggcgtacaacgtcggtgggaaacggcgttgggctttggaagagcttcttttggtggcgtttggaatctaagaattagctaggaataatacgttatggtacacgttctgggaatgcgtaa

SEQ ID NO: 735259 - DNA, 6817 bp, Homo sapiens
  misc_feature (5735)..(5735): n is a, c, g, or t
  misc_feature (5742)..(5742): n is a, c, g, or t
  misc_feature (5762)..(5764): n is a, c, g, or t
  misc_feature (5770)..(5770): n is a, c, g, or t
  misc_feature (5775)..(5775): n is a, c, g, or t
  misc_feature (5784)..(5784): n is a, c, g, or t
  misc_feature (5787)..(5788): n is a, c, g, or t
  misc_feature (5793)..(5793): n is a, c, g, or t
  misc_feature (5811)..(5811): n is a, c, g, or t
  misc_feature (5817)..(5818): n is a, c, g, or t
  misc_feature (5823)..(5824): n is a, c, g, or t
  misc_feature (5829)..(5829): n is a, c, g, or t
  misc_feature (5831)..(5831): n is a, c, g, or t
  misc_feature (5846)..(5846): n is a, c, g, or t
  misc_feature (5850)..(5851): n is a, c, g, or t
  misc_feature (5853)..(5854): n is a, c, g, or t
  misc_feature (5860)..(5860): n is a, c, g, or t
  misc_feature (5863)..(5864): n is a, c, g, or t
  misc_feature (5866)..(5867): n is a, c, g, or t
  misc_feature (5870)..(5871): n is a, c, g, or t
  misc_feature (5876)..(5876): n is a, c, g, or t
  misc_feature (5884)..(5884): n is a, c, g, or t
  misc_feature (5886)..(5886): n is a, c, g, or t
  misc_feature (5889)..(5889): n is a, c, g, or t
  misc_feature (5891)..(5891): n is a, c, g, or t
  misc_feature (5893)..(5894): n is a, c, g, or t
  misc_feature (5901)..(5901): n is a, c, g, or t
  misc_feature (5904)..(5904): n is a, c, g, or t
  misc_feature (5906)..(5906): n is a, c, g, or t
  misc_feature (5921)..(5922): n is a, c, g, or t
  misc_feature (5929)..(5929): n is a, c, g, or t
  misc_feature (5932)..(5932): n is a, c, g, or t
  misc_feature (5939)..(5939): n is a, c, g, or t
  misc_feature (5944)..(5944): n is a, c, g, or t
  misc_feature (5947)..(5947): n is a, c, g, or t
  misc_feature (5951)..(5951): n is a, c, g, or t
  misc_feature (5954)..(5954): n is a, c, g, or t
  misc_feature (5958)..(5958): n is a, c, g, or t
  misc_feature (5961)..(5961): n is a, c, g, or t
  misc_feature (5964)..(5964): n is a, c, g, or t
  misc_feature (5968)..(5968): n is a, c, g, or t
  misc_feature (5978)..(5978): n is a, c, g, or t
  misc_feature (5981)..(5981): n is a, c, g, or t
  misc_feature (5984)..(5984): n is a, c, g, or t
  misc_feature (5994)..(5994): n is a, c, g, or t
  misc_feature (5999)..(5999): n is a, c, g, or t
  misc_feature (6003)..(6003): n is a, c, g, or t
  misc_feature (6023)..(6023): n is a, c, g, or t
  misc_feature (6051)..(6051): n is a, c, g, or t
  misc_feature (6074)..(6074): n is a, c, g, or t
  misc_feature (6078)..(6078): n is a, c, g, or t
ctcgtaatccataacttgagatgaacacaccaaattataaatatcttattcacctaatccgtggaaagtttgtaacaccaaaatattaacttctgttcttgatcactcagcctccatagttattcatgttgcatgatctgattcgctcttttagaatttctcatagcgtcaggtactagctcaaaataacaggagcaactgcttctttccatatcccacattgaggaaaacacattttgcaagccgtcttaaagaaacaggtcaacttagtttagggatgaaacttaaaagtaagcttcgtcacaaaaaacacagttcaacaccacctcgcccggctgcaggcagctcagaggacaggaagtgaggccaagacatatttcacgcagcacagactaaaccccagcttttatctttcccgctggtccttaagggaccaaccgtactgattttccgtcatgttccgcgccacttccgttcgcgcactttaattacgtcaggcgtcctctctcgcggtatcatccggttgctgaggccctgtaataaaggtctcgcgaaatttgttctagaggtccaagtttgcttcttagcttactccaccccacccccaacctgtccctccttttctttccaagtcacaaaattctcccctcccctaccccggagtttacggccctcctcctgtttccgatttcagcccggaaccggaagtgtagtgggcggggcccgtcggcggaaaacgcagcggagccagagccggacacggctgtggccgctgcctctacccccgccacggatcgccgggtagtaggactgcgcggctccaggctgagggtcggtccggaggcgggtgggcgcgggtctcacccggattgtccgggtggcaccgttcccggccccaccgggcgccgcgagggatcatgtctacagcctctgccgcctcctcctcctcctcgtcttcggccggtgagatgatcgaagccccttcccaggtcctcaactttgaagagatcgactacaaggagatcgaggtggaagaggttgttggaagaggagcctttggagttgtttgcaaagctaagtggagagcaaaagatgttgctattaaacaaatagaaagtgaatctgagaggaaagcgtttattgtagagcttcggcagttatcccgtgtgaaccatcctaatattgtaaagctttatggagcctgcttgaatccagtgtgtcttgtgatggaatatgctgaagggggctctttatataatgtgctgcatggtgctgaaccattgccatattatactgctgcccacgcaatgagttggtgtttacagtgttcccaaggagtggcttatcttcacagcatgcaacccaaagcgctaattcacagggacctgaaaccaccaaacttactgctggttgcaggggggacagttctaaaaatttgtgattttggtacagcctgtgacattcagacacacatgaccaataacaaggggagtgctgcttggatggcacctgaagtttttgaaggtagtaattacagtgaaaaatgtgacgtcttcagctggggtattattctttgggaagtgataacgcgtcggaaaccctttgatgagattggtggcccagctttccgaatcatgtgggctgttcataatggtactcgaccaccactgataaaaaatttacctaagcccattgagagcctgatgactcgttgttggtctaaagatccttcccagcgcccttcaatggaggaaattgtgaaaataatgactcacttgatgcgggtataatccttcttttgaggggctttggatttaggggaatttaatatgtgctgagttttaatggaattttaaaagggatgttattactatattctgctttatatattgctatgttttctaagtgagaatgggcatttattactcatagtcagaagaggaaacatttcgagagggaaaatctagttctttatcactggaaagatggctagactaggtttctagacttgcttttttctttttgcttacattagtggacaagtatgtttgtctctgggcctgttgcctcatttgtaatgtgggagaaactgaaatagatagtctctaaagccatcacaggacttggatatattaatattatgacttcaatacatgataaactaaattttacatttttctgataccaattttcatcaagcatttagtcatttatgcaaggcaataggttgcattctcagacacatttatttgagtgacttttactatttggcctattttcaggtttttatatcccagtaaaaagttaaactttcttctatttagaagaacccttttaaatgattatcaaattttcctagtctgtgaatcaagcgcctttagaattatttggaatattttacgcctctggtttttggtacattaacaaaaactgtgaagtggtatcttggctttaaaaagttcaaatatctatgaaagtgcctgaattttgaaacagtttgttcagtagaagaatcttacaatctccttaaatatagactaagtaatttcctaaatggtaaaacgttgtttattcaatctattgaaaatttcttacgcaaagcagcttgaactaatctactaaaagtttaccatcgtatttggataccagtcatatatagaagcctaggccttaaaggtgtgtgcataagaaaacaacttagtctctgtagtcagattacttaaaactttaggatatataagttattgcagttgtaattttgcttctctgttccttgtctaatttgaggagaatacgtttcctttttttctctaaattctaacatttttgtccagcagatactttgagtattatgcctccagtttgtagaaagacattcataatctatcctcttaatatttaaaatgttctaacaattattctatggtatactagtctcagtcttcagactaacagtcactggaagtttacatcactactgtaagaacatgagtatgttttacataattatgagaaatgatactattttatttcatatgtttctctagagaaatatttgctgttttcttcaagactatctagactccaatgtaagctagattcttaggtaggtgcatggcattgatcaaagttgaaatccaagagtacattattgtaatctttgtaaaataaaaaacttaggcacctacaaatttagtatataacttagggaaaataaaacattaatcaggatttaatttgtattaaggaaattttaagctgtggtttacttttttatatatagtactttccaggagcagatgagccattacagtatccttgtcagtattcagatgaaggacagagcaactctgccaccagtacaggctcattcatggacattgcttctacaaatacgagtaacaaaagtgacactaatatggagcaagttcctgccacaaatgatactattaagcgcttagaatcaaaattgttgaaaaatcaggcaaagcaacagagtgaatctggacgtttaagcttgggagcctcccgtgggagcagtgtggagagcttgcccccaacctctgagggcaagaggatgagtgctgacatgtctgaaatagaagctaggatcgccgcaaccacagcctattccaagcctaaacggggccaccgtaaaactgcttcatttggcaacattctggatgtccctgagatcgtcatatcaggcaacggacagccaagacgtagatccatccaagacttgactgtaactggaacagaacctggtcaggtgagcagtaggtcatccagtcccagtgtcagaatgattactacctcaggaccaacctcagaaaagccaactcgaagtcatccatggacccctgatgattccacagataccaatggatcagataactccatcccaatggcttatcttacactggatcaccaactacagcctctagcaccgtgcccaaactccaaagaatctatggcagtgtttgaacagcattgtaaaatggcacaagaatatatgaaagttcaaacagaaattgcattgttattacagagaaagcaagaactagttgcagaactggaccaggatgaaaaggaccagcaaaatacatctcgcctggtacaggaacataaaaagcttttagatgaaaacaaaagcctttctacttactaccagcaatgcaaaaaacaactagaggtcatcagaagtcagcagcagaaacgacaaggcacttcatgattctctgggaccgttacattttgaaatatgcaaagaaagactttttttttaaggaaaggaaaaccttataatgacgattcatgagtgttagctttttggcgtgttctgaatgccaactgcctatatttgctgcatttttttcattgtttattttccttttctcatggtggacatacaattttactgtttcattgcataacatggtagcatctgtgacttgaatgagcagcactttgcaacttcaaaacagatgcagtgaactgtggctgtatatgcatgctcattgtgtgaaggctagcctaacagaacaggaggtatcaaactagctgctatgtgcaaacagcgtccattttttcatattagaggtggaacctcaagaatgactttattcttgtatctcatctcaaaatattaataatttttttcccaaaagatggtatataccaagttaaagacagggtattataaatttagagtgattggtggtatattacggaaatacggaacctttagggatagttccgtgtaagggctttgatgccagcatccttggatcagtactgaactcagttccatccgtaaaatatgtaaagataagcaagatctaagaagttatcaaaactattctttaaaatgctaaagcaggtaactttttcttccattattttttcctcctaccactgagttttgtaatgaattccttgtgtatacaagcaatacaggtgaatactaaactgttatttttagcttcttcaaaagctattttagaaagcttcctggaaataaatgtcttctgtcatttaatttaaataaaaggagtgttaattgttcccaaatttgattacctagctgaaacagatattggattcagcatagtaatagtaaaataaaattggcagagaaaataactgtagactaggataaagcatgactcctccatagcattgttgcttgtatgtacatctgtcactccactgaaagggacctagtcactttaaagaggccttttatctcagcacgagatatccaagcgtgaatgctaaggcttgatgtttccattaggatttagcattcgagatttcagattttatttatagtcattgatgtgttttgctgtattataacacatttaaagggaaattttattatggtttttacatgtagtcatttcataaaaatatccagataggtaaatggaagttgtttgtttacagtaagttccttgagattttcagtactgtagttgccctggacattgagtacagttcagccttactctgtttttaagtagttgtgttgtcaatttcatgcttttaagtcctgatgatccttggagatgggagaaaaagataccagggataattaaaatccacagccagtttcatcagtttcctcatccatcctgcaaataaaaatgttaacaaggagccaaacttattcgttctggttttacaatttattttgaccgttttttgggtgaaaattgcaaacagccacncccgtcncccccccgcccccgcccaannnaccccnacccnacccccgcncannccccnaccccccccccccccccncccccnnccccnnacccncncccccacccaacccngagnnanncacccncgnncnnccnnaaccncccccccnanccnancnncaaccanccnanaacacccaccccacnncaacacnacncacaaanacccnccncaanccncccncanacncccnaccacccccnccnaancaccccagancaccnaacnccccccccccccaagccccntccatgcccccaatcccagcccccgcanccagagaccacaggccccccccncganaccctggcccccccccataaatgtgtgtggttttcagcgctcaactcctgtcttcaaatggtagtaagttctacttctacttctgtcattcagaacattttatgtcaaatgatgtaatgcagaaattcttgtgcatatttgtaactgaaggaagctttttagatttatttttgtttttaataaaattcagattcctattctaaactggtacataaaagtggtgaatgacttgtatcagcaaatgagctgcgaagtgttctgctctagcaccgtgtttaccttacacagaacctactaaaaactgaaatgtcacttttgtacgataatcatggtttttaagaggctgggtaattggccagttaacacatcatctcttgcatttcaaaattttgtgttaaatggagctcttcacaatttcatgagtcctaatttgtgtgaagcacaacacgtcatacattgctaagtgattcttctcatcagaaagctgatttcttagagtatttctaagttaaattaggtatttcattcctttatcaacctgctggctttccaaccctaacatatgcacacattcttataaactctaccttcattttagtaaatccatccattcatttgctcattcttttaataaatatttgtttatcatatattataaactgcactgctattaccaataccaagttacatgtccattccagtcacacagtagtttgatggtattcccatcttacagatg

SEQ ID NO: 735260 - DNA, 6518 bp, Homo sapiens
  misc_feature (5735)..(5735): n is a, c, g, or t
  misc_feature (5742)..(5742): n is a, c, g, or t
  misc_feature (5762)..(5764): n is a, c, g, or t
  misc_feature (5770)..(5770): n is a, c, g, or t
  misc_feature (5775)..(5775): n is a, c, g, or t
  misc_feature (5784)..(5784): n is a, c, g, or t
  misc_feature (5787)..(5788): n is a, c, g, or t
  misc_feature (5793)..(5793): n is a, c, g, or t
  misc_feature (5811)..(5811): n is a, c, g, or t
  misc_feature (5817)..(5818): n is a, c, g, or t
  misc_feature (5823)..(5824): n is a, c, g, or t
  misc_feature (5829)..(5829): n is a, c, g, or t
  misc_feature (5831)..(5831): n is a, c, g, or t
  misc_feature (5846)..(5846): n is a, c, g, or t
  misc_feature (5850)..(5851): n is a, c, g, or t
  misc_feature (5853)..(5854): n is a, c, g, or t
  misc_feature (5860)..(5860): n is a, c, g, or t
  misc_feature (5863)..(5864): n is a, c, g, or t
  misc_feature (5866)..(5867): n is a, c, g, or t
  misc_feature (5870)..(5871): n is a, c, g, or t
  misc_feature (5876)..(5876): n is a, c, g, or t
  misc_feature (5884)..(5884): n is a, c, g, or t
  misc_feature (5886)..(5886): n is a, c, g, or t
  misc_feature (5889)..(5889): n is a, c, g, or t
  misc_feature (5891)..(5891): n is a, c, g, or t
  misc_feature (5893)..(5894): n is a, c, g, or t
  misc_feature (5901)..(5901): n is a, c, g, or t
  misc_feature (5904)..(5904): n is a, c, g, or t
  misc_feature (5906)..(5906): n is a, c, g, or t
  misc_feature (5921)..(5922): n is a, c, g, or t
  misc_feature (5929)..(5929): n is a, c, g, or t
  misc_feature (5932)..(5932): n is a, c, g, or t
  misc_feature (5939)..(5939): n is a, c, g, or t
  misc_feature (5944)..(5944): n is a, c, g, or t
  misc_feature (5947)..(5947): n is a, c, g, or t
  misc_feature (5951)..(5951): n is a, c, g, or t
  misc_feature (5954)..(5954): n is a, c, g, or t
  misc_feature (5958)..(5958): n is a, c, g, or t
  misc_feature (5961)..(5961): n is a, c, g, or t
  misc_feature (5964)..(5964): n is a, c, g, or t
  misc_feature (5968)..(5968): n is a, c, g, or t
  misc_feature (5978)..(5978): n is a, c, g, or t
  misc_feature (5981)..(5981): n is a, c, g, or t
  misc_feature (5984)..(5984): n is a, c, g, or t
  misc_feature (5994)..(5994): n is a, c, g, or t
  misc_feature (5999)..(5999): n is a, c, g, or t
  misc_feature (6003)..(6003): n is a, c, g, or t
  misc_feature (6023)..(6023): n is a, c, g, or t
  misc_feature (6051)..(6051): n is a, c, g, or t
  misc_feature (6074)..(6074): n is a, c, g, or t
  misc_feature (6078)..(6078): n is a, c, g, or t
ctcgtaatccataacttgagatgaacacaccaaattataaatatcttattcacctaatccgtggaaagtttgtaacaccaaaatattaacttctgttcttgatcactcagcctccatagttattcatgttgcatgatctgattcgctcttttagaatttctcatagcgtcaggtactagctcaaaataacaggagcaactgcttctttccatatcccacattgaggaaaacacattttgcaagccgtcttaaagaaacaggtcaacttagtttagggatgaaacttaaaagtaagcttcgtcacaaaaaacacagttcaacaccacctcgcccggctgcaggcagctcagaggacaggaagtgaggccaagacatatttcacgcagcacagactaaaccccagcttttatctttcccgctggtccttaagggaccaaccgtactgattttccgtcatgttccgcgccacttccgttcgcgcactttaattacgtcaggcgtcctctctcgcggtatcatccggttgctgaggccctgtaataaaggtctcgcgaaatttgttctagaggtccaagtttgcttcttagcttactccaccccacccccaacctgtccctccttttctttccaagtcacaaaattctcccctcccctaccccggagtttacggccctcctcctgtttccgatttcagcccggaaccggaagtgtagtgggcggggcccgtcggcggaaaacgcagcggagccagagccggacacggctgtggccgctgcctctacccccgccacggatcgccgggtagtaggactgcgcggctccaggctgagggtcggtccggaggcgggtgggcgcgggtctcacccggattgtccgggtggcaccgttcccggccccaccgggcgccgcgagggatcatgtctacagcctctgccgcctcctcctcctcctcgtcttcggccggtgagatgatcgaagccccttcccaggtcctcaactttgaagagatcgactacaaggagatcgaggtggaagaggttgttggaagaggagcctttggagttgtttgcaaagctaagtggagagcaaaagatgttgctattaaacaaatagaaagtgaatctgagaggaaagcgtttattgtagagcttcggcagttatcccgtgtgaaccatcctaatattgtaaagctttatggagcctgcttgaatccagtgtgtcttgtgatggaatatgctgaagggggctctttatataatgtgctgcatggtgctgaaccattgccatattatactgctgcccacgcaatgagttggtgtttacagtgttcccaaggagtggcttatcttcacagcatgcaacccaaagcgctaattcacagggacctgaaaccaccaaacttactgctggttgcaggggggacagttctaaaaatttgtgattttggtacagcctgtgacattcagacacacatgaccaataacaaggggagtgctgcttggatggcacctgaagtttttgaaggtagtaattacagtgaaaaatgtgacgtcttcagctggggtattattctttgggaagtgataacgcgtcggaaaccctttgatgagattggtggcccagctttccgaatcatgtgggctgttcataatggtactcgaccaccactgataaaaaatttacctaagcccattgagagcctgatgactcgttgttggtctaaagatccttcccagcgcccttcaatggaggaaattgtgaaaataatgactcacttgatgcgggtataatccttcttttgaggggctttggatttaggggaatttaatatgtgctgagttttaatggaattttaaaagggatgttattactatattctgctttatatattgctatgttttctaagtgagaatgggcatttattactcatagtcagaagaggaaacatttcgagagggaaaatctagttctttatcactggaaagatggctagactaggtttctagacttgcttttttctttttgcttacattagtggacaagtatgtttgtctctgggcctgttgcctcatttgtaatgtgggagaaactgaaatagatagtctctaaagccatcacaggacttggatatattaatattatgacttcaatacatgataaactaaattttacatttttctgataccaattttcatcaagcatttagtcatttatgcaaggcaataggttgcattctcagacacatttatttgagtgacttttactatttggcctattttcaggtttttatatcccagtaaaaagttaaactttcttctatttagaagaacccttttaaatgattatcaaattttcctagtctgtgaatcaagcgcctttagaattatttggaatattttacgcctctggtttttggtacattaacaaaaactgtgaagtggtatcttggctttaaaaagttcaaatatctatgaaagtgcctgaattttgaaacagtttgttcagtagaagaatcttacaatctccttaaatatagactaagtaatttcctaaatggtaaaacgttgtttattcaatctattgaaaatttcttacgcaaagcagcttgaactaatctactaaaagtttaccatcgtatttggataccagtcatatatagaagcctaggccttaaaggtgtgtgcataagaaaacaacttagtctctgtagtcagattacttaaaactttaggatatataagttattgcagttgtaattttgcttctctgttccttgtctaatttgaggagaatacgtttcctttttttctctaaattctaacatttttgtccagcagatactttgagtattatgcctccagtttgtagaaagacattcataatctatcctcttaatatttaaaatgttctaacaattattctatggtatactagtctcagtcttcagactaacagtcactggaagtttacatcactactgtaagaacatgagtatgttttacataattatgagaaatgatactattttatttcatatgtttctctagagaaatatttgctgttttcttcaagactatctagactccaatgtaagctagattcttaggtaggtgcatggcattgatcaaagttgaaatccaagagtacattattgtaatctttgtaaaataaaaaacttaggcacctacaaatttagtatataacttagggaaaataaaacattaatcaggatttaatttgtattaaggaaattttaagctgtggtttacttttttatatatagtactttccaggagcagatgagccattacagtatccttgtcagtattcagatgaaggacagagcaactctgccaccagtacaggctcattcatggacattgcttctacaaatacgagtaacaaaagtgacactaatatggagcaagttcctgccacaaatgatactattaagcgcttagaatcaaaattgttgaaaaatcaggcaaagcaacagagtgaatctggacgtttaagcttgggagcctcccgtgggagcagtgtggagagcttgcccccaacctctgagggcaagaggatgagtgctgacatgtctgaaatagaagctaggatcgccgcaaccacagcctattccaagcctaaacggggccaccgtaaaactgcttcatttggcaacattctggatgtccctgagatcgtcatatcaggcaacggacagccaagacgtagatccatccaagacttgactgtaactggaacagaacctggtcaggtgagcagtaggtcatccagtcccagtgtcagaatgattactacctcaggaccaacctcagaaaagccaactcgaagtcatccatggacccctgatgattccacagataccaatggatcagataactccatcccaatggcttatcttacactggatcaccaactacagcctctagcaccgtgcccaaactccaaagaatctatggcagtgtttgaacagcattgtaaaatggcacaagaatatatgaaagttcaaacagaaattgcattgttattacagagaaagcaagaactagttgcagaactggaccaggatgaaaaggaccagcaaaatacatctcgcctggtacaggaacataaaaagcttttagatgaaaacaaaagcctttctacttactaccagcaatgcaaaaaacaactagaggtcatcagaagtcagcagcagaaacgacaaggcacttcatgattctctgggaccgttacattttgaaatatgcaaagaaagactttttttttaaggaaaggaaaaccttataatgacgattcatgagtgttagctttttggcgtgttctgaatgccaactgcctatatttgctgcatttttttcattgtttattttccttttctcatggtggacatacaattttactgtttcattgcataacatggtagcatctgtgacttgaatgagcagcactttgcaacttcaaaacagatgcagtgaactgtggctgtatatgcatgctcattgtgtgaaggctagcctaacagaacaggaggtatcaaactagctgctatgtgcaaacagcgtccattttttcatattagaggtggaacctcaagaatgactttattcttgtatctcatctcaaaatattaataatttttttcccaaaagatggtatataccaagttaaagacagggtattataaatttagagtgattggtggtatattacggaaatacggaacctttagggatagttccgtgtaagggctttgatgccagcatccttggatcagtactgaactcagttccatccgtaaaatatgtaaagataagcaagatctaagaagttatcaaaactattctttaaaatgctaaagcaggtaactttttcttccattattttttcctcctaccactgagttttgtaatgaattccttgtgtatacaagcaatacaggtgaatactaaactgttatttttagcttcttcaaaagctattttagaaagcttcctggaaataaatgtcttctgtcatttaatttaaataaaaggagtgttaattgttcccaaatttgattacctagctgaaacagatattggattcagcatagtaatagtaaaataaaattggcagagaaaataactgtagactaggataaagcatgactcctccatagcattgttgcttgtatgtacatctgtcactccactgaaagggacctagtcactttaaagaggccttttatctcagcacgagatatccaagcgtgaatgctaaggcttgatgtttccattaggatttagcattcgagatttcagattttatttatagtcattgatgtgttttgctgtattataacacatttaaagggaaattttattatggtttttacatgtagtcatttcataaaaatatccagataggtaaatggaagttgtttgtttacagtaagttccttgagattttcagtactgtagttgccctggacattgagtacagttcagccttactctgtttttaagtagttgtgttgtcaatttcatgcttttaagtcctgatgatccttggagatgggagaaaaagataccagggataattaaaatccacagccagtttcatcagtttcctcatccatcctgcaaataaaaatgttaacaaggagccaaacttattcgttctggttttacaatttattttgaccgttttttgggtgaaaattgcaaacagccacncccgtcncccccccgcccccgcccaannnaccccnacccnacccccgcncannccccnaccccccccccccccccncccccnnccccnnacccncncccccacccaacccngagnnanncacccncgnncnnccnnaaccncccccccnanccnancnncaaccanccnanaacacccaccccacnncaacacnacncacaaanacccnccncaanccncccncanacncccnaccacccccnccnaancaccccagancaccnaacnccccccccccccaagccccntccatgcccccaatcccagcccccgcanccagagaccacaggccccccccncganaccctggcccccccccataaatgtgtgtggttttcagcgctcaactcctgtcttcaaatggtagtaagttctacttctacttctgtcattcagaacattttatgtcaaatgatgtaatgcagaaattcttgtgcatatttgtaactgaaggaagctttttagatttatttttgtttttaataaaattcagattcctattctaaaaaaaaaaaaaaaaaaaaaaaaaaggggggggcggctaaaaaataacctagagggcaagtttaagcgtaccaggtttttggtcaaaagggccctaaggggggaataaaaggagggaggggcgtacaacgtcggtgggaaacggcgttgggctttggaagagcttcttttggtggcgtttggaatctaagaattagctaggaataatacgttatggtacacgttctgggaatgcgtaa

SEQ ID NO: 735261 - DNA, 5661 bp, Homo sapiens
ctcgtaatccataacttgagatgaacacaccaaattataaatatcttattcacctaatccgtggaaagtttgtaacaccaaaatattaacttctgttcttgatcactcagcctccatagttattcatgttgcatgatctgattcgctcttttagaatttctcatagcgtcaggtactagctcaaaataacaggagcaactgcttctttccatatcccacattgaggaaaacacattttgcaagccgtcttaaagaaacaggtcaacttagtttagggatgaaacttaaaagtaagcttcgtcacaaaaaacacagttcaacaccacctcgcccggctgcaggcagctcagaggacaggaagtgaggccaagacatatttcacgcagcacagactaaaccccagcttttatctttcccgctggtccttaagggaccaaccgtactgattttccgtcatgttccgcgccacttccgttcgcgcactttaattacgtcaggcgtcctctctcgcggtatcatccggttgctgaggccctgtaataaaggtctcgcgaaatttgttctagaggtccaagtttgcttcttagcttactccaccccacccccaacctgtccctccttttctttccaagtcacaaaattctcccctcccctaccccggagtttacggccctcctcctgtttccgatttcagcccggaaccggaagtgtagtgggcggggcccgtcggcggaaaacgcagcggagccagagccggacacggctgtggccgctgcctctacccccgccacggatcgccgggtagtaggactgcgcggctccaggctgagggtcggtccggaggcgggtgggcgcgggtctcacccggattgtccgggtggcaccgttcccggccccaccgggcgccgcgagggatcatgtctacagcctctgccgcctcctcctcctcctcgtcttcggccggtgagatgatcgaagccccttcccaggtcctcaactttgaagagatcgactacaaggagatcgaggtggaagaggttgttggaagaggagcctttggagttgtttgcaaagctaagtggagagcaaaagatgttgctattaaacaaatagaaagtgaatctgagaggaaagcgtttattgtagagcttcggcagttatcccgtgtgaaccatcctaatattgtaaagctttatggagcctgcttgaatccagtgtgtcttgtgatggaatatgctgaagggggctctttatataatgtgctgcatggtgctgaaccattgccatattatactgctgcccacgcaatgagttggtgtttacagtgttcccaaggagtggcttatcttcacagcatgcaacccaaagcgctaattcacagggacctgaaaccaccaaacttactgctggttgcaggggggacagttctaaaaatttgtgattttggtacagcctgtgacattcagacacacatgaccaataacaaggggagtgctgcttggatggcacctgaagtttttgaaggtagtaattacagtgaaaaatgtgacgtcttcagctggggtattattctttgggaagtgataacgcgtcggaaaccctttgatgagattggtggcccagctttccgaatcatgtgggctgttcataatggtactcgaccaccactgataaaaaatttacctaagcccattgagagcctgatgactcgttgttggtctaaagatccttcccagcgcccttcaatggaggaaattgtgaaaataatgactcacttgatgcgggtataatccttcttttgaggggctttggatttaggggaatttaatatgtgctgagttttaatggaattttaaaagggatgttattactatattctgctttatatattgctatgttttctaagtgagaatgggcatttattactcatagtcagaagaggaaacatttcgagagggaaaatctagttctttatcactggaaagatggctagactaggtttctagacttgcttttttctttttgcttacattagtggacaagtatgtttgtctctgggcctgttgcctcatttgtaatgtgggagaaactgaaatagatagtctctaaagccatcacaggacttggatatattaatattatgacttcaatacatgataaactaaattttacatttttctgataccaattttcatcaagcatttagtcatttatgcaaggcaataggttgcattctcagacacatttatttgagtgacttttactatttggcctattttcaggtttttatatcccagtaaaaagttaaactttcttctatttagaagaacccttttaaatgattatcaaattttcctagtctgtgaatcaagcgcctttagaattatttggaatattttacgcctctggtttttggtacattaacaaaaactgtgaagtggtatcttggctttaaaaagttcaaatatctatgaaagtgcctgaattttgaaacagtttgttcagtagaagaatcttacaatctccttaaatatagactaagtaatttcctaaatggtaaaacgttgtttattcaatctattgaaaatttcttacgcaaagcagcttgaactaatctactaaaagtttaccatcgtatttggataccagtcatatatagaagcctaggccttaaaggtgtgtgcataagaaaacaacttagtctctgtagtcagattacttaaaactttaggatatataagttattgcagttgtaattttgcttctctgttccttgtctaatttgaggagaatacgtttcctttttttctctaaattctaacatttttgtccagcagatactttgagtattatgcctccagtttgtagaaagacattcataatctatcctcttaatatttaaaatgttctaacaattattctatggtatactagtctcagtcttcagactaacagtcactggaagtttacatcactactgtaagaacatgagtatgttttacataattatgagaaatgatactattttatttcatatgtttctctagagaaatatttgctgttttcttcaagactatctagactccaatgtaagctagattcttaggtaggtgcatggcattgatcaaagttgaaatccaagagtacattattgtaatctttgtaaaataaaaaacttaggcacctacaaatttagtatataacttagggaaaataaaacattaatcaggatttaatttgtattaaggaaattttaagctgtggtttacttttttatatatagtactttccaggagcagatgagccattacagtatccttgtcagtattcagatgaaggacagagcaactctgccaccagtacaggctcattcatggacattgcttctacaaatacgagtaacaaaagtgacactaatatggagcaagttcctgccacaaatgatactattaagcgcttagaatcaaaattgttgaaaaatcaggcaaagcaacagagtgaatctggacgtttaagcttgggagcctcccgtgggagcagtgtggagagcttgcccccaacctctgagggcaagaggatgagtgctgacatgtctgaaatagaagctaggatcgccgcaaccacagcctattccaagcctaaacggggccaccgtaaaactgcttcatttggcaacattctggatgtccctgagatcgtcatatcaggcaacggacagccaagacgtagatccatccaagacttgactgtaactggaacagaacctggtcaggtgagcagtaggtcatccagtcccagtgtcagaatgattactacctcaggaccaacctcagaaaagccaactcgaagtcatccatggacccctgatgattccacagataccaatggatcagataactccatcccaatggcttatcttacactggatcaccaactacagcctctagcaccgtgcccaaactccaaagaatctatggcagtgtttgaacagcattgtaaaatggcacaagaatatatgaaagttcaaacagaaattgcattgttattacagagaaagcaagaactagttgcagaactggaccaggatgaaaaggaccagcaaaatacatctcgcctggtacaggaacataaaaagcttttagatgaaaacaaaagcctttctacttactaccagcaatgcaaaaaacaactagaggtcatcagaagtcagcagcagaaacgacaaggcacttcatgattctctgggaccgttacattttgaaatatgcaaagaaagactttttttttaaggaaaggaaaaccttataatgacgattcatgagtgttagctttttggcgtgttctgaatgccaactgcctatatttgctgcatttttttcattgtttattttccttttctcatggtggacatacaattttactgtttcattgcataacatggtagcatctgtgacttgaatgagcagcactttgcaacttcaaaacagatgcagtgaactgtggctgtatatgcatgctcattgtgtgaaggctagcctaacagaacaggaggtatcaaactagctgctatgtgcaaacagcgtccattttttcatattagaggtggaacctcaagaatgactttattcttgtatctcatctcaaaatattaataatttttttcccaaaagatggtatataccaagttaaagacagggtattataaatttagagtgattggtggtatattacggaaatacggaacctttagggatagttccgtgtaagggctttgatgccagcatccttggatcagtactgaactcagttccatccgtaaaatatgtaaagataagcaagatctaagaagttatcaaaactattctttaaaatgctaaagcaggtaactttttcttccattattttttcctcctaccactgagttttgtaatgaattccttgtgtatacaagcaatacaggtgaatactaaactgttatttttagcttcttcaaaagctattttagaaagcttcctggaaataaatgtcttctgtcatttaatttaaataaaaggagtgttaattgttcccaaatttgattacctagctgaaacagatattggattcagcatagtaatagtaaaataaaattggcagagaaaataactgtagactaggataaagcatgactcctccatagcattgttgcttgtatgtacatctgtcactccactgaaagggacctagtcactttaaagaggccttttatctcagcacgagatatccaagcgtgaatgctaaggcttgatgtttccattaggatttagcattcgagatttcagattttatttatagtcattgatgtgttttgctgtattataacacatttaaagggaaattttattatggtttttacatgtagtcatttcataaaaatatccagataggtaaatggaagttgtttgtttacagtaagttccttgagattttcagtactgtagttgccctggacattgagtacagttcagccttactctgtttttaagtagttgtgttgtcaatttcatgcttttaagtcctgatgatccttggagatgggagaaaaagataccagggataattaaaatccacagccagtttcatcagtttcctcatccatccgtcgacgcggccgcgaattta

SEQ ID NO: 735262 - DNA, 5657 bp, Homo sapiens
ctcgtaatccataacttgagatgaacacaccaaattataaatatcttattcacctaatccgtggaaagtttgtaacaccaaaatattaacttctgttcttgatcactcagcctccatagttattcatgttgcatgatctgattcgctcttttagaatttctcatagcgtcaggtactagctcaaaataacaggagcaactgcttctttccatatcccacattgaggaaaacacattttgcaagccgtcttaaagaaacaggtcaacttagtttagggatgaaacttaaaagtaagcttcgtcacaaaaaacacagttcaacaccacctcgcccggctgcaggcagctcagaggacaggaagtgaggccaagacatatttcacgcagcacagactaaaccccagcttttatctttcccgctggtccttaagggaccaaccgtactgattttccgtcatgttccgcgccacttccgttcgcgcactttaattacgtcaggcgtcctctctcgcggtatcatccggttgctgaggccctgtaataaaggtctcgcgaaatttgttctagaggtccaagtttgcttcttagcttactccaccccacccccaacctgtccctccttttctttccaagtcacaaaattctcccctcccctaccccggagtttacggccctcctcctgtttccgatttcagcccggaaccggaagtgtagtgggcggggcccgtcggcggaaaacgcagcggagccagagccggacacggctgtggccgctgcctctacccccgccacggatcgccgggtagtaggactgcgcggctccaggctgagggtcggtccggaggcgggtgggcgcgggtctcacccggattgtccgggtggcaccgttcccggccccaccgggcgccgcgagggatcatgtctacagcctctgccgcctcctcctcctcctcgtcttcggccggtgagatgatcgaagccccttcccaggtcctcaactttgaagagatcgactacaaggagatcgaggtggaagaggttgttggaagaggagcctttggagttgtttgcaaagctaagtggagagcaaaagatgttgctattaaacaaatagaaagtgaatctgagaggaaagcgtttattgtagagcttcggcagttatcccgtgtgaaccatcctaatattgtaaagctttatggagcctgcttgaatccagtgtgtcttgtgatggaatatgctgaagggggctctttatataatgtgctgcatggtgctgaaccattgccatattatactgctgcccacgcaatgagttggtgtttacagtgttcccaaggagtggcttatcttcacagcatgcaacccaaagcgctaattcacagggacctgaaaccaccaaacttactgctggttgcaggggggacagttctaaaaatttgtgattttggtacagcctgtgacattcagacacacatgaccaataacaaggggagtgctgcttggatggcacctgaagtttttgaaggtagtaattacagtgaaaaatgtgacgtcttcagctggggtattattctttgggaagtgataacgcgtcggaaaccctttgatgagattggtggcccagctttccgaatcatgtgggctgttcataatggtactcgaccaccactgataaaaaatttacctaagcccattgagagcctgatgactcgttgttggtctaaagatccttcccagcgcccttcaatggaggaaattgtgaaaataatgactcacttgatgcgggtataatccttcttttgaggggctttggatttaggggaatttaatatgtgctgagttttaatggaattttaaaagggatgttattactatattctgctttatatattgctatgttttctaagtgagaatgggcatttattactcatagtcagaagaggaaacatttcgagagggaaaatctagttctttatcactggaaagatggctagactaggtttctagacttgcttttttctttttgcttacattagtggacaagtatgtttgtctctgggcctgttgcctcatttgtaatgtgggagaaactgaaatagatagtctctaaagccatcacaggacttggatatattaatattatgacttcaatacatgataaactaaattttacatttttctgataccaattttcatcaagcatttagtcatttatgcaaggcaataggttgcattctcagacacatttatttgagtgacttttactatttggcctattttcaggtttttatatcccagtaaaaagttaaactttcttctatttagaagaacccttttaaatgattatcaaattttcctagtctgtgaatcaagcgcctttagaattatttggaatattttacgcctctggtttttggtacattaacaaaaactgtgaagtggtatcttggctttaaaaagttcaaatatctatgaaagtgcctgaattttgaaacagtttgttcagtagaagaatcttacaatctccttaaatatagactaagtaatttcctaaatggtaaaacgttgtttattcaatctattgaaaatttcttacgcaaagcagcttgaactaatctactaaaagtttaccatcgtatttggataccagtcatatatagaagcctaggccttaaaggtgtgtgcataagaaaacaacttagtctctgtagtcagattacttaaaactttaggatatataagttattgcagttgtaattttgcttctctgttccttgtctaatttgaggagaatacgtttcctttttttctctaaattctaacatttttgtccagcagatactttgagtattatgcctccagtttgtagaaagacattcataatctatcctcttaatatttaaaatgttctaacaattattctatggtatactagtctcagtcttcagactaacagtcactggaagtttacatcactactgtaagaacatgagtatgttttacataattatgagaaatgatactattttatttcatatgtttctctagagaaatatttgctgttttcttcaagactatctagactccaatgtaagctagattcttaggtaggtgcatggcattgatcaaagttgaaatccaagagtacattattgtaatctttgtaaaataaaaaacttaggcacctacaaatttagtatataacttagggaaaataaaacattaatcaggatttaatttgtattaaggaaattttaagctgtggtttacttttttatatatagtactttccaggagcagatgagccattacagtatccttgtcagtattcagatgaaggacagagcaactctgccaccagtacaggctcattcatggacattgcttctacaaatacgagtaacaaaagtgacactaatatggagcaagttcctgccacaaatgatactattaagcgcttagaatcaaaattgttgaaaaatcaggcaaagcaacagagtgaatctggacgtttaagcttgggagcctcccgtgggagcagtgtggagagcttgcccccaacctctgagggcaagaggatgagtgctgacatgtctgaaatagaagctaggatcgccgcaaccacagcctattccaagcctaaacggggccaccgtaaaactgcttcatttggcaacattctggatgtccctgagatcgtcatatcaggcaacggacagccaagacgtagatccatccaagacttgactgtaactggaacagaacctggtcaggtgagcagtaggtcatccagtcccagtgtcagaatgattactacctcaggaccaacctcagaaaagccaactcgaagtcatccatggacccctgatgattccacagataccaatggatcagataactccatcccaatggcttatcttacactggatcaccaactacagcctctagcaccgtgcccaaactccaaagaatctatggcagtgtttgaacagcattgtaaaatggcacaagaatatatgaaagttcaaacagaaattgcattgttattacagagaaagcaagaactagttgcagaactggaccaggatgaaaaggaccagcaaaatacatctcgcctggtacaggaacataaaaagcttttagatgaaaacaaaagcctttctacttactaccagcaatgcaaaaaacaactagaggtcatcagaagtcagcagcagaaacgacaaggcacttcatgattctctgggaccgttacattttgaaatatgcaaagaaagactttttttttaaggaaaggaaaaccttataatgacgattcatgagtgttagctttttggcgtgttctgaatgccaactgcctatatttgctgcatttttttcattgtttattttccttttctcatggtggacatacaattttactgtttcattgcataacatggtagcatctgtgacttgaatgagcagcactttgcaacttcaaaacagatgcagtgaactgtggctgtatatgcatgctcattgtgtgaaggctagcctaacagaacaggaggtatcaaactagctgctatgtgcaaacagcgtccattttttcatattagaggtggaacctcaagaatgactttattcttgtatctcatctcaaaatattaataatttttttcccaaaagatggtatataccaagttaaagacagggtattataaatttagagtgattggtggtatattacggaaatacggaacctttagggatagttccgtgtaagggctttgatgccagcatccttggatcagtactgaactcagttccatccgtaaaatatgtaaagataagcaagatctaagaagttatcaaaactattctttaaaatgctaaagcagctcctgtagccagagatcacaggtcttccctgtgaaactttggtttctttctataaatgtgtgtggttttcagcgctcaactcctgtcttcaaatggtagtaagttctacttctacttctgtcattcagaacattttatgtcaaatgatgtaatgcagaaattcttgtgcatatttgtaactgaaggaagctttttagatttatttttgtttttaataaaattcagattcctattctaaactggtacataaaagtggtgaatgacttgtatcagcaaatgagctgcgaagtgttctgctctagcaccgtgtttaccttacacagaacctactaaaaactgaaatgtcacttttgtacgataatcatggtttttaagaggctgggtaattggccagttaacacatcatctcttgcatttcaaaattttgtgttaaatggagctcttcacaatttcatgagtcctaatttgtgtgaagcacaacacgtcatacattgctaagtgattcttctcatcagaaagctgatttcttagagtatttctaagttaaattaggtatttcattcctttatcaacctgctggctttccaaccctaacatatgcacacattcttataaactctaccttcattttagtaaatccatccattcatttgctcattcttttaataaatatttgtttatcatatattataaactgcactgctattaccaataccaagttacatgtccattccagtcacacagtagtttgatggtattcccatcttacagatg

SEQ ID NO: 735263 - DNA, 71499 bp, Homo sapiens
cggcgaggtcggtcattctgcctgtccggtagcaccacgaaacacctgccactgacacctccccaccagcccccgagggttcgcgcaggcatcccgagccgcgccccctggtccgccgcagccagattccctcccgggcgggttacgcccctaggcgcaaaacggaaccactccgtatgaagaagacaaagtataaccagtcacaccaaagagaggcagcattatttagacagccggctactcccccagagactccacccagtcccctgggcccggcgtccagcgcgcagacggtgcccggctccaggagttccagctccctccacgtgtcctgtcttcccagcagcctcctctgccgcctcgggaggaaaatctcctgacaactcgcggtctgcggactacgactcccaggaggcgccgcgccgcggctctccccgcccccccccgcccccccccccctccccgggacgcgcaggcgccttgggctccgtcaacaagccgggctggcgtcgcctggatgcggtttcttccgggatttgtagtttttctggagctacccgggccgtctgttagagggacaagaactacaagtctcggctgccccagcgctgcgagcctggtcacgtggcgggggccgaccgggcgtgcgtgccgccgttgatccggtgctgcagtgaggagcgtggttcttgcccgtgttgtgtgtgtgtgtgagtgagagagcgagtgagtgagtgagtgagtgtgtgtgtgggggggactcggcttgttgttgtcggtgacttccccctccccttcaccccttcccctccccgccgccgctgcagtggccgctccctgggccgtaggaaatgagcgataacgatgacatcgaggtggagagcgacgctgacaaacgggctcatcataatgcactggaacgaaaacgtagggaccacatcaaagacagctttcacagtttgcgggactcagtcccatcactccaaggagagaaggcatcccgggcccaaatcctagacaaagccacagaatatatccagtatatgcgaaggaaaaaccacacacaccagcaagatattgacgacctcaagcggcagaatgctcttctggagcagcaagtccgtgcactggagaaggcgaggtcaagtgcccaactgcagaccaactacccctcctcagacaacagcctctacaccaacgccaagggcagcaccatctctgccttcgatgggggctcggactccagctcggagtctgagcctgaagagccccaaagcaggaagaagctccggatggaggccagctaagccactcggggcaggccagcaataaaaactgtctgtctccatcgtctcatcctcctttcagttcgttggtagagccctcagaaccatttaagagactctttatttttctctttctcccttttttttttaaatttttatttttacgtagaagctcttggacaacagctctcgttctccttccccatttccactgtatattttttaatgtattcccttcagggattccctgtccccaacaggaatttttaaaccaaaacaccccaacttggcagctttttctgtggaggacagacggccggccggacctctgagcacatagtgtcctgcccaccctaccagctcctccagccctgccgggcacatgcccgggggacgcctgccctgcccaggtggcctcctggcccgccctcacctctgatagactttgtgaatctgaactgctctactttgagaagatgaccggtttggagtaatcagaatgaaccctcctcctttttaagggttttttttttttcctttttctaaaaagctatgtatcgctcctattgaaagaccagatccttagagaagtttgtggtataaaaagaaagtggggacagattcgcagcacagagtcgctggcatgtttcactcctgcttctctcagccagctgtttaagcctgcggcgccagcctcacggagggccgtgtgacactctcgtggtatgtatgggagatggcagcagtgaagcagcagccaccagggagtggccatttggggttgggacagggagggtgttttgggtggcatagaggttttgtattgagggccagtgatgatgttttgatatttatttcctgctacttaaatttgaatctgagtgaattgtacctatttctgatgatgtcggtcttgcaaagcgacagattcataaagtaatgatgaaatctttctttcttcccgtgtgtatttctaagaaatagagccaactgattttgtatgtaaataccaagagcaatttacctggtactaaacccgcaccccagtgcggacccttcccagccctcatcccacttcctttcctactgtcctggaacctgtctccattgtgtgatccagccctggttctggctgtggtcagcagatcccagtgaagggttttgtgtgtttaggcctcatttctttgtctttttcctactccgttcctggcatttgctgatttctagtgtatactctgtagtctcagttcgtgtttgattccattccatggaaataaaaagtatgttgtacatactgccgaagaattgtcttgcaagttaaggcttccccctttactataagactataaataaaaacttattttatcctttcttggtggtggtgtcttcttacccttgttaaggccaaggtggttgatgagagacccctctggaagctgttagggcctcaatgtaagtctgagtgagaagtggaggtggcttacccggtcttgcagaaccaggagcagccataagccagagttgcttcccctttctcagctcagcctgagagagtaaatgggtggtgatggctttgttcattggatgaggcttttgaggttcaacagggatgtagccttagctgtggcaacatttctagatctagtttctgctaagcaagtgacctttgggggaattggtagcccagagctgtggttcaggttctcctggtaatgagtgcccagttcagaggtggctgttctccaggacctttcagtttctagatagttccagtttattaagaggaggcagcagagctgccaaggactggaagtcaagaaggctccaactgcaccgagttagctctactcagactgggacccaacaccagcctgaacttgtttgaccttggaagaaaaaggaattatggccagaacgcagctcagtgttggttttcctgtctggctgacaggaaatactgctgttcctagacccagagaggaagtcaagtcaaatcagttcttggatttgtcaccatctttagagtggtggagagcactgtggctcctatcaattgtatgtcaaatccgtaatatctttttttgtttaatgggagctggggcagatgggtcttgtcaatttgaaacatgatcaagcctccaaaggccatgattacattaaggaaaagaaaaatgctgggaaagcaagatcccatttataaaggcacttcttttcaagatagaggaaagaaactgcagtaaggaagaaatggaaatgagaatcagcttattgcctaaagccctcaaggttaacatgctttcctctttttcattgcccttaactatatctctttgtatatctgggcttaagtatacagttggtttgcttagtattggtgttagaagtgagctgtgggtgaagccatgttgatgcagagatggaaggcatgtgaagctggcacccagtagggagatagcaaacaggaaggggcagtcaagccagcatgaggacaggtggtgtccctgagagccagtccctggctccagtgtattggctggacaaaggattgagtttaggcttctctagatttcagtaaaccagttcagacaaggggcacagtggctaggtggctggttcacctaggaaaatccaaaccacctgattgacatggtgagcggactttggcacagggtggaggtaccactggaagcagcttcctgggcaggaacacagggcaggggagctccgcctggaaactgctcagctgaaaaggccaagtcaaagtcacagccaagcaagccccttctggtatgtgtgtctaggaagcgagtgtgagtattccctcaggataccaaagtcggaccatagcttactctctcacagtaatggtaatctctggtttattttttatattactctggacactcacttacacaaaaccagataagctgtagatttgcttggtcactgtggcaggtggcttcactgaggagtctgttaagcgtgctatttccctacctttacagttgccccaagtgcaagggtatttaaaatggcccagtttttaaagttcttgatacgctaaccccattgtaaaacatcaacaacttcttaggtaaagaatctaagctcacagagctgtcatcttagctgagacaggtttaaaaaacaagactgagtagacaataggagccagagccctgaactgggactgaagtaagcagaattctgtttctgatagtatcatgtgtgttttatgcttggcctctgaaagcagactggctgggttcacagtcctgtctctgccactcggtggctgtgttacttctcccagcctcagcatctttatctataaaatgaggataataatagcactagcctcatgagatggttatgaggcttaaatgagataatgcttataatgtgcttgacctcaggaccaagcaagcactgaggtgcctctgctgtcattatctacacaaagcatgtaaccagggctgactcagcaaggtggaaaaagccagctcccagacacctttcctaaagtgagtaagggttgacttcttggtatatcacaaatgcttcccactcctcagagatgtgccccatccttaccaggcacagtgactaaagagagcaaggtgacaccaggactggactgacaaactcttcgagactaaagcagcccctgtgggtacattaattagatctggtgtcaactcgagtgaggctctgcccattccctcccaccacgattcagtggcatctctcaggtttggacacttttggaggcccaggcagaactgctcagaagccccatgtggtgttactcaaagtgggatccttggatcatgcccagggctgcttgttaaaaggattcctgggctctaacccctctaatctaaagtgtgccgtggctcaccagtcagtttaacaagctctttcaggtggtcctcaagtcactcaggtttgactcccaacagtaatataacccggggaaccaaaaggacgctgttggggaagttaggcacagctgagctgaattagcgaagtggttctgaggtcaggatgaaggtgggggaggcgggcttgttaaatagttcaacccttagagctgccttgatgagtctacgtgctcccagcatgcctccaatgctctagggggctggctgagctacccagtttttaaacttgagaaggaagaaagctgagggctgcctacactagcccctttagaagccccaagcaggggtaatgacatggggcagcactcatttctgtagcatgcctaggctggcctctggtccccaggcaggttttataatccagccagagcaagggtctctctcaggcctggtcaccaggatgcattctcaaaagcctctgggaacatgaaactagagcattcctttcttcaaaactgtttctctagcctgaagaggaaacccaggtaggaaaaaagagtttgtcaatgtctacactgctagatagcgaatagagaatttccttcagtgtctagggtttactagggcagcggctaactcatacatccccaaagttcccttgggaagggaataaaaaatagtttctagttaacttcctcagggagaaaaccaatttggctaagccaggcttaactataggtaggactgggtgactgcaccaggcaggcctgtgcatgggttttggaggctctcctggcaaacccttatcaccctgctggtaagtgttgtccttgcttggtgtttcattggggtcggtgttgggaaggagcccagggagcttcagaatgactgccagagcgggtagggctaggggctctgagcccgcctgtctggactgccatgccagctacaacccttacctttggggtgacattgctctggcttcctgtgccattatgtgaggacaataatagcaccaagtgccattgtgaggcttaaaggagtgtgagaagcccatgaattgttcctggcatttaatactcaataaatactgtcaaatcttagatgtgtctgccatcagatgtcctgggtagtgcagccattttttagttttgttaaaatgtggaatgaagctgggcgcagaggctcacacctgtaatatcagcactttgggaagccaaggtgggcggatcacttgaggtcaggagtttgagaccagcctggtcaatgtggtgaaaccccgtctctactaaaaatacaaaaaaattagccgagcatagtgttgcatgcctgtggtcccagctactcgggagactgaggcaggagaatcgcttgaacccaggaggcagaggttgcagtgagccaagatcacgccactgcactccagcctgggtgacacagcaagactccttctcagaaaaaaaaaaatgtggagtgaataaactctccttttcgctgatgtaataagagtttagtatattaaaatccttgaaaggggaggtaaatgtatgttgaatgctaaaaggcagtaaaaatttgcatgttttctgaaagaacttgagcaagaccacaaatctgttaccttttggagaaaaaaaaggagttgaggaatgaaatatacccttgcaggctggctcagagccattaaccattaacatactggcgactttgccctgttcttcattccagtttcagtttgcatttctgcagtgccgggtggcaggcactgtgccaggtgcagatactgcaagtgcatctggtgtctgccccgtgtttcttgcccagggctggttatgacagtggtcagccatcgtttttcagccttccccttcagggaccccttgagcagaatctgcctggtgggtgaggtggagcagatgagcctcatgactgggccgaggggcccgcatgctctagctcactctggatcccatgtgcacgctcgcacacacaacacacccagcaggatgggcgtgtctagaagaatgccgagcaggtggccttggacaattcacaaccagccgagcaggtcccctcctgcgccctgtgctagatgccagctgccccagcaggcctgttgtgactgccaggccccatttaggattgttttcctttgctgtcctttgcagggtggggctcttgtatacccacagcctgctctgggcaaaattatgtagcacggtctctgctattaattttttccagtaaattaaaggctagagaagaagaagaagaaaaatcaaggatccaatattaagaaatctgagcccaaaccttctactccagtgctgaacatggtgaaggattaagcctcctatcaagaaaaacaagcctgacagcctgtagactgatagagggaggtgtgccttctctccagaaagcctacttctgcaggaacccaggagtatggaatgagccatgcaaagtctgattcaaaaaataacccaatgggcatgcacccccagtcactcatccggaatccggctggcagcctggcagcccggcagcccatggctcccatgcacagtgcttgagagcttcattgtttcctgtctgctggtgccatcaacagctctggggtggcaggggcagatcttgggctaaaggacagtggccaacagctttgggccaaaaggccacaacaagaccagccagctaagaggaggaatgtcatgtccacagcgaatacctactgcagcaaggctgtaggagactttggagaggaaggaccctgtttccaacaacttgaccatgtttcccatccagggacctctgtgcagagagtggtggtgagcaagtatttccaactgggagcccccacagagtcagtggctggtctgtgcacttgttactggactcctagcactgtgcttggcttgtggtgggtactctacaaatgctgcatgcatatgtgcgtgtgccagtggactccagccttgtgatgtaccttcatctctgtgcccttgatagggcggttccagggttgcctctgcgtgagttcaaccctcgggtatttgagcagcacgtagcctcagcccagcattgtgctggctactggggcaatctaggcagcttataaaggctgggccttgccttgaagaagcttagagatgaggttaggcatttagcacaaatgcacgtctgggctctgaatgccagaggagttcaggagatgggccctcagtgagagcggtttggcactatgggaggggcagggccaccaggtcatcgcttctcaagctcttgatgggctctccttctgtcctgcccacaagagcccagccttgggctccccatctagctgtccagacaggctgggggtggggggctgttggtgaagggagggtgggccagagccatctgctctgcacaggttgggtcacgattctattccaccactttcactggtcccttggtatccaggcacatggcagccactgctccagagagtgaggagaggggctggggggatggagcctcgcaaggagcatggacacctagcacttacgtcatcaccatcggcatctgccttacctggctacctctctgttcagcacacctgggagcagcacccttgcagcccttctcccttgacagagctgtgacattgaaccctgccctggtctggtagctgagggcccagcctccccttgcctcctttgtcccatcagcccaggccatcatgggtacagaaggtagcaatgaagtctcacactcggggtaaccaacatgcaatacttatggaaagactgtgtgatcaagggttgagagaatagtatactgaacccaaatgtacccattacatagtgtgaacaattatcaacatgcagtactcgttgaaagaaaagggatgataaaaatgcactattattgaaagtaagaaagtgtggggtctgttaaacagacaaaggagcccactgagaaagctcccaaaggccaaaactgcaacaatttgagcaacaaaataaataatgtagcattggaacataatatgaagtataaaataaacgagtccatagtgaaagaaatggttgaataaattgagaataaacatctcccatgtagaattccgggtagtttatgcaggtgctctgccttcaaacatatggagcataactccccacttctgtttgttgttttgagacagagtctcacgctgtcgcccaggttggagtgcagtggcacaatctcagctcactgcaacctctgcctcccaggttcaagcgattctcctgcctcagcttctcgagtagctgagattacaggtgtatgccaccacaccaggctaatttttgtgtttttagttgctatggggtttcatcatgttggccaggctggtctcgaactcctgacctcaagtgatccacctgcctcagcctgccaaagtgctgggattacaggcgtgagccacctccccacttcttaagcgtggactgcatatagtagctaccttctaaaggacacattcaagaaagggacaaaaagtaaccttatggaggaacctgacaaactacctcagccaggcgatgaagggtaacatcagcataaacatgatgaagcaggttgatagtatgtatccttgatgtgtgatgagaatggtactttacctctgtggccttcctccaaaaaactgttacgcatggtctgggcacggtggctcatgcctgtaatcatagcactttgggaggccaagggaggatgattgcttaagtctagcagttcaagaccagcctgggcaacatagcaagagcctgcctctaccaaaaaaaaaaaaaaaaaaatgtaattagctgcacatggtggtgtgtgcctgtggtcccacctactcaggaagctgaccaggaggattgcttgagcccaggaggttgaggctgcagtgagccatgatccactgtactctagcctgggcgacagagcaagacactgtctcttggaaaaaaaaaaaaaaacataaacccatctagtcataaggataacatcaaacaaatcccacctgagggatgttctacaaaatacctggccatacttttcaaaactgtcaaagtcatcaaaaacaaggaaagaatgagaaaccgtcaaaaccaagaggagtctaaggagacatgagacatgacagctcagtgtaatgtagtgtcctgggtgggatcttgggacagaaaaaggccattaggtaaaaactaggggaattcaaataaggtatggactttctttagtaatgtatcaaaattggttcattcattatggcaaatgccacctattagtggaagatgttaatagggaaaactgactaatgggtctgtgggaactctgtgtactatctttgcaatttttctgtcaatctcaaactattccaaaatgtttattttttaaaatgctttttttttttttttaagacagggtcttgctgtgtcatccaggctggagtacagtggcataatcatggcttactgcagcctttacttctcaggctcaagtgaccccccatcttagcctcccaagtagctgtgagcacaggtgtgtgccaccgcatccgactaatttttttttttttttttaatttttgtagagacagagtgtggctatgtcgctcaggctggtctcaaactcctgagttcaagtgatcttccagccttggcctcccaaagtgttgggattacagtcatgagccatcacacccgaactaaaaaatacattgtttttttttttttttttgagatggaatttcactcttgttgccaaggctggagtgcaagggtgcaatctcagctcaccacaacctctgcctcctgggttcaagcgattctcctacctaagcctctaagcctcccgagtagctaggattacaggtatgcaccaccatgcgcggctaattttgtatttttagtagagacggggtttctccatgttggtcaggctggtcatgaactcccaaccttaggtgatctgcctgtcttggcctcccaaagtgttgggattacaggcgtgagccaccacacccggccatgcatttttcttattgttattttgtaagcgctgtatttcctcagggggagcagagggcaagggaaagtttccattaagctgggctaatgatgagcgccctgtccctgccctgcctggttttgttcttggatgtgccagagaagcgggagggaggaacgtgaggccacctggccccagttccccagctggtggaaaacagaggcaaggagggttactgcaggaaagtgtgaggatgtgcaggaacctgttagatgtgcctgggccaggttggagaaagctggctgctgtcaggtcagctcctgggaagacggactcatcacggcctcactgagccacacggcatcacactgcactggtgtggccacacacttggtggcaagtggagacctcattagaagggtgaggggcctgccctatttgctgtcaccatccctgacctagtgacagatggcagctggtattcagggcctcagccatccagcctagaggtaaaccaagcatgtttcaccagtgccccctattccccgagacctctcaccttccttcagaggcctgcggtggtggaagggcatgggctttggaggcagcagatacgggctcgggctcaggcaccaccacttgacagctgggaaaccttgggtgatttacgtaagctctccaacctgtttctccagttgtaaaaggcaggtaatacgcctgcttcacccaccttacaaggtgagtcaaggatcaaatgagaggcggtagaacaggagggactgtcttaggggttattgtttgggcagatgaggcaagagtggtcagcactttttaagcagcaggtaaagccttggtcttggggctaattggtggtagagttttgtatatagtcacgccacatcatgttttggttaacaacagaatgcatgtacgacagtggtcccgtgagatcataatactgtatttttactgtaccttttccatgtttagattcacaaatacttaccactgtgttccagttgcctacagtatccagtacggtgacaagctgcacaggtttgtagcctaggagcaacaggctaccccatctagcctaggtgtgcggtagggtaggccatctaggtctgtgtaagtgcactccatgatgttcacacaacgacgagatcacctgactgcttttctcagggtgtatcctcgtcattaagtgacatgactgtattaggttgctttcagttgcaggtaatagtaagtccaactcacattgtctcatataactgaaaatccagaggccacgtgggcctcgggagccatgtgatcagggccatgtttctcagtctcagagcatatgtgtgtgctggcttctcacgctggtttccttctaggtagaaaaatggttataggaggcccaggccacacattctaccatcccctaataggaaagagctgcttttccccgtcatacagtgtccacgacgtctctctctttagactattttaggtcacatgcttgtgctctgaattgatcactggggcaaggacaaatcatgctgactgacttaagcctgagttactcccaacctgaacaaattactggggcaaagagagataaatgaaaattattggcttagccagtcagggcctgggcctggaggtaggagggcatcaagccctggcaaaccttttggctgccacaggtggggaggagtggcatggatgccaacagtgtccctacaggcttctatcccagtaatcactgtttgagagcaatggccatttgcctctctagcatccatttacccctttggcaacaatcctaatttgcatttggagctttgttccttccccgttcccaaaaactacgtgcttctaatgaagcctcatttccctctcaagggagaggcatgtgaccaagactttggccaattggtgcactgtattctccaagccattggactgcttcttggaaaggcacttggtttgattaaagccagtgaaacacaatgatactcgctggaaggaaggctggggtggaaccaagtgtgcctgtctgctgaacctgaccccaacaggatgtagggtctggagctattggtgctgccattttacaaccccatggagagcctgagattgaggctaatgtagaaagatggagggagggtgaggaacctaataggaccagcctaattcctggactctgcagtttgagtcaacagattgcctcttttgcttcaaaagccagtttgggtcaagttttctaccagttgcaatggtgtcttaaatcatattatactttccttcctattcaaaggcagtaaatgccaccaagcagtgcatgtgggcaactagaatgcttggtccaatccttactatttgtcacttgacactaatattacatgaaaagcatcccagtcatgaaaggtatggaagaatgctcaataataccaagaagggagagcagtgtggaactattgtttactggtattattatctcaggggtgtttcccctgattatccatgaggttctctttatgctccgctccctgtagggtctggcaggcttcccaacttatctggtgttcaaggtgggcctaagggtgaaactggagcccacctggatacagagatctgtattagttttgtgtttattgatgggagaaagtatttggggtcatccaccttgaatgctacataaatgtcttctactcaaggagtcacataataaatctctccaaaggtgcggtggctcacacccgtaatctcagcactttgggaggctgaggcaggaagattgcttgagcccaggagctcgagaccagcttgggcaacgtggtgaaaccccatttctataaaaaatacaaaaattagctagctgtggtggtgtgcacctgtggtcctagctacttgggaggctaaggcaggaagatcttctgagcccaggaggtcgaggctgcagtgagccatgattgtgccactgcactccagcctgggtgcatttgagcaagatcctatctcaaatgagtgaatagacaaatctctaggactcaccttgagggctgtcaggaaaccctctggaaaaggatgtctcatggatatgccagtgtaaactctcctgaaataaccctttctcttctctacccagactaactttacctaccctttggggcccaactcagatccctccttcttggtaaaaagccagttcagactgaagcaatcccttctattaaccacattaattattactgcaattaatctcacaataccttgaggctccgagtgctgagaggattttgccttttgttatagtgatggaaaggatgcatttcaatatgttgccttgcagtgcaaacctttgttaacagggcaaaaatagcacagggggcaggaattacattcctggatgtgcatttggcttatttacatggatttgggtgccctctaaggacaccatcttctctcccctccaagagggtcaggccacaggacatccatgttcttggcctcccatgggagagggtctctcgccagaggaagggaaagccaagtggccacagagttccagcctgtccctgtgacagcccctgcctctggccagacatccacccacccttgctaagtcagcctgctctggggctactaggcccagtccttgctgtctgtcggagacagaccatgaagtgcagtgtgtggagggctgggacatagcataccgaattaccccagggagcttggaaaacatctcttcccactctctgttaggcccacggcttcctctactggaggagacggcatgtgaggatggaactcggtcattcctctgtcaccaccgatgtgaacagtctggaatcctgcacacaggagactgacgatccctgagcaacctttagtagctcctaccattgggcattttcttggtacagatcacaaataagagacatcatagaaaatgttattcttttattatttcaaggaggtaatacatagcccaatatggcaaagcaaaagggaattagaggcagcaaatggccaggtttttctaagcgcctcatgctgcatctctgagctcctgtctgcccgcagcccacagctgcttacatgaaggccaggtcagtagacagatggcccaacttgatactccactgactgagaaagggctcaatgtgcagcacagcagaggcactgccaggacccagcacgctgggcggcaccccacgctgccaccaccagctacagaggctagtgccttagtagcagccagtgtgtctagcacttgattttattcctgtgagcctagagtgggcaggacgtgaataaatcctgagtcataagttaaggtgaaagacttagtagtgttaatactcttggtgagaaaagacaacacagtcttggaggagagtgggcttggagtctggtggaagaaagatagaaacccccagaagggcctcggcctgcaggcactgccttgaggccatcagagggggttttcacggtacatgatagggaggagtgaggcaggtgggcactggagggctgtttcctctggcacagttgaactagagggtcactttccactcataattggtttcctaggtctaagtcaccacacctggggctgaagcaagtcttgcctgtgcaccaagcgtggccttggaccctggagagatgcaaggctcagttctccagtgttgaagtggaaggactcccaactgaaggagatctttctctccccacctccagctcttttcccttacaaatgaccagggtgcaagtcgagaggcagaggcacctcctggtgcaactccaccacagtcttacagagaactcatcttggtgggacccaaagcccagccttggcatgaagcagacttattccacccatcggagggcacccagtctggtgactgaatggtggcgtgcaagtgggagtcagcagtggctctggatgccgtaatactcagatgccattcatctctgtgtgatcgtcctggctggagagctggtgaggagggactgcttcctcctggcatgcactgttcaccaaccacaccacgtgggctgatagatttttggtttgacaggtgtggaaagaatttttaaaaccagccactgtgttctccaaacccagagccattggttttgtttgacaagaaagtaccaagagaaccacagctccactgaggctaaggcttgtgtagcacagaatgcagtatgtattgaaacgtataaaccttgtctgactggggagatgggtgagcaaagagctgccgggacccaggtcctctagtcggttgcaggctctgccgatgtctcatccttaagctcctcaaaacctgggactggcttctgtagaaagtatgtagtggcctggatcaccttgtctggtccaatgttgtacactgggtgagtgggctgctgcaaagagaagaaaaggtgccagttaatcaccccggtggtccttgaaaacataacacatcctttgctccatgaaaggcacttctaagaatttagtataaggaatcagagatacacacaaagcccaaaggttcaaaaatggtgtatttgctaaaactatctagtacatgggacacaggttaatatacagccattataaacacgcatttaaatatttaacgatacaggcaaatacttacaacatattatgtgagaaaacagtatgtacaatactatctcaaactgtttttttttttttttttttttttttgagagagtcttgctctgttgcccaggctggagtgcattgacacgatcttagctcactgcaacctctgcctcctgtgttcaagcaattctcctgcctcagcctcctgagtagctgggattacaggtgtgagccaccacgcctgggtaatttttgtattttttttttttttttttgagacggagtctctcgctctgtcgcccaggctggagtgcagtggcgggatctcggctcactgcaagctccgcctcccgggttcacgccattctcctgcctcagcctcccaagtagctgggactacaggcgcccgccactacgcccggctaattttttgtatttttagtagagacggggtttcaccgttttagccgggatggtctcgatctcctgacctcgtgatccgcccgcctcggcctcccaaagtgctgggattatttttgtatttttagtagagacagggtttcaccatgttggtccggctggtctcgaactcctgacctcaggtgatccacccgcctcggcctcccaaagtgctggggttacaggtgtgagccaccacacctggtctcaaactttttaaaaagtgtatttgtacctgtgatgtatataaatagcaaaaattgtacccataccaaaatattaatagtgatatgattgtttttcattttcttttttatattttatgtatcccaattattaaaacaataaacatgtatttacatttataatcaagaaaaagggggccggacgcggtggctcatgcctgtaatcccagcattttgggaggccgaggtggatggatcacccgaggtcaggagttcaagaccagcctggccaagatggtgaaaccccgtctctacaaaaatacaaaaattagccgagcatgatggtgagtgtctgtaatcccagctagttgggaggctgaagcaggagaattgcttgaacccgggaggcggaggttgcagtgagccaagattgtgccactgcactctaacctgggcaacagcgagactctgtctcaaaaaaaaaaaaaaaagaaaaaaggaccacaaccctaatatgtagtaaggctgtcagatcatatttaaatatataaacaaaatttaaatatgaaatttaaattaaatagatgttattctagtacatcacagaaacccaaaagaaactttagatttgacacggcataatcctaggccaatattcaggattctcccactgtgggataatgaagaaggggacacaactgcaggagagattttaaaaattttgagagaatactaggagcaacctcatgctgaaacatacaaaaattcagataaaacaataatttttaaaaaccaggaaaactgccaaaattgacttaaggaatttttaaaggcctacatgaagaaattagtaacaacaattgcttattctgccacccccacataccttaaaagatactagacctagatggtttctcaggcaagtagtatcaaacctacaaagaaacagataatctctgatctatacaaaccttttaaggactgaaaaaaaaaaaggggctagtgcgggggccaggtacaatggctcacacctataatcccagcactttgggtggctgaggtaggatagcttgaggccaagagttcaagaccagactaggcaacatagcaaaaccctgtctctacaaaaaatttaaaaattagcaggttctggtggtgtgcacctgtagtccctgctacttgggaggctaaggcaggaggatagcttgagcccaggagttccaggctgcagtgagctatgatcacagcactgtactccagcatgagtgacagagtgagatcatgtctctgaaaaagaaaagaaaaagaaaaaaggtaagaggtgcaggaagctacccatttaattttatgaggctatgatattatcctgaaacactggaaaaggacaatacaataaaattttagatcaatctttcttatgaatgtacatgcaaaaaaatcctaaataaaagtactaggcaaacatactggcaaactgaatccagcagtatactgaacaaaacacacagacacagacacactgcctctactatgaccaagaagggcttatcctgggaatataaggcttaacatcagaatattaatgaaacatatcatattaaagaagaaaaatcagatgcggagaaagcattcaataaaatttaacactaccttatgactgaaactaacaaaaacaacctagcaaatcaggaataaaagtgaatatcactaacttgatataatgtaactatcacaaccttacagtaaacatcatgcttaatgatcaggttataaaaagccttcccattataatcaggagcaagagacgaatgccctctactacctttagtcagcactatgtggggatcttacccaacaatacaaggcaagaaaaataaaatggaaactaacttagacaaacttaaaactattaaagagttcaacaaggtggctggacacaagatttataaatattattagcatttctatacactagtaacaaacagttacaaaactgaaaataagaaaagattccagtcacaagagacatgaaaactgtaaattagacataactctaaccgaaaaaaaaaaaatgctagtcctttatggaaaaaattataaaaaaaacactgaaagacattaaagaaaagaaaaattatgttcataaatggaagcctaaatattgaaaagaagtcagttctctttgtactcctgggaagacaggaagaaaaaaaaaaaagttggttctctcctattaatctaaaatgtagtgcaattccaataaaaatcccattagaacttgacaggctgatcctacaattcacaggaaaaagcaaaaggcaaagaatagccaaggcaattttgaagaaaaacaacaaggcagacaggacttgcctacctgttttcagacttgcttaaaagagtgcagataggcaaacagaccaaaggaacaaaataagagagtccagaaacagggccccttcatgtatggaaacttgagggtgtggtacacatgagatacacatcagcaggaaaggttgtagacttcagtaaatggtgctggtcaattggttatccatatggaaaaaagataacattatatccaagcctcaccatacacagaaaccaaatccaagagaattaaaaatctagattaaaaaagcaagctttagactatttagaagaagttacacttaatgacttgctgcattgccttgttcattcccttcatagcacgcatcacaatttgtgatgtatttgtttaatgtgtgcctccttttgtctgcttccctcaaaaaatggtagagattccttaagttaatcctcacctaccctcccccaaaaacaaacccctgaatgacagaaaagacaaatagatttgaccacttcaaaattaaaatattaaaatatttttgtggggaaggggtgctgggggcagggtctcactctatctcccagactggagcaaacagagctcactgcagccttgactacctgggctcaagcgattctcccacctcagcctcccaaagtgctaggtttacaggtgcgaaccaccatatctggcctaaaatcttctatttaacaaaaaaacaccaaaaacaaaatgctatggtttggatgtggtttatttgtccccacaaaaattaatgttgaaatctgatccccaagatggctatgttgagaggtggggtttgtggaatgtgtttgggtttgaggggtggatccctcaggagtgccttggtgctgttcttgcagtagtgcgtgagctctcactcttgctctggggagtctggattagtccttgagggaatggattagttcctgcaagggtaggctgttataaagccaggatgctctcaggctctcctctgtttgcatgggttggcttcccctttgatttccacatgttataatgcagcacaacccttgccagaagccagagccatgcccttgaatttctcagtctatagaaccatgagctaaataaacctcttgtctttatacattacctagtctcaggtattctcttatagcaatgcaaatcagagtcacaaaatgaaaagacaagtcacaagctggaagatattcactacacacatgtaactgatagaagattagtattaaaaatatacagagaactacaaatacttaagggaaaacaactgaagttacccatcagtaagaaaatgagcacagaatatgaactggcagacaattcgcagaagacaacacaaatggccaacaaacatttgaaaatattctcaacctcaccagtaatcaggaaaacacaaaatcaaacaaataccacttcacacccatcaaattggcaaaaaggaaaaggtctgactatggatcgattcatcttacacaaccacactggggagcagttacagaggtatctatcaaagatgacaatatgtgtccccttcaacccagcaggtcccctcctggagacattctaacatgtgaacccaatgagacagataccacaacgttcactgcaacactgtaatagcaaaaaattgataactagcaggagaacagagaaacacactggggtacatttatataagggagtatcatataatagttaaaatgaataaactggagcaacacatgtgaacacagataaacctcaaaaatacaatggcaagtggaaaaagcaatgcagaatgactggtacagtaggtaccattacaaaaagtttgaaaacatgcaagcaactgttatattgcttataaaaaactatatattgcttatagatacatatgtatgtagcaatagcacaaaaacatccacaggcatgatacatgtcaaatttgggacagggttacctctggagaaggagggaggaaaaaaaactggaagagggctacataagaggcaaatagggggaaataattagggcctggaaaagctgggtggtggtttttctgattaagaatgaggttgagcatcttttcaactatctattggccatttgtgtttcttccatttgaaatgtttcccaattaaaagaaacaaagatggggccaggcgtggtggctcacacatgtaatcctggcaccttgggaggctgaggcaggcatatcacttgaggccaggagtttgagaccagcctggccaacatggggaaaccctgtctctactaaaaatacaaaaattagctgggtgtggtggtgcatgcctgtaatcccagctactcaggaggctgaggcacgagaattgcttgaacctgggaggtggaggttgcagtgagccaatatcatgccactgtactccagcctgggtgacagagtgagactttgtctcacaaaaaaaaattaaaaattaaaaaaaaaatttttttaaacaaaaaaggaaggttacaatgacacagatgagaaaataaggcagtgacctagatggtagcagcaggccatgtttacactggtggaagtagggcttagtaagagtagggaactgcacacaaaaattcatgacagtctgcatgggccctgtgatttgatcactggggacagtctccattggattcatgtccaggctcacgtctaggctcagagcacctccaggttgtcctcagctggctgcagcagtgagcatcctgccctcatagggctattgttttttcaggaaagcagacaaacacacattaaacaacacaccaccaactgagtaaagtactacaaagaatatgaacaaggcactgaggcagagcattctggggatctcattctctgaagagatggcatctaagctgagcctctgggagagacgcggcaggctgtacagccagtgccgcatggctgcagtgctatcacgagcctgctgggactcacagcctcagagtgacacgtaactgtggcctcctctaggggaagctaataccagcagtgggctaggtcctcagccctgggataaaggcacaacagctctttgacagatcagaccgcccatctggaaccctgagcttgcccagaggtgcgtctcctctgtggtcacatcctcactaacggctgcacagctcgaagggcagagggaccacaagcttccgcctgtccacacaggaaatgcagagccagttctgcttacttggaaagccttctgtccgcgaggtccctgtggagaaggggtgtgaagccctgcacccgtcttaccagagcgttttcgggcacacccaggaccacatcatgcaacatggctccgctgccgaagtgctgggctatggacaggccgctcaggcagtagcaggtgtggtagaaatcacgcgacctgtaaggacaggcagctctgagcaggcgctcctctgctccgcacacatctacaaatgtagccacaccaattcagagaccactggtgcaatcacacgtccccccccatcctccatgtggctagaggaggcatggttttcccagcagtgttatttaaagccccactggctgagcacagtggctcacacccataatcccagcaagcaggaggctgaggcaagagaacggtttgaggccaggagttcaaaaccaacttgggcaacatgggagaccccgtctctacaaaaaattaaaaattagctaggtgtggtggccgatgcctgtaattccagttacttgggaggctgaagcaggaggatcactcgagcccaagaggtgaaggctgcagtgagtcatgattgtgacactgcactccagcctgggtgacagagtgagaccctgtctcaaaaaagtaaaatacaataaaataaaagccccatcctccagccctgcccagcagtgggaactgtattttttttcttttctttctttttttaccttaaactattaaaggaaactgtaattttaaagtcagtctctccagctgtcttctggaaagggctctccaggggcagtactaatgataaattgatacacttctctagaaaaatacctaaatatctagaaatgggccacatccttcctgatacattgtgggaccaggccttcccctggatgccaagagcagcaggacgtgtgctgggatgggggaagacagagggtgggtaacaaaggtgagaggacttattttatttccctttttctaacacataagccatctcagatttgagcttaatcatttaatccactctataatagttgtcatgattacagtctctgtttacaacactgaggggttttaaaatcctgtatcctattctatttagatcagtttttttttgttttttttaaaaaaaagaagagttatctacccagcaatctgtttccctgtctgggggagggggttgcatgcaggctgggggacaagacgggcagctggaggtgccaagatcaatggcctcaaggggtgctcccaactgggtgctttttcccatacaacctagcgctatgcaggtgctgaaggtgacacctctgctcttgagatctggctctgagtaggcctgaggtgcacgcccctctgctctctcctcccctctcccttccctccccagagagaaaacactcacttgccaggtttatccagaagcccccccgcagggcactggcagcacatcaggatgtactcctgcagggcctgctgatggaacatccagtggctcatgctaagggcagggtcacctgttgaagggcaaagggtcagtaagggcccggcagatccagccaagtatcaatgacctaattccactttctcacctgggggaatagtcaaggtttcctgctccccttcctcttccattcattcttggtacaactgctatcttccccatgtcctacgcacagcatgtcccttctcctgaactttgacatgtgtcaaagagcagcaattcaaagtggcactttcactttcttgaaatgcaccctgttaacgtggatggtgatcctcaaccacatctctggcaggcagtgaaccagcctagctgtttagcttaccttcccagactgacctcggtagctgctcccaacttggtccataactctaccctggacttcaagagacattccctctagcatatctctataacttgttaaccagactgattagctcagagaactcttaatgggtaataaagtctgtttcttctacttttctaagcctaaatttaattgatctccaaagggaattctctaacttgtctctcagctcaaagaatttacctaagaaacattactagtaactgccctcctgcatcatatgataccctagcaaaaactgggtattctggtaatactactaaggtactgacaagcaactggacttcttcactctgaagtccaatcactatggtcaaagaattctgtgggccacacagttatcaagtgggaaggagggacaaatcacggacaggtgtgcagaaacatctgcatagaaatcgattaaaaatatatatacatataggatgtacactaagtccttggtcaattttatattttgatacctgggctaaaagatgcctgacaataaatcatttttaaaaaaaagatgcccaacaattggtaaatggcacctgaaagctaattgttctttcttccagtctttttggttctatgcgtttttctacctagttattataactgtgtagcttatgtttttcacttataccactataggcataaattttctattctattacataatctgcatagccatcactgtgaatagccatatagtatttcattaagtggacatataaggtaactgtatcataaaaagaactgagctaaaaatcttatatatatgtcagtatataaattcctatggtgggccaggcacgatggcttatgcctgtaatcccagcactttgggaggctgaggggggttgatcacgaggtcaggagatcgagaccatcccggctaacacggtgaaaccctgtctctactaaaaatacaaaaaaattagccggacatggtggtgggcgcctgtagtcccagctactcaggaggctgaggcaggagaatggcgtgaacccaggaggcggagtttgcagtgagctgagatcacaccactgcactccagcctgggcgacacagcgagactccatctcaaaaaaaaaaaaaaattcctatggtgaaaattataaaagtttatggtatcaataacctttcccattttggagaaaatagcaaaaaagaaaaacgggggaaaagatttctaaaaataaaaatgaaaagtttatgatacagtctataaagagattgaagcaaaatattaaactgttgaatatttcctttttttttttcttttttgagacagagtctcactctgttgcccaggttggagggcaatggcacgatctcggctcactgcaacctccgcctcccgggttcaagcgattgtcctgcctcagcctcccgagtagctgggattacaggcatgcaccaccatgcctggctaattcttgtatttttagtagagacatggtttcactatgttggtcaggctgctctctaactcctgacctcaggtgacccaccctcttttggcctcccaaagtactgggattacaggcatgggccaccgcacccagcctaaattgttgaatatttcaaacagacaataagaatttattaaatttctttaaaaagagacacagaggaaaagggtttccaaggttgagcactaggtgagggacagtggccaggtgacatttagaggccagggacaaaagcttctcgtcttcaaccctgagtcgcactcagccctgaaacacccattaagagacacaggaaactaagtccgacctaaggagaagcatccaatctcccatctcaggctggctgcaggccacatgctttgatacacttgcactattttaattcccttcctttcttttcctcacctgtaagcacagtgaactttgttgtagaagatacatacatatatgatgggacttcactctatcttcttttacttatttccaaggttgtttccagttccttgccattatgaggaatgctggactaaatctttgtcaatattatgtatgcttaagattattttcttcaaatagactgaccacggtggaattattcggttaaagggaataaacattgttaaggcttttaatagatactgataaactgctttaagaatttatagactactctcagcacaatccctgtggagtagccctgctctgcaggagctgtcaaaaataaatatataaataaactaaaaataaaaacaaagactttatatagctaccagcaaaatttaaaattttgctataccacctccagcattagcacctttttgttgttgttgttgagatgctatcttgctctgtcgcccaggctggagtgcagtggtgtgatctcagctcactgcaacctctgcctcccaggttcaagtcattctcctgtctcagcctcctgagtaccttggattacaggtacaagcccccacgcctggctaatttttgcatttttagtagagacagggtttcactatgttgatcaagccagtctcgaactcctaaaatgatctgcccaactcggcttcccaaagtgctaggattacaggcgtgagccaccacgcccggccagctttagttactttttaaaagttatcagcaattaaaatggtaaaaagaaatagtacctgatagtttattttgatttgcatgcctctgattactaattagggtgaaatttttccataacttgtgtttaatatttgcatttccttatgatggtgtctgtttggcctaatcttctgagatccaatagccaattttattaatctagctttttcttatacttgccccttgtctacatcatatgctgcatctattttctcctttttgctcctctgttttggttatgtgagtttaaaactttttaaaatttttaaaatttaattaatgtaaaacatatatatgttttatacttaatattgtaatcatactattgatttttccttcacgatttcctttttaagaaaatatttaatgtgtatggggatttttggggggatgagtgatgaaaatgttctaaaattgtcatgatggttcgcaactgaataggtaagttgtgtggtatgggaattatatctcaacaaagctattatttaaaaaagcatatttattaaactttaggaaactgcattacacatctgtacaaaatgtacatatatttcatatcctataacaaataaaagactattattataaggtaaatgataacctgtggctaaaattagagtctgaaaagaaaacgctatgtttattatataaaaaactatagactgtttcagtgacttcctatattattaaagcatagaagctcaaagttcaaaagctctacaaggagcttccagatatcctgaatttggacaccagcacacataatcacaacaagatgaaagcagatacgattatagggtgataactgcacactggaatccaccttttaaatcctttctacctcttcctgaaattataggtcgccattctaatctcattttgcatttcaaaggttccttttatctaaaaaaatcaaaagtctttccacaccataactgataggtgcagccatctgtagctcaatttcacaggtaggcaagaaaattccagggtatgtccaaaagaacatataagaaaccagtaactaccaagccaagtggaaactcacaggcctgctgctttcttattgctccacaaaacaaaaaaacaaagtaactcactgatttagtcagcacttgagatttcttaagccttttttttttttttttagacggagtcctgccctgttacccaggctggagtgcaacggcgcgatctcagctcactgcaacctccgcctccggggttcaagggattctcctgcctcagcctcctgagtagctgggattacaggcaacgtggcaccatgcctggctaattttttgtatctttagtagagatggggtttcaccatgttggccaggctggtcttgaactcctgagctcatgatccacccacctcggcctcccaaaatgctgggattacaggcttttgtgtttttttgagacaaagtcttgctctgtcgctcaggctggagttgcagtggcactctctgcctgcaacctctgcctcccagactcaagtgatccttctacctcagcctcctgagtagctaggactacaggcatgtgccaccatgtctggttaactgtttttaattttttgtagagacaagctctcactatattgcccaggctggtcttgaactcctgagctcaagaggtcctcctgctttggcctcccaaagtgctgggattatggtcatgaaccaccatgtccagcattttaaggtactaatagtaattccttcttctactcaaatactgtcatttacacatagaaggtagtcaatggcatggagccactgatggtcacttgctgggtcagggcatggcctagacccacgtgctgcactatgtagagcattctttttgctttttagttagcaatatgatcaatgccttttaaaaaatgtatttgtacatttaccaaaataaaattagtaatgcacatggtttttttttttttaaaggcacagtataatacagaaggatagaaaatctaaaaagttggccaggtatggtggctcacgcctgtaatctcagcactttgtgtggccaaggaaggtggatcacttgaggccaggagtttgagaccagccaggccaacatagtcatatcctgtctctactaaaaatagaaaacattggctgggtgtggtggtacacgcctgtaatcccagctacacaggaggctgaggcaagaaaatcaattgaaccgaggaggctacagtgagccgagattgcaccactgcactccagcctcagcaacagagtgagactctgtctcaaaaaaaaaaaaaaaaaaaaaaaaaaatctaaaaagtctccctccttctgtcttctgtctgcttctcttctcccaaaggtacccattgttcaaggggttttgtgtagggttccaggaaaagctgtgtacatctcgggctgtgtgcccaggcactgctccaggccccgcccccttacacttcatgttgtatcttgcagagctttctatatcagcccatggtatgcagctactgtttggagagatttttattatttaacccttaaccttttgataggcacttaggctgctattgaaactccacttcaatatacatcctttgctaatatccctgcaggtaaattcctgacagtgcacttgctgtgttcaaagggtaagtgcccttataatttaaatggatgtctccaaactgccctccaaaaaatgacttaacctatttacatccccactatcaaattacctgttttctcacactctccccaacatagggtatcaagttttttaatctctgccaatccaataataaaaacaaatagtgccactcttttgattagcatttcttttactacaagtgagctaaacaatttttcgttggattaatggccacctactgtggttatgagcagggcagggttcagatgccagctagtctggattcacacaaccacatactaacccttgtgagtgccaatcaggtattataaagcaatcacttaacctcactgtagtttgtttcctcatctgtaaacaatggtacctatttcatagggttgttttgagaattaaatgagaaaacatatgtgaaatgctcagtacagcccctggcatacagtgagggcttgggaagactccgctaccagtagtagtggcagttgtagtagaaaaagtaagaaggacagttctttcactgggacctctttcttcagatcctttgcctgtttttcagttgggttgtccatccatttcttactggtttgtatgattttttttcaaattaaagaaattagccattcatcacttgttataaatatttttcgcacctttttgcttgttttgtttgtagaatttccctgtttctgtaaaataacttttgttgtctttttttatgcaagaaatacctattaactatagaaagattagaaaatacaaacagaagcaaacatcacctgtaacttcacatcctagatactttctatgaattttttgtagtcaactcttcactaaaaatgggattccacacatattgctttgatatgatcacaatatattgtgactatctttctacactgcatccccttttgactcccaaagtcagtattttgccctcctttcaacacacttcccttctttacagactcctgtctgttccaagttcaagagatgccctgtgtctgagaagacaacacaggccttctcccagccaatgaaaaaagctggaagcaccaagattcataggcacccttttccatagacaaagctttgaatgccactaagccccctagaacatgtgctacaagaaacaattaaccagcagcccccctggaagactttgacaggtggtgctcctgttatagctcattccacatttccctgggattgcagaattactgagtcttatccatgccagggacaggtttgtaaaagactgaccattttaccaggggcttgacctcaccagttccaaataaagagatcaccatgaccccaagtttttttctatcttagaaatgttgggccaggcacggtggctcacgcctgtaatcccagcactttgggaggccaaggcggacagatcacctgaggtcaggagttcgagaccagcctgaccaacatggagaaaccctgtctctactaaaaatacaaaattggctgggcgtggtggtgcatgcctataatcccagctatttaggaggctaaggcaggagaattacttgaacccagggggcagaggttgcagtgatccattgcactccggcctgggcaacaagagtgaaactccgtctcaaaaaaaaataatactaaaataaaaaatgtttgacttggggaattcctgacttccctactggtggtcaaggcagagactgtgcaggctccaaagtcagtgcacttgctgacagtgcacttgctgtgttccaagggtaagtgccttatatgccttaatactgacacctaaagcccagtgggcccaggccgggaaaatgggacagaggctctgcttactttaattcagtgtcagaaatggtcacaactcaacaactcaaaggaaattaagaaactaaataatgaggctcagggccgggtgcggtggctcacgcctataatcccagcactttgggaggccgaagtgggcggatcacctgaggtaaggagttcaagaacagcctgtccaacatggtgaaaccctgtctctactaaaaatacaaaaattagccaggtgtggtggcacgcgcctgtagtcccagctactcaggaggctgaggcaggagaattgcttgaacctgggaggtggaggctgcagtgagccaagatcgtgccactgcactccagcctgggagacagagcacgactccatctcgggggcggcggggaggggggaagacggggggtggggggctcagaaacaggaaaaaaaagtatggggaggggcagaaaagaatctcatcttttacatttgagcagttacattatccaactaagtccgaagaacagcttctctttggacccagggatctcattccaaaaacagatcagcaaccagcagggccccatgacttcctctctcccacaggtctactcagagacacctgctctcacatcaagtacaccagaaagatggtgcaggagttagcaggcagactgaggtttcaagagatagagagagaatgttcccagactttttgctcactaactacttcggttttgcgttcccatttgagaccccacagaaacgaacgtggatttctctactccaatggtgcaggtggaacaaactcccatttaggcttattcaatgaatgtaaaataaaacatttctaatagtgacaactctgcagccagtcagacacggcgagtctcttctccatggtgtaggggcaacccacccctacaacccacccctacacatgggttctggttctctacccctttacgcagttgcctttcctgttgctgttgcaacagtgactgttgcaacactgagggttttcagctctgccctgcacccagaggaggtggcaatcaccacagagcccaggacaggagtgggctgctccttccagataacgcagaagcagcgcccacttcctccccgctccccgtagcaatttcaaggaagctcattctgtcgcagccaatttgaagaagcaaagaatgacactaaaccaatgaaactaaatcttactctgcattcgcatgccccacggcatgaggttccacactgggcactcaaaatccaggatagacagagctcatttcaacccctctaaaaaagcacgctgggcttccagactttgtgagtagtggagggaaatcatccagccccaagtgaacagctccccaggctcaccttgggcgtgcagtgcgcggtggagcaggggcaggagccccgcctgccagaaggagtagcagccatccaccagcttgttgcagcggccctgaaatcctccttcaaatcgcatctgccggcttgtcacccattgctgaggagacacagatgggaaaggcagttgtaggctaaaagagacaaaatccagcccgacagaatctccaggagtcaatctgtgggatggagggtttcccatcttgtggcttcttggcactctagttttggtgctctggttttctttccttccctccccacactgccatagacacagagtgaagcatttaagccaacgctgtagaggcatccagcactgatctctgctcaatgcctggcagacaactaccttttcctgggttccaaagcagtgccagtgctgagaagataaagaggccaagctggtttgtaaggagaccttcaaagtctcttaataaacatggcttaagttggaaattgaaggcaagactaccagtagctcatttctcattacttccctgctccggggagtttattaaaagcagataaatggaatttggtactacatttcttttttttttttttttttttttttttttttttgagacggagtctcgctctgtcgcccaggccggactgcggactgcagtggcgcaatctcggctcactgcaagctccgcttcccgggttcacgccattctcctgcctcagcctcccgagtagctgggaccacaggcgcccgccaccgcgcccggctaattttttgtatttttagtagagacggggtttcaccttgttagccaggatggtctcgatctcctgacctcatgatccacccgcctcggcctcccaaagtgctgggattacaggcgtgagccaccgtgcccggcctggtactacatttcatcagatgatctcaaactgctcctgacttttacttggcacctggggaaatttacccaaggtctcttagcaagtcactagcaggcctgaaagcagaagccattcattctaattaccaaatgacaactctgcccagtctgtggctgatataagaaaatcttttactttgaagctgtaaaataggtcttggtcttgatgtcactcagcggtcacacacgataccaccattccttgcttatctacaagttttctaaacacactctactacaaagatcaagatagtcatgggtttggtccctcagaatgagcagaaccaactggctgagcagatatgacatttccatttccctccctagaccacctaggccgttccagccacggacttacagagctgcctcactcaactgaaagggtacaggggagggtacttcctgtttctagagtcttactaggtaaaggtcctgaaaggagccactgggacccttgatggaagtgggggccagccctcccctaaaagctgttgtttagattattccctcttcaaggcaacacctgcccatagagagtcacagtcacaaatgcttaaaagagacagaaaacactgtactgcaggttcaggtactaatatatcctcggttgatcttaaatgaaccagggcttccagcatgtaatggaagtgggctaagcattactcaggcagagagaaagcaggcgctgcagtgggagtcggttcctcatttctacttaccgcagggcttaagtgtttttaagcagactaatttactttttccagtgcctaagcccatggatttgttctgtttccttgggctataggaattcatacttcagatatgggtcctacttctcccaaagcaaatggaagggagtagtctggattagagcaggggtccctaacccccagaccatgccaggctgcacagcaggacatgagtggtgggtgagccagtgaagcttaatctgtatttacagctgctcctcactgctcccattactgcctgagctccacttcctgacagatcagcagcagcattagattctcataggagcgcaaaccctactgtgaaccgtgtatgccaggcttctaggttgcacgctctacatgagagtctaatgcctgatgatctgtcactgtctcccatcacccccaaatgggactgtctagttgaaagaaaacaagctcagggctctcactgattctacattatggtgagttgtataattatttcattatatattacagtgtaataatagaaataaagtacacaataaatgtaatgtacttgaatcatcctgaagccatcaccccccgtcccacccccaaccccaggtccacggaaaaattatctcccacaaaactggtcccttgtgccaaaaagattattactgtgggttagagggacactaacatttattaagtacctactatgtgccaggctgtttataaatgttctctcctttaaccttaaaaaaataaggattgttatccctaccttataaaagaaaaaaatatcaagctaaaagagattagacaatttgcccaaggactcatgtctcaaatgtagtagggacagggttcaaatctagaacactgtctttataactgaggcactccctaatcacattccttatctctgcctgggagatgggacttttttgtttcatgccttattggtgttcagattttaaaacatctgagaaactcttaagttcagcatacaaagttggctgtttcagcatgagccttcaagccttcatgaatctttaaaaagactacaccgggggaggctttctgaaggtggaggcaagacactgctggttacatgtctacagggtacaacagaaactctccaggaagctcacgatgggccgcataacgggaggctggcatctgaactcagggagaggaggtgcatgtcagttgcagctggtttgctttgacgtcatggtcagggggtacatgctccccaaatgacatgacggggaatgccttctccctggtggccgtggaggtgtgtgtgtttgtgcacccactgatcatttaactacaatctagtgactccctgaagctgactgctttctgagtttcttctgaatactggccaggagcgtggggtccagacataaatgttgggctgccttctcaatgcaattagccagctctgcctaaacaactcatttaaatgtaggtactaaatgtttacacagtgcagcaggtaataaaagtttggtttcgaaatgctgcaaagctcttcttgtaacttttcctcttaggaggttctttctataacacacgataacctctaattctacgaaactgaagtataaggaaggtactctgctcacaccagatgtctgcagcacacagtctatgtagtctacacactatgtaaaaagctctaagcaggaagacagaaaggcagaagggggagccaagacagagcagctgctcactccttcctctgtgttggaacagagctaactctcttagcccttcccatagccaaactctcctgaagcctgcatgtctgagtacaatcacatcaccatgacctggggcctgagagggggatggctcaaaagatacttactaataagctcttcaagttcaaggaacgttccctcttgaggattaccagcgcggccaggccacagaaggtatagccaccatgggcttccatccctggtaccccgccaatgccaccttcccagttctgacacctaagaagagattgagaaaagcagaatgagtggccagtgagtggacgtacacaagaccaggaccatcctaggtggcagagaaaaagttcactcagattaaggtgtgaaccatcacaactatgaatgaaaagatgccaactaattaacttttggaaatgtcttttcaaaaaaaaaaaaaaaaaaaagctgggcctggtggcacccatgtgtaatcccagctgctcaggagactaaggcaagaagatcacttgaggcgaggagttcgaggctgcagtgagctatgatcacaccattgtgctccagcccgggtgaaagagtgagactaggtctccaaaaaatgtaagtataataaaaactgtaaaatgttaaaaacccagacacttagaaacagcctacttgtgtaagaaacataataattcaaattattactctttgggaaaaagttataaaatcatacatatacatatatgtacatatatacacatatatatacatatatatatatacacacatatatatacatatatatacatatatatatagtgataaccatcaagttaaaataaaattaaagagtgattgttgattctagtgatcttttatttttgaaacagggtcttaactctgttacctaggttgactgcagatcatggctcactgcagcctcaacctcctggactcaggcaatcctcccacctcagcctcctgagtagctgggactatgggcgtgccccaccatacccggaccattttttgtattttttgtagagatggggcattgccatgttacccaggctggtcttaaatttctggcctcaaggaatcctcccaccccagcatcccaaagcgttgggatgacaggcatgggccaccgcacttggcctctggtgatctttgagtacaggtctactagtaatatttttcctttttgtttttctatttgttcaaaaagtttttataatgaacctgtatactattaaaaaataaacgttatttttaaaaattataattaggccaggtggtgatggcttcttaaacagcctgcagaaccatgagccaaataaacctcttttctttctaagttacccagcctcaggtattcctttatactgacacaaaatggactaacacaagaaggacaagaaataactgacttagtagaatagagaaacctttcctacccaaaggatagggatgggagaggggcaacaaaaagcaaggtgatctgctccaataaaaggctccaggattagagatacagggaacctccacaaagtggaatgcgtctgaaccaagtttgttggttgcaaacttatataagaatcagacctttaagtcccctactcaaatccagcagaagatgggaagtttcagaggtttaatcaaaaggatctgagttccagaatatccaacaagctaagaggaggagggagcactgtaccaaatgtgattacgtgagagtcagtaatctcaacacaatacccccagccccattcctctgtgtatttcacacaaggctgccagtttcataccccaagcaggaatttagaagattcctctctgagggaactgataagcccaagggaaaaaccctacagacactgctttgagaattccccaatgaatggcttgatcctgcccactctcgcagagctccccagcagcttttcagtgctggatccttaaatatgaacagacagctgtagagtaccagacatttgaccacagtctctactatgaaagaggagaccaaaacaaacaaaaataaattggaggaaataagacagggagcaaaagaaaactttttaaagttgtatctttagataaaatattatatgaagtaagactattgagaggacaaaatatccccagaaaagaacaagagagtagataaaaaagtagtcaggaagtaaaagtagtcagggaggaaaactaaaaataggattacaaaaataaaaacaagaggattagaagataaatactaagagaatctctcaaagtataagaagaaggattaagagatggaaacgaaccatgcaatgaaatatttttatttttatttatttatttttgagacagagtctcgctctgatgccgaggctggagtacagtggcacaatcttggctcactgcaacctccgcctcctgggttcaagtgattctcctgcctcagcctcctgagtacgtgggattacaggtgcatgccaccacgcccggctaatttttgtatttttagtaaagacagggtttcaccatgttggtcaggctggtttcgaactcctgacctcgtgatctgcctgccttggcctcccaaagtgctgggattacaggtatgagccactgcacccggcagtattatttttatttatttatttattttgagatggagtctcacactgtcacctgggctggagtgcaatggtgcgatctcggctcactgcaacctctgcctcctgggttcaagcaattctcctgcctcagcctcccgagtagctgggattacaggtacccaccaccacacccggctaatgttttgtatattttgtagaggctgggtttcactatgttggccaagctggtctcgaactcctgacctcgtgatccgcccgcctcagcctcccaaagtgttaggattacaggcgtgagccaccacgcccagcctcaaagtattcttaaaagtcagacaatcaaatgtactaatgggatgtcatatttttaaaaggctggccaggtgcgggggctcatgcctgtaatcccagcactttgggagaccaaggcaggaggatcatttgaggtcaggagtttgagactaacctgatcaacatggcgaaaccccgtaaaaattagctgggtgtcgtggcgcacgcctataatcccagctacttgggaggctgaggcaggagaatcgcttgaacctgggagaaagaggttgcagtgagctggtctgcaccaccgcactccagcctgggcaacagagcaaggcaccatctcaataaataaataaataaataaataaataaataaataaataaataaataaataaataataaataaataaataagaggctgggcatggtggctcacacctgtaatcccagcacttggggaagccgcagcaggaggattacgtcagcccaggagtttgagaccaacctgggcaatgtggtgaggctttgtctctacaaaaatttaaaaaattagcggatggtggatgcctgtagtcacagctactcaggaggctgaggatgatcacttgagcctggaaagtcgaggcaacagtgaaccatgatcgtgtcactgcactccaatctgggagacacataaaacaaaaagagacgtctcaaaaaaaaaaaaaaaaaaaaaaaaaaaaaaaaaaaaaaaaaaagggcccggcgtggtggctcacgcctataatctcagcactttgggaggccgaggcaggcgatcacttgaggtcaggagttcgagaccagcctggccaacatggtaaaaccccatctctactaaaaatacaaaaattagctgggcgtggtcgtgggcttctgtagtcccagctactcaggaggctgaggcaggagaattgctggaacctgagaggcagaggttgcagtgagccgagatcacgccattgcactccagcccgggtaacaacagcaagactccgtctcaaaggaaaaaaaaaaaagagcaaacacagaaaacacaagagaagaaattatcaaagaaatactgtaataaagaatcttggtactaaagtatatgcacttccaaatcgagtgcccagcaaaatgaataaaaataatccacatcaagattcatcatcaagtttccaaacaagaataaacattccaggccaggcgaggtggctcatgtctgtaatcccagtactttgggaggctcaggagggcagatcacttgaggtcaggagtttgagaccagcctggccagtatgacgagaccctgtctctactaaaaatacaaaaattagtcaggcatggtggcaggcacctgaggttgcagtgagctgagattacgccactgcactccaacctgggtgacagagcaagactccatcacacacaaaaagaataaagattccaagccgctaaagaaggacaggatggggatagaaaaagagagacagaagaaaaaaacatacagagaattaagaatcacaatggcactgccaggtagtacagcacagtggaatccatttgatttctctgtatttctgcttaatataaaatttaaaggctgggtgtggtggctcacgcctataatcccagcactttgggaggctgaggcaggcggattgcttaagctcaggggtttaagaccagcctgggcaacatgggaaaaccccgtctctactaaaaacacaaaaattagccaggtgtggtggcatacacctgcagtcctggctacttggaaagctgaagcaggaggatcacttgaacccaggaggtcaaggctgcagtgagccaagatcacgccactgcactccagcctgggtgacgaagtgagaccctctttcaaaaaataaataaattaaattaaattaattaaattcagtatcccaccacttgacatataaggaaactatgacacagagcagtggaataacttgtccaagcacaaagctaattagaaatggcaggctggccatcgtggctcacacctgtaattccaacactttgtggggctgaggcaggaagattgcttgaaaccaggagttcaagaccagcctgggcaacacagtgagactctgtctttacaagacattttaaaaattagctaggtgttgtggtgcacacctgtggtctctgctactcaggaggctgaggtgggaagactgcttgagcccaggaggtcaaggctgcagtgagccgtgatcatatcactgcaatccagccagggcaacaagcaagaccgtgtcttcaaagaaaaaaaaaaaaagctgggcgcagtggctcatgcctgtaatccttgaactttggtaggtcaaggtgggtggatagcctgagcccaggagttcaagccccacctggacaacacagacagatcccatctctacaaattttttttttaaacattagctggttatggtggcacgcgcttgttgtcccagctacttaggaggttgagatgggaggattgcttgagcccaggaggtggtggctgcagcgagctgtgatcacaccactacactccagctcgtgcaacagagcaagactcggtctcaaaaaaagaaagagagaattgaaagacagaggaagaaagaaggaagagaagaggaaagaaagggcaaaactgggattcaaacccaggctgtctgagttccgtatctagtctgtgcctaaccagtcaacccccctgcaaatgacagctgtacactgaacaaaatacaaaaaaacagcttcctgagggttcagctgactgaaaaagggcaggcagattttggtggagtttgaaacttggaacagagaacagcatgcagttagtccctcccttcccccacaactttttctctctggtttgccctcaggatggcagccatagcccagggcggcagcagcaggccaggggtcaggggtcagggcgggcagccaacactctaatgggaagccaaccatccttctggcaggaagatgcaggctgccagaaactgaggacgaatccagaaacaggaaagtcaaagaagaaaaatcccaaattctgcatttaaactcagttcaagtttccacatacgtgctggggaaacaaagcaacttctaagcaagaactgagctctgagctgctgcatgagtgacagtttgtagcttgagtctgaccaagttgactgcctgctaaactgaaaacatcaaccccttttggggcaaaccaacagaatccataccgttctgttgtatgacacctccaccatcatatcacaatgtctaggacacaacacaacatcactcagcacaggaagactcatggagctgacatgccaactccaggacacacagatgtggaaattcccagacaagcaatttaaagcagacattataattccatacttaccacagcaaaatgaagaaaaatgcactcataaagaataaaaagatggaaaatctcagctgagaaacacaaaatataaaagagaaccaaacacaggcagtgcctactctccagctctcaactatagctgccttaccattgagcatgacagtcctcaatgaactctggttactattatcagccttattaacaatgacattggaagccagaagataatgaagcaatgcttacaaaattcagaaagactacagtttataccattgccaagttagaaatctctaaccaaataattaagtgtgagattagaacacagatacatgcaagatattaaaaatgtatctcccaggtacccttttttgggatctgttggagtacaatacttcatgaaaataagaaaaccaagaaaaaggaggacagggacttcaacgaaggagagaaatgaagtgaatttcatgctgaaaggaagcttcgggatgcctgctgtgtagcaagctgagagcaatctgtccagactgaagcaggagggcagagggctccagaaggggcaactcaaaacgcacgtgtgcacagagacaggttacctgaagggtttgactatgtttagagtaattttttatagctctgacagacaatttgggaaggaattcataagtacattcatgatatatccattaactccaggaaaatgaaactcatacaaaaaagtaaacatgatctcagcatatcatctggtatcactgtaaattatatttatatggtaatacatactactttgataaaaataaaatttttttaactaaaacagtatctcagcttggctatcattccatcatagtatatatgtgtctactataccttttgcttctttttttgagatggagtctcgccctgtcgcccaggctggagtgcagtggcgtgatctcggctcactgcaagctccgcctcctgggttcactccattctcctgcctcagcttcccgagtagctgggactacaggcgcccgccaccatgcccagctaattttttgtatttttagtagagacggggtgtcaccatgttagccaggatggtctcgatttcctgacctcatgatccgcttgccctggcctcccaaagtgctggaattacaggcgtgagccaccgcacctggcctgctttttttaaactatgaaatatttggagcatccaggaaagtacagcaaacaaaatatagaacatacacgtatctaagacctagcttagaattagccatatacacttcaggtctttgttgttgttaactattacagctgaagtctcctatgcagacttatctcatttcctttgctctcccctcagcgggaatcactatgctaaatttggtgtttatctttcgtatacatgtttttatattattaccacatgattcttctcagaaacaatacagaattctcttgcatgtttcaaattttaagtaaatgtgctaatctgtatggtttttttgtatttttttcttttcattctttcaactcaacatagagatttttccatattgatacatgtaactctagttcattcattttcactgctacattatattccgatgcaactataccacacttacccatctcgtgcttatgagcactgaatctgctttcagcttttggctcttataaacaagtcctgtgctcctctctcccattcgtgtgtgcaagggtttctgtgggagtggaattactgggtcctacgcaagggcacctttgacatactgtcaaattgctctaaaaactggttaaatcaattcaggctctcactaatattgtttaccaaagttttttatctttgccaatctaaaatataatataacattaaagaaagtttggaaaaaagaagacattttaagtatttaaaaaaatcattagataaccctaatggatctcctgtgatttttgtatttccttccaagtccctctgcattttctttatttttctgaagtagtgtcgtgaccgcctgctctccaagaggccaggagaaaccctggcttctctcaccttgctatccattcagcagtgccctcaaagaggtctggagtgatgatgttggtcagcgaggctacggaggcagcacagtatgcgcttctggaaagacagaaacgggaaacacattaagctctacggaagagctaatgaggctcagtgaactccgcgggcggactgctcgccttgcctagtaagctgtaatcacctcctgtcctcactcttggcacacggtcagtcctcctgggtctccaactgagaggtgtgacattctatttggatagagttgctcacggcatggcttcagtgaaagaacatgacattctattctccctacctccacatggtccaatctacatcagaggaaataacagccatatcaattcatgtcaaaagtggattcagctcttctttcaaagacctataatggttgccataaatctatggtatcattcaggtacttctgatatgctcattcatttggatgttagtactgtttcagagccaggatttctgtttacagccttgacacattaaagattaactatactttttctgcaacagataaactgcaaaacaggccaccaaattgtaatagatcaaacaaggataggaacaggtgagtccactccaatacagtccttaaacctctagagggagaaaagagccttgatttcaaacctctcaccagtacacacacacacacacacacacacacacacacacacacacgttaaatgaaaaaggcgcacgtctatattttttgttttgcttttgttttggtttttattgagacagggtctcactctgtcgcccaggctagagtgcagtggtatgatctcagctcactgcaacctccgcctcctgggttcaagcaattctcctgtatcagcctcccaagtagctgggattacaggcgcatgccaccatgcctggcttatttttctatttttagtggagatggggtttcgccatgttggctaggctggtttcaaactcctgacctcaagcaatccacctgccttggcctcccaaagtgctgggattacaggcataagccaccgcgcccgggctattttttaaaaaagcattattaggctgggcacagttgctcatgcctgtaatcccagcactttgggaggctgaggcaggtggatcacgaggccaggagttcaagaccaacctgaccaatattgcgaaaccccgtctccactaaaaacacaaaaattagctgggcatggtggcgtgtgcccgtagtcccaactacttgggaggctgaggcaggagaaccacttgaacccgggaggcgggggttgcagtgagccaagatcatgccactgcattccagcttgggcaacagagtgagactctgtctcaaaaaaaaaaacaaacacaaaaaattattatacttgatttaggatcattcttgctgttccatcctcccagccctaattcttctcggggcacattttatttcagcttctccctctgtcatggtatacacacacagactgcctttccttcccctctatggttttttcaaatacccggcacagggaagacaaaaatcattggtttgaattctgctcaaaaatccttctcctggccaggcatggtagctcatgcctgtaatcccagcactttgggaggctaaggcaggtggattatttgaggtcaggagttcgagactagcctggccaacatggtgagacctcgtctctactaaaaatacaaaaattagctgggcatggtggcacacgcctgtaatcccagctacttgggagaccgaggcaggagaatcgtttgaaccccagagacagaggttgcagtgagccaagatcccaccactgcgctcctgcctgggcaacagaaagaaactccatctcaaaacaaaacaaacaaaaagtatattcctaagggctcctaagaaacataaaagaagggcctagtttccatcttcttttttttttttaagataggatctcactttgttgcccaggctgcagtgcagtggcgctatcatggctcactgcaacctcaaactcctgggctcaaactgatcttgcctcagcctcctaagcagctgaggctacagatgcatgccaccacacctggctaattttttaaaaattttttgtagagacagggtcttgctgtgttacccaggttggtcttgaactcctggcctcaagtgattctctcatctcagtctctcaaagtgttgagattacagacatgagccactgccgctcggccctggtttccatcttactcagtatagatataacatgaagtcagacttactgaggtattccaaagaagtctctgcagaagctgcatgcattatgatcctaccagcatttttagcagccaaaggcacagtggaagtttagttccaccagcaggcattgggagcacacaagagtcacaagtgccaatgccaaatgtgatcatctaccagcagctaattttgaagatctgtctaatttccttgcaattgtaggcctcttaaagaggctcagatgcatttgctcttgaatcctattgtgacttgtgaggtaggaggcgacctataatacagtttgcctctcacaagtgtgaggactaagaagtgatgacagaagacaggagtcccaggtctcacgctgagatggggaggaaacgtaatacaaccttttcatgtatttctccccctttccctccacccagtcatcgcagctctcaaatttgaatttgtccactaactttccatccttgctgccatcacccaaatccaagccttcttcaacctggatcagtcttcctgctctctctccctccagccctgaaaccagagggcttttattggaacactacagtccatcactgcaattgggaaacttctaagaaaatacaaatcagatcacatcactaaactccagactccataggagatttcagggcctctgtagcctgttcccagcctgtccctccagctccactgctcccctgcccaccaggccatctacacttcaacactgaacttgtcctttcttgagcaacacatgctttctcaccaaacttctgcaaatgctagatccctgcctccaccttatcctcacagaatgatctagattatataacctagaaaggaggtctcctttcttaagaactgagaaaaaatagtgcttgctatgagttcactgtgatttgattttttacaatacactggaactacagacccttgagtaggctcatctctgaaactatcagcagtgtaacagagcagaaagatcatccagagactgctgtctatcccagaagggcagcgagctagtctccagatgtcaaactctcccatcactgctgcttttctccaagtcaaatccacccaaacaagcactcctgaggactggctgatgcttccaggcaaaggacaatgaaagaaatgccaagtgaaaaatgatggaatcggggtactagaaaccaggcaaagcaaggaaaatggatgcaatctgctagcttttctctatcattcatatctttaatcctttatgtaaatagaaagcacgggcacgaatggcagagcatcacccaaagagcaaaggtcagggaagaatatggctacagtgcttggcaggggaaccaagctgccttactggagaagtttcctagcatttatctagaacatataaataaagagcatagggaaaaaaaaagtgctggaatgaataagatagcaaataatcacagctgcaaaaggtatatgataaaataccaaaaggatcttgctatgatttgtttgcttttgcctaataatcttagtaggtttttaaaagctgcgtttcaagactgtgcatattttgggggaatagcaacagaacaggaacgaaaatgtagtgaacacgagggaaaaaaactcttttaacattttccttaagaagaatcaacacatactgatttacctcagtcgttctactggtttcactggtatacacagatcctaatctaatttttttggttggattagacaagttagagatagaagaacatcttgaactaaaggcctttgcagcctgattacctattatctgtaatgtattttatgctccacaatgttcgtggttttttcctcccctatactttcaaaccaatggttaaaccagatgcttaagccagactattaatcaacttgtgtagaagcaaacccatttacacataggcagtaagacagctttgctatagaaacctcacaaaatgtatttctcaactaaataataagaaaatggcataaaatctcaataagccactgtcttagagaaatggcttattcaatgaattccctgtatgcctcataagtaatctgccaggtgaggaagcaacttgcttggtacatcagacacttatggaagaaaataataatttcgagctaactggcaccaatcagttaatgcgattttattgcactgcactctcccggcccacaaggctctctgcacctcccagaaaaactctcatgtgcctcaggaggacctcagggattagacattctcatgatttcatcaaattcactcagaaggtatttactgaggccctgctggactttcccctcccttcctatctcagagaggtgaaggaatacattacaccatacagttatttatattgtggtatatcattttgtaccaaacaaatgtatttttaatttctaaaacaaaagcatttgtttcttatattttcacatttacataaaataagtcaagtgatcatgacacctgaggacatctgcatcacatctgaatgattctgacgtgtcactgacatgtcatcccatgtgtcattctgggacaaagcagcagcttccccatgatgttccttaggcttggcatctctaatggcagatgagctctagagtcaactgatgtggcagcctgtgcaaaaccccactcacctcacatccacctcacctccgacatgcatgagaaaggagccgtcaggttgcttcagggagtacaaatactgaagaagcttctctctgagaaacagggaaagaggtaggagaggcaacagtcagtgcgtgtcagcaggcggggaactcctctaggtttctgtcactgctggctttcactgtacctgttaatgatgtcataggcctcctcggtgccaatgatgcacaatgcattgactgctgcatatgtgggtgcaaggtgtggatactgaccgggtcctcctccaaagccaccttctgggctctgacacagctccaggaactgacacacactaggtacacagccaaagggcaaaaacaaagtcagagagcattcatgtcaaaacaccaaattcccactagattccaggcctttccaatgatcccccactccctcaaaagttgaggggaacctctcctcccacttgttgaatataacctctccccaaagggcttaattctctctccagctatcatcatttctgtctgccctcctctgagtttcgtacttaagcgcttgttggtcatgaagcagggaacacaaggctgggaagaaaccgactttcgtagctatggggtaagagtctcccgtgcttcccacacaaacctttcccagactttccactcaacttgctgccctggacctgtggtaccagcctcctcctccttgcctttgggaacctcccagcctttgaattttgccaaaacatggtgctcaactgcttctttccacactaaccatcctagtcaggatccatcacctaggcctatcatgaacatgtaaatagaggtcttctcactcccattgccacctaagcctctgtgggccactgatttctactccaccagtaagaagcaagttttgtttttttgtttttttttttgaggcggggttgccctcggtcgcccaggctgcagtgcagtggtgtgatctcagctcattgcagcatccgtctcccaggttcaagagattcttttgcctcacccttccaagtagctgggattacaggcgtgcaccatcacgcccagccaattttttgtattttcagtacagacaaggtttcaccatgctggccaggctggtcttgaactacctgacctcaagtgatccacccgccgcagcctctgcaagtgctgggattacaggtgtgagccactgcatccggctgaaaaacacatttttaatggagcctgcttccatggctgggagaacagaagagaggcaggctgctctcatgctcaccttaattgcggtaaacataagaggagctgcactgactcgccgtgagaatgcctcccagtctgcgggttcttggagaattctccacgttaattcaaacaggctcccattccctcactgaggggagctgttttctgagggtttgcctccaagcctggcatcaggctgcccagaggttacagtcttgctttaggtgaaatcaagagagccctatcatcagtccggggtcttccgaagtgcaccagaaagggtgccccaggaaagccctggttatcaagctgtttctccacagctcagcagggtcacagccttcccgccaggagaaacctccatttacaacaagcaaactgtctttgcagtgttcatggggccttctttcctgggcgctttcacctcattatttccttgctactgctgccagaaagactacatagcctactctccaagaagacacaagtttataactgtttgccaacatcacatttaattgctttcgatttcagagttcccattatccgggcagagaaagcaaaagcaaacgctgctgccttgctctgtgagttctgaaacgtcacaggttaaaacaacacatacttctttttgcacctacaattttactgtagaaaacacaaggattgaaactgaagttgaaaacaattatgtggcactatggtttttgtttttgattttgagagagggtcttactctgtcggccaggctgcaggacagcggcataatcacggctcactgcagcctcaacctccccagactcaagctatcctcccacctcagcctcccaagtagctagaattacaggcatgagccaccacgcctggctagtttttgtattttttataaagatggggtttcgccatgttgcccaggctagtcttgaactcctgggctcaagcaatcctcccacctcggactcccaaagtgctgaggtcacaggtgtgagccatcatgcccagcatgtgacacatttttaacagcaattaatttctgtagagaacttgaatttgttccttctttccaaatcgtcatcaattcttatgacatttcccagaaacaaatagttaataagctcatgccctaacaaaggctggctgcactagcataccaaaaggtttctgtaccacaaaaagttttagctgatacaaaacttaacagcacattttttaaaagaaagaaaaagagtcacctggttatccactccctttcccagctcctaagatagaatcgtgccgaacgcaacactactgaccctaaagcctcgaattagttaggatctgaatgtaccagacacaccttgataccatccctccatgccaacctccctcagctgacatgctgcatctgactgtctggggctgtgctagagaactggaggttgggcttctcttgatctcagacacttccgtattacagaacattctgatcccaaggctttccaacttgcaccttaaggaattggcaagttgactatgaactaccagctgtcattcacagacttcttagcaattctgaagaccaaaatgttaatgatacttctacatatttaaaaaaaacaaacaaacaaaaaaaaggagccaggcatagtggcttgtgcctgtaattccagtactttgggaggccaaggcaggaggattgcttgaagccagtagttcaagaccagcctgggcaacacagtgagaccccagctctacaaaaaaatatttttttttcccacaaatgtagggggagaaaaacttatcatagagacaagaagttcaccaataaataaaaaattacaagcaaaaaacattgtacaaacaccaagtggcacattttgtgaaaaacaagtattcacaaaatcattcctttagaatatgactgaaagctgcaatacatcaattttctttaacgtcagcaaggcatttcattctagcttacgtgccaattaccagcaaagtgggaaactatcttctatatcatggatcttcaaacccaaaatgtgtgcatcagaatctgtagaaagctaataaaagaatacagagacccagtcctgctgaggtggaaaagatcctgggcctttgtatttttaccaaattctcaggtgattcagatacatgcaaagcttgagccatcactagtccttgctgcacaactaaaattacttggggggtgttttaaaaaaatcccaacacccaagccacacctaattccaattaaaccggaatcactatgggtgggacccaggtggcagtattttttttaaactccccacgtgattccaatgttcagccaggtatcagtgcttctcaaacttgagttgcatagaaattacctgtggatcttgctaaactgcagctctaattcagtagaactagatgggtctgagagtcctctttttttttttttttaggagatggagtgtccctctgtcgcccaggctggagtgcagttgagcgatctcagctcactgcaagctctgcctcctgggttcaagtgattctcctccctcagcctcccgagtagctgggactacaggtgcatgccgccacgcccagctaatttttgtattttttagtagagtcagggtttcactgtgttgcccaggctggtctcgaactcccgagctcagacaatccgcccgccttggcctcccaaagtgctaggattacaggcgtgagccaccatgcccggctgagagtcctcatttctaataagttcccaggtgatagcaatgctcctggtctggggaccacattttgagtagcaatgagatacatctgtgctgtccaataggcagccactagccacatgaggcaatttaaattctcaattaattaaaatagaaaattcagctcttcagtcacacaagacacatttcaagtactccacaactaactgtggctagtggccaatatagaacacgtatagatgtttatagacacctatagacatttacagaatatagaacattttcattatcacagaaagttctgctggacaccaccacttttatcattccatcattaaagagtatgtaaatcttgtaagagggtcaagttcaaagcagggatatcagcgattgcctctcagccttataaggagtttacttgggactcttaggtgatggctgaggactgatctaaagtgattgattctggccaggcgtggtggctcatgcctgtaatcccagcactttggctgaggtgagggggatcacttgagctcaggagttcaaggccagcctgggcaacatggcaaaaccccatctctacaagaattataaaaattaaccaggcacgttggcacccacctctagccccagctactcaggaggctgaggtgggaggatcacttgagcttggggaagtccaggttgcagtgagctgtgattgtgccactgcattccagcccagacaatagagtgagaccctgtctcaatcaattaatcaatgttgattctaaacaccgtcatcagtttggatgaaggattcaaaggcatgtacagtaaataagcatataatacaaaatgagcagcaaaacaaatcagaaaccaataagaataaaacaaatgcaacaggtacaaatagcaagaattacgcttagagatggcaggggtgggggatgggtaaggcacatgaatatgggaaatgactaggaacatagcaggaaaagaccagtaataagggtccacgagttgtgaagaacaacaataaaaatgcttgttaaaagcatcataaatgcagtattagtcagaactgtatctggctctagcctccattttccacctcaaagggaattcacatgagagttgtaaaaatgactactttttttttttttaagtatttggctgggtgtggtggctcgtgcctgtaatccctagactttgggaggccaaggcaggaggatcacttaaggccaagagtttgagaccagcttaggcaatacagcgagaccttatctctatttttaaaataatataaaaagcttaatattacagacaatcacagtgagaaagctacccagcaaaatacctcaaatatacaaaggataattacataaacattctagtaggtaaaaactgagactaatttgtagcaagaagtatttaggttacataaaaaacttcagcactagactaggctatcatagacagacttaaggcctaggataagttataaaaattatagctatgttctgcacaattgggcaggtttaaaaaaaaaaaaacagaaaaaaagattacagctttggaaataggaacagtcatccatgggcagaacggcttaggaggggatgtaaatgcaagatgcatgagctggcatcacatcaagcttgttctcgtactaactaaaacagcttcagcttgatatagtgaagaggaaatctccttccctaggtagaatatgacaatggacaggtgaagacgggcagcatctcttgttgattccgggtggcctctgctgctcacagagtcagacgtgttatttgactcttcatcaagcaccggcaagtctctggatggctgctgttctggaagaatggtcaggtcgaaagttggctactataggccgggcgcagtggctcacgcctataatcctagcactttgggaggccgacgtgggcggatcacttaaggccaggagtttgagaccagcctggccaacatggtgaaaccccatctctactaaaaatacaaaaattagccaggcatagtggcatgcgcccgtagtcccagctgcttgggaggctgaagcacgagaatcgcttgaacccggaaggtggaagttgcagtgagctgagattgcaccagtgccctccagcctgggggacacagcaagactgcctcaaaggaaaaaaaagttggctactttagagcagagtttctcaactgttgacactggggctcagtaattctttggtgcagggaccgtcctgtagaggatatttagcagcacctctgacctgcacccaccaggtgccaacagcacctggccaggaaaaatgcccaggagacaaaggcctagatatggtgtcctcactgaaaggtaaggaaacatacaaactagacttaaaaattaaaaggaaaaatatttaaggggctattccggggataagctactaacaaccttttgaaagggaaaggataaaacactgaaatagcaaaatttgaatttatctttggaaaaatcttacaagctgaaatgtcctaaaatggtttttaagttaaaggcaatttttaaatcttacagaagctaaaaacataactttaacagtgcgatggtctccctgtgaattttattttgctctgtttcactgaagctgctttcagtaacaaagaatgggattctcattagaggatgcttccttcagtgccaaaaccattaagcaaagcaaatgtacttagtctagttccaaaatattaattcattttagataaacacatataaatgtgtgcatataacctcttaaaagagggaagctaggccgggtgcggtggctcacatctgtaatcccaacactttgggaagccaagacaggtgtatcacctgaggtcaggagttcaagaccagcctggccaacatgttgaaagcctgtctttacaaaatacaaaaattagctgggcgtggtggcacacccctgtaatcctagctacttgggaagctgaggcaggagaatcacttgaacccgggaggtggaggttgcagtgagctgagatcatgccactgcactacagcctggcaacaagagcaaaactccgtctcaaaaaaaaaaaaaaaaggccgggcgcggtggctcatgcctgtaatcccagcactttgggaggctgaggcaggtggatcacctgaggtcaggagttcgagaccaacttggccaacatggtaaaacccaatctctactaaaaatacaaaaattagccgggtgtggtggctcccgcctgtatgcctgtagtcccagctactcgggaggccgaggcaggagaattgcttgaacccaggaggtggaggttgcagtgagccaagatcgtgccactgcactccagtctgggcaacagagcgagactctcaaaaaaaaaagaggcaagctgaagtcctacctatggactgggcatggtggctcacgcctataatcccagtgttttgggaggctaaggcaggaggatcaattgagcccaggagattgagaccagcccaggcaacacagcaaggcactgtctctaccaaaaataaagaaaacattccaggctatgaatacattattcttgaaacctctgataccagcagtaacaacctcgccttgctggctttggtcagcggtcatagcagctgacaaaagtattttgtccactagagggaacccagcttatcatattgttccctaaacaaatagaagcacagcagtgaacaaaataggaaagagaaacctttgtgtaagtgtagggggcgtgtgtgttacatgcaggggaaaagaaggcaggaaaataataaaactgcagagctagactttttgactctaggtcaccttaatatatttgtatgaagaaagaaaactgaacgcatttcaaagcatttcatttccctgtgcaagataaataaaaaggcaatattctatttcagctagtctaaaaaaaatcttctatttatatagaagtccttaagatttatctgtatcttactaaaaataatctatttccttatgggtcagagccagtaggctttgttcataacaagtgttttctgcacctagaagtaaccacctcctaggcacaaagcaaaatacattattgggaagtctaagaaatgtttaaaagttcactaaatcaatgcgtagaagaaccacaggtaaagcttttaaggcatctgtgaagcagaaactctcattaactgtcaagtggtttttgaaataaggacaaatcagcttatttttaaaccattccttttttaattacaaaataataaaagatcattgtagaaacttcagaaaatgcaagtaagcttaaaaaaaatgttttgtttgtttgttttttgagacaacagtctccttctgttacccaggctggagtgcagtggtgtgatctcggctcactgcaacctctgcctcccggattcaagcaattctcctgcttcagtctcccgagtagctgggattacaggtgccagccaccacatctggctattttttgtatttttagtagagacagggtttcaccatgttggccagactggtctcgaactcctgacctcaagtaatccgcctgtctcagcctctcaaagtcctgggattacagccatgagccactacatccagccagaaagttcttctttttctttttctttttttgagatggagtttcactcttgttgcccaggctggagtgcagtggtgcaatcttggctcaccgcaacctccgcctcccgggttcaagcgagtctcctgcctcagcctcctgagtaggagccgggagtgcagtaacagaaggagactcttgtctcaaaaaacaaacaaacagcctcctgagtaggattacaggcatgcgccaccacgcttggctaattttgtatttttagtagagacggggtttctccatgttggccaggctggtctcaaactcccgacctcaggtgatccacccacttcgttctcccaaagtgctgggattacaggtgtgagccaccgcgcctggcctttttttttttttttttttaagacagagtctcactctgtcctccaggctggagtagagtggcatgatcttggctcgtcgcaacgtccacctcccagattcaagcaattctcctgccttagtctcccgagtagctgggattacaggcatacaccaccaagccaggctaatttttatatttttagtagagacaagatttccccatgttggccaggctggtctcgaactcttgatctcaggtgatctgccgaccttggcctccccaagccctgggattacaggtgtgagacaccgtgcccagcccagaaagtttataaaatcacttttaaccccatcgtccagaaataactactacatgtatctttctggttctatctatgcatatcatcatctatatttttaatgtatgtaaattaaatcttttaaactattttcatttcacatctctctatataaatacatatattttaacatacaaatatacacattcatatatttattgagacagggtcttgctctgttgcccaggctggaatgcagtggtgccatcatggctcactgcagcctcaaacccctgaactcctgtctcggcctcctgagcagctagaactagaagtgtgcaccaccacgcccagctatttttatttttatttttgaaatggagtctcactatgtcgcccagactggtcttgaattcctgggccccagtggtcctctgaccgtggcctcccaaagtgctggggttacaggtgtgatcatgcgtggccacatttatacattttttaatggttatatagtatttcacagaatgtactgcaccataaatgacttatgttttattttttaaatttatgtattttatttatttatttttttgagatggagtgtcactctgttgcccggactggagtgcaaaggcgcaatctcgactcactgcaacctccgcctcctaggttcaagcgattctcctgcctcagcctcccgagtagctgggatgacaggcatgcaccaccatgcccagctaatttttgtattttagtagagatggggtttcaccatgttggccaggctggtctcaaactcctgacctcaagtgatccacccacctcaacctcccaaagtgcttgggattacaggcgtgagccaccacacccagctttacatttaaaaaaaattttttttaaacattctctactgttgatatttaatttagattgcttccaatgaaaggccctttaaaggctcctctcttcctatgtgacattgccccagaagcggcgctgacacttcctcagaaaagccttcactataaaacaccaagtacacagcctagaaaaaaactcagtcgattttggctcgagttcttccacctcaggcaccccctgtgattctctcttccagtttttcatgggtctgcggcctcctccatccagcgttcagatccaggctcacagaaatccccattttttctttcttctctcacacccaactttcccattgtgcaagagtgaagggaaaactttccaaatatcctgattgtgtaggagtgaagggaaaacttcccaaacaatccccaggcccccgagctggtatttcaaaaacacacgaggctggatgtggtggctcacacctgttatcccagcactttgggaggccgaggcaggtagatcagctgaggtcaggagttcaagaccagcctggtcaatatggtgaaagcctacctctactaaaaatacaaaaattagccaggcacggtggtgggtgcctgtaatcccagctactcaggaggctgaggcaggagaatcgcttgaacccgggaagcagaggcagcagtgagctgagactgtgccactgcaccccagcctgggtgacagagtgaaactctgtctcaaaaaaaaaaaaaaaaaaaaccacgtgggcctttctttgacaattaaattcctgttactgcagaaactgtgtccaactctccttccagtgctggaagcagccaggcttgcagtggcatcccgatgatcaaaacaatgcacttgcctctccctcagaaagcatcctacgtaccacaagggttaatggcctaattctttattatcttccccatccacattcatcacaagacaccctgcccaggaaggcaagaatgagaggttattgttaagacagaatgaatgagacaatgtgcagttctgttcctctgacctgacaatgtgactgaggcaggggctctgtgaccagagaggggccccggctaggcctctgtgtgtcccagcacagctgcctccttgtgctgtggagaaacaaacctggctcagaagtctctcatcccagatgcttcgacctcaagagcaccagaggaagctgagaaattcgagatgctgcctagagcccatgctgcctctcagtggatctcttggatccaattcctggctgccctttcttattccaggtatccctaggactggagtcatgatcagtcttttcttctttaatatataaatggtgatgagtgtctgggaatgagatgccagatcacgaatgccatctgtacaaggatcttgggaagaagctcagttgcttagatctctaatcatcgatcaggtttaggaaaactgagagtcatggcatttgtatgccacaccagtaacacatccagtcccatcaagagctacatggtcgctccaagcaccgggagcggggaggtacttctatagaggtgcgtaggaaaggcaaaggcatttttgttcactggactggcacgtgcttccccacagaagctgttcaaatgcatactgtactttctggcaaaatcttgtctctcagagttgatgattaagacttttctcaaagaccagagtcaagagccaaaagaaaaggccacagaagaaaccagaatccttctcttggaagttcaaagtcttgttctacccaccagcttacattagttttctaaagtggaggagtttcaggaagttgccggaggtcatgagaagagcaaagatttctttgtggcactgtttttttccattccaaacaaacaaaacagaaacaaaacaaaatcccaaactcaaaatacaatttcagagaacaccccagatttcccaaagacagactcactctgtagccactatctgggggatgggttcatctagcagttccaagctgtgcaggatccaatagcagagccatgggcggctggcatccagacactgggagagagacaggagagaaaacatcccttattcacaatcactccaagacactgctgccaaggctgtatctgtctcactcccagcagcctggcaagggggaggagggcacccttgctcaaacaacaatcagtgaataaaggacactttgctttgtggccttagccaggagctgaaatgaccatctgttaaaaaaaaaaaaaaaaaaaaaaaagataacaaggctgggcgcggtggttcatgcctgtaatcccagcactttgggaggccaaggtgggtggatcatttaaggtcaggagttcaagaccagcctggccaacatggcgaaaccctgtctctattaaaattacaaaaattagctgggcatagtgatgtgcgcctgtaatcccagcgacttgggaggccgaagcaggagaatcacttgaacccgggaggcagaggttgcagtgagccgagatggcaccactgcactccagcctaggcgacagagcaagactccgtctcaaaaaaaaaaaagaaagaaaagaaaaaaaagacaacaggattaaaaaaaagatgaccctgaacccagtggatccctccctggcaggcatctaaggaaggctgagcagaggacttcctacaggccaggaggttaggggctgctattttctcggtatagaaccaaggagatatacattctctgaagagatttcctagcttaactcaatcactgattcaacaaatatttgatagtatctacttgtgccaagcactgtattagacactggggggatgataataaaatttggtttctaccgtttatttttttgagacagggtctcgctctgtcacccaggctagagtgcagtggtatgatctcagctcactgcagcctcaacctcccgggctcaagcaatcctcccacctcagcctcctaagtagctgggactacgggcacacaccactatgcctggctaattttttaagtttttatagagacagcatcccactatgttgcccaggctggtcttgaactcctgggctgaagcaattcacctgcctgagcctcccaaagtgctgagattacaggcattagccaccatgcctgaactggtttctgttcttgagatgcttgggatatagaatgtgtgtggttacctgtaggggaagagagcactggacagacatataagttacctcatgtctttctggaaccaacacgtgtacatatacctggagaaatgctgtaatggacgaaaacagagttttgagggagcacgtggaagagactgactaattctgcctggggagctaggaaaggcttccaaaggcaaaatgcagacggctcttgatcctaattaaaccataaatgattattgagcattcaaggctaggcagggtaggtaggagtactgccccagttttataaattaaaatatataaatgaggtccaaagattaacctttttcagattataaaaatagcaaatgtcagaggtgagacaagaacctaggtttttagagtcaatccagtgttctttccgttggcccaagctgctctcttcaaaactatgctgatatcccaagctgtggctaacccaccacctggaaggtaggctggtgagctactgaagacactgccagggatgcagcttaagtttgaatcccagctcctcatcttactcgctatgtgcctttgagcaaatgacttaattttactatgcccatttcattatctgcaaaaaacaagagattgatctacctcatgtagttacaagatttaaataagagaatgcaactgggcgcagtagctcacgcctgtaaccccagagcctcaggaggctgaggcaggtggatcacttgaggtcaggagctcgagaccagcctggccaatatggtgaaaccctgtctctactaaaaatacaaaaattagccaggcgtgatggtgcacacctgtaatcctggccactcagaaggctgaggcaagagaatcgcttgaacctgaggcggaggttgcagtgactcacgatcatgccactgcactccagcctgggaaatacagcgagactccatctcataaattatgagagaatgcatggtaagctttcagcacactgttcaataaattgttagctgatatggtaccaactgtaacataactattgaggacttgagtcaaggattgaaaattcatagcccacaggccaaatctagcccatggatgtgtattgtttaactggtagtagctgcaacatttgtcaggagagtcacatgaaaacgtgatttccggcttcatttggaggaagaaaaaaaaaaaaggaaacaaagatgatttggcaaccctgggtctgcattcccagatggcagtaatgggcaggaaagaagttaagggcacagggtctccagttagcctcagtctccatgcagcccacttcactgatttatgctgcctgcctgggccctacaggcatttgagttggcaaatcattgccacaaataatcaaatgtggaacccaaataaaaagcagattaaaaatagagatgctgctctgtgttaagcagggcagaaagactggagacttcctgttcacattcaccctttgcctgccgctcagtcccatccaacatctgtcccctccaccgtcacccagtcctgacgttgctctgggaaatattaaagatctactcttaaacagtaatgttaaattgcaaggaccactctctatactggtcctctagtcagtatagaaattagatcttattacaagaaagggttttttgtctctttaatgaagatatgaaaagtaatgtacttactagaaggagtggtgaagttggaaaatttgtaaccatcacgatacagacttaacaggtttggacaatagtcctcaataaatgagcgagaaattagatcagcttatagggcaaagggttaagggtgaacaggtaactggcatttagccagctgtcaaggaggtctagataaagcacgtgaaccccttagtcatcatctagtaacagaagaaagccccatcctatctagggtgctccactcactctggaagagactaggttctgccctttcagggctgagtcccagctctgtgacagcaccctacctcctgccagagccacagagaacaaagagtgactctgcaacaggtcagccccaacagtcttttacgtttaaatagaaaaaggaggaggatttggtggataatttgacagcaagagttcctgggtaatgtgtttacctcataggcatctgtcagttgtcgaaggcctcttttcagataatggaagtgcttctccctctgcaaaacaagcctggaaagacaaacagtttataagcccattctaatagcttatgcttccaccatacacacgtatgtgcacgtacacacacacgggtaaacactcagcttcaggacgtccccctgcaatcactgactggataaccagcaacttctctggttccaaagagcaactaaaccagagaaaagaagctcttgtctgaatgtctctaaagcatctgaaaaccatgccagctgacatttagagtgcgattgtctcctaaaggcagtgactttgggctaacggaaaagccgcaatgagcacacgcagccaggcaatgacagtccacccagaaacttcctccagcatctaagaacagatatctttgtgcctccccatcctataagcaatttaaatctgagcctcgccacttccctgcctcagccgctgtcatttcagtcaccccgtctgggatgacttctccaaggcccataatttactccctgcctgcctctcggttatccaactattattctctccctgaaattccacctcccacgtgtgacccacagccctggccagaggaccgtgttctgcagccagtcgctgtccttggctttcaagtcagcaatactggctttaagatggaatgtgccgcccatggccacctgcacaggccgggcaaagcacagaggctgcacttctttcttggtctggcagaagagcctgtgtgactagggaaggaaacaaaaagcacagattgtcaagatgttccccgtgcttgcagattacagaaacaaaggaaagagaaccattccctttgctaggtagtcaattccacaattgtttatcaaattcccactgtacttggctcagagtaagagccttcatgcagtctttttttttttttttttttttcctgagacggagtctcgctctgtcacccaggctggagtgcagtggtgtgatttcagcttactgcaacctccacctcttgggttcaagctattctcctgcctcagccacctgagtagctgggattacaggcacgtgccaccacacccagctaatttttgtatttttagtggagacgggggtttcaccatgttgcccaggctggtcttgaactcctgacctcaggtaatcccctgccttggcctcccaaaatgctgggattacaggcgtgagccaccgcacccagcccttcatgtagtctttacctcaaaaactcttccaattcagaaatgaggtaagtatatcaatggctacaaggaaagaatgggtaggttttgcaagggaaaaacatactactgaggctcaaaagggaggggatatctcatgaagaaaggaatgatcaggaaagtttgtgtgaaaaaggaggaatgtgcgatgagtggccctggcagaaggagaaaattttaattcaattttaattcaagtttaaatagctgcaggtggctaatggctactctactatgctgcacaggtatcaagtgtacaagaggagtgacaggtgggagaatctgacctcaatacagggatgaaagaggaatgggaggaaagcaggagtactgccccagtttaaaaacaaacaaacaaacaaaaaaacaaggatctgggatgctgactaaggcatttctactcaatttactaggcaaagggaagtcctgaaggtttttgagatgaggaaagaaatgatcagaactgtgctttggagaaacagtaggtagtcagtatgtgtttacaaactgaagtatctgaaaatatcgcagtgggcagacagatggggtggggagacagggttagaagctctgaggagctgacccagttggggctacttagggcccgaactagtgtgtgacccgtgatcagctgacttttggatgtgtgggtcttaggatgctgggactgcattcaggtgatgatgtcaatcaggctgctggacacacacgtgaggctcaggagagggattcaggttacacacacagactacgaagcatttgtctgcacacaagtgacaggtgaagccacagaaggtgagagggcagagagagaagtttggaaacaaaactgtgggaagacccatctctaagggtttggaggagccagtgaaggagagaaacaggagagtttacatatgctagggaagagcaaaggaagtgtcatgtcacaggccatcagggaggagagaatttcaggaaggtgtttaacagtggcagatgctgcagcaagactgaggggaaaagacaacaaaccacagaagggctagagacctccaagagcattcagagcagaggtgaaggcaaattgtaaacaagagaaggccagactcagtttctctttcaggaaagtccactcaggacgcagggagcacccatctgtgtgggcagagtgttgtccagcactggggtagaggctgctctgtaccctagagcgacagtccagaggtggacacacatgtgaaaatgacaagcagagccctgtccaataaacgctgtgatcagccacgggaagagatggagggtcagaaaactcttcccaaagggaagagcattgagtttaaggctggaaagacatgagttaagcaggcaaaatgaagaaaacaccatgacacatttgagttagtttagttcagctggatcaaaagtacaaggcagtaagcagagaaattccacattagaaatgcaaaagctcagaggaaatccatagggaaggtctgtaaagaggatggaggagggctgggatgagggtatagtaggagaggtgagcctggaataaggaaggatgctgcattctttgagcgagaaatgatgggtacgaagctagcgaaatataggtctctgatgtgggaagaaggaaacaggaaagtcaggtgggtcagcctcgattttctcaggaactaggagtcaagatggtgggagagctgtggagtggccacggtggtgggtgtgttagggaatctacatgagacgaataaaaggattataaggcagttagtgaagcgccagtgaaattaagaaatataacatgttggtgaagccagtcagcagcctcaggagaaaccaagcctgctgacaccttggtcttagacttctggcctccagaaatgtgaaaaaataaatctctgtggtttaatgcaccccatctgtgataccgtcttatggcagcccaagctgactaataccctcaccggtccttcattctcaactcacctctatccaaaaatcttttctgtgtaggaagttaagaaagaaaaggtagagctcttcctatttttacctgaacaattcagccccaaaaccattcaattacatggagcagaataagacaggtttcgtgcaggacttgagggggtgcagggtgggatgcaggctgtcagctcaagtggatgaggagggcccccgtctcactgtgcagagggtgacaggagagcaagtgggtaaatctattaaggctatgggaagtcaggtttccactgtctgagaaggaacttacacatctatgtgtactgggtaatgatttaaatagaatttcttatgaggggtgagcccactgggcttccagactcttcacaatgtgcctccacccacactactctccaacctcatctccgcccctgagctctggtcatgctgccttctttgagctccgctcctttcagtctcctggctttagcacatgctgttccctctgcctggaacactctccccatcctttaagttagccacccctattccacctacagattcagcttaaatgtcactttctgtaagaagccttccctaacttcccaatccaaattagattctcccagtgattctctctctcaaattatcccatcggtaactgtatatttgtgttcatttgtttaatgtccacctcccccactagaccaagagcccagcaggggcaggcccagggctagccttgctcactctggcttccctgagcccagcagagtgtcctgtcctttggagactctctagatactgctgctgaaagagaggatcacacaaaggcagcagaatggaatgagagcaaagccacttcctccccccaaacctgggccatcctggaaaacatgcatttgattgtgacagatgagaggacaggggattcagtccattgctggttcctggggactttctaaactcactaaagccaggggcctctctagtcaaaaaataagcacctggcatgtaagcaataaagcaatcgaggaaaggtgaacttatttgtgagaccttggaaagaacaacagtaagaagggaatacatcctctacctgctcaggatctgggaaattctaaaattgtatcacatacaggaatagtagaaaacacgggagctaagctggtgcctgtgagagacctgctttgaggactttaactcagagtattctggcttcagagccattgtcagcacttaacctccagggctctattagcacagggacattatcaatatttctcacttctgaggagcacccgtctccttgcccaggagaaaacaaatttaaaaactacatgtgagcgaggtatctgtgtagtttatgcatttcaggtttcttattaaagccaaggtgataaatgcaaaagggtacattcaaaagggtgtgaaaccgtgacaatacccacagggaagaaaaaatgaattttcatgggaaagcagacatgaataaacaaaaccatgaaaagcatggtcaaaaagctccttgggactgactacctcactccaggtagacagtcccaaccttagagaagaaaatcatttctgggaaggggattaagtatagaatgtactgacattcagctccaggcttgactttcagcccagtctgctattcagctttggccctggaacactgaataggcaaatgcctacttcagcatcatcacaggcatccctggacctgtgcgtggtctgtggtcctgggcatgtgtgtgagtctgtcccatttgatcagcatcatgacctcagacacacaaacaagccctgccatctagatttactgctaacagctaaccatgcacttcagctaacagtgaaggttacttcctgtattaaagtgtcagacttttaaattttgactattaatatgttaaatattgagactgtgataatgatttaaaattctgataaattttctaatttattcttatatcctcgcttattctatgatggtgatgtttgccttcagccttatattgatatgttgaattatatactcagccattcagccaaaatgtatagtatctccaatattaattagcatcctttaaaacactcaatttcataggcaacaatgataaaaacgggtaattgtgaaattcctgaaactaacccagagccctgatatattctatttccacaaggatccgagcccaggaggaacactttttttttcccacccatacttgacctaccagctatgaatcaggggatttcactcctttaatatcatctaccaccactctcaaaaaacaactgcttcctcccagactataacctcccattttccctcatatctcagtgtgaataaaagtctttcttcagctcatgagctaaggaaaaacaaattttaaaaaaggaatgaaagagaccaagggctctatcctgatggtaagtgaaaagggaatgtcaaataatcaaaggttcatgtgagaaacagaggctgtgtgtccccagagcccaggcagtggacagtgactcagcccgatcgggtgagtcatcgggggtacaaccacaacaacaaagcccctccaaaagcaatcacccacaccctcaccattatgaagtcttgtcccctctggggaggctaagcttgaaccagcttgtgcctaggggcagcgaactgccaaggataccattacatttaagagagctcgttctcccaagctatttaaataaatggcgtcatttgctaatctctagctgtatctcatgacaagaggaataattcattttattgaggtcagagcattgggttaatgcagagatttggtttagcagttaagggaaagactatactagtaagctgatatttttcctcctttccttccccag

SEQ ID NO: 735264 - DNA, 70618 bp, Homo sapiens
cggcgaggtcggtcattctgcctgtccggtagcaccacgaaacacctgccactgacacctccccaccagcccccgagggttcgcgcaggcatcccgagccgcgccccctggtccgccgcagccagattccctcccgggcgggttacgcccctaggcgcaaaacggaaccactccgtatgaagaagacaaagtataaccagtcacaccaaagagaggcagcattatttagacagccggctactcccccagagactccacccagtcccctgggcccggcgtccagcgcgcagacggtgcccggctccaggagttccagctccctccacgtgtcctgtcttcccagcagcctcctctgccgcctcgggaggaaaatctcctgacaactcgcggtctgcggactacgactcccaggaggcgccgcgccgcggctctccccgcccccccccgcccccccccccctccccgggacgcgcaggcgccttgggctccgtcaacaagccgggctggcgtcgcctggatgcggtttcttccgggatttgtagtttttctggagctacccgggccgtctgttagagggacaagaactacaagtctcggctgccccagcgctgcgagcctggtcacgtggcgggggccgaccgggcgtgcgtgccgccgttgatccggtgctgcagtgaggagcgtggttcttgcccgtgttgtgtgtgtgtgtgagtgagagagcgagtgagtgagtgagtgagtgtgtgtgtgggggggactcggcttgttgttgtcggtgacttccccctccccttcaccccttcccctccccgccgccgctgcagtggccgctccctgggccgtaggaaatgagcgataacgatgacatcgaggtggagagcgacgaagagcaaccgaggtttcaatctgcggctgacaaacgggctcatcataatgcactggaacgaaaacgtagggaccacatcaaagacagctttcacagtttgcgggactcagtcccatcactccaaggagagaaggcatcccgggcccaaatcctagacaaagccacagaatatatccagtatatgcgaaggaaaaaccacacacaccagcaagatattgacgacctcaagcggcagaatgctcttctggagcagcaagtccgtgcactggagaaggcgaggtcaatggccatttggggttgggacagggagggtgttttgggtggcatagaggttttgtattgagggccagtgatgatgttttgatatttatttcctgctacttaaatttgaatctgagtgaattgtacctatttctgatgatgtcggtcttgcaaagcgacagattcataaagtaatgatgaaatctttctttcttcccgtgtgtatttctaagaaatagagccaactgattttgtatgtaaataccaagagcaatttacctggtactaaacccgcaccccagtgcggacccttcccagccctcatcccacttcctttcctactgtcctggaacctgtctccattgtgtgatccagccctggttctggctgtggtcagcagatcccagtgaagggttttgtgtgtttaggcctcatttctttgtctttttcctactccgttcctggcatttgctgatttctagtgtatactctgtagtctcagttcgtgtttgattccattccatggaaataaaaagtatgttgtacatactgccgaagaattgtcttgcaagttaaggcttccccctttactataagactataaataaaaacttattttatcctttcttggtggtggtgtcttcttacccttgttaaggccaaggtggttgatgagagacccctctggaagctgttagggcctcaatgtaagtctgagtgagaagtggaggtggcttacccggtcttgcagaaccaggagcagccataagccagagttgcttcccctttctcagctcagcctgagagagtaaatgggtggtgatggctttgttcattggatgaggcttttgaggttcaacagggatgtagccttagctgtggcaacatttctagatctagtttctgctaagcaagtgacctttgggggaattggtagcccagagctgtggttcaggttctcctggtaatgagtgcccagttcagaggtggctgttctccaggacctttcagtttctagatagttccagtttattaagaggaggcagcagagctgccaaggactggaagtcaagaaggctccaactgcaccgagttagctctactcagactgggacccaacaccagcctgaacttgtttgaccttggaagaaaaaggaattatggccagaacgcagctcagtgttggttttcctgtctggctgacaggaaatactgctgttcctagacccagagaggaagtcaagtcaaatcagttcttggatttgtcaccatctttagagtggtggagagcactgtggctcctatcaattgtatgtcaaatccgtaatatctttttttgtttaatgggagctggggcagatgggtcttgtcaatttgaaacatgatcaagcctccaaaggccatgattacattaaggaaaagaaaaatgctgggaaagcaagatcccatttataaaggcacttcttttcaagatagaggaaagaaactgcagtaaggaagaaatggaaatgagaatcagcttattgcctaaagccctcaaggttaacatgctttcctctttttcattgcccttaactatatctctttgtatatctgggcttaagtatacagttggtttgcttagtattggtgttagaagtgagctgtgggtgaagccatgttgatgcagagatggaaggcatgtgaagctggcacccagtagggagatagcaaacaggaaggggcagtcaagccagcatgaggacaggtggtgtccctgagagccagtccctggctccagtgtattggctggacaaaggattgagtttaggcttctctagatttcagtaaaccagttcagacaaggggcacagtggctaggtggctggttcacctaggaaaatccaaaccacctgattgacatggtgagcggactttggcacagggtggaggtaccactggaagcagcttcctgggcaggaacacagggcaggggagctccgcctggaaactgctcagctgaaaaggccaagtcaaagtcacagccaagcaagccccttctggtatgtgtgtctaggaagcgagtgtgagtattccctcaggataccaaagtcggaccatagcttactctctcacagtaatggtaatctctggtttattttttatattactctggacactcacttacacaaaaccagataagctgtagatttgcttggtcactgtggcaggtggcttcactgaggagtctgttaagcgtgctatttccctacctttacagttgccccaagtgcaagggtatttaaaatggcccagtttttaaagttcttgatacgctaaccccattgtaaaacatcaacaacttcttaggtaaagaatctaagctcacagagctgtcatcttagctgagacaggtttaaaaaacaagactgagtagacaataggagccagagccctgaactgggactgaagtaagcagaattctgtttctgatagtatcatgtgtgttttatgcttggcctctgaaagcagactggctgggttcacagtcctgtctctgccactcggtggctgtgttacttctcccagcctcagcatctttatctataaaatgaggataataatagcactagcctcatgagatggttatgaggcttaaatgagataatgcttataatgtgcttgacctcaggaccaagcaagcactgaggtgcctctgctgtcattatctacacaaagcatgtaaccagggctgactcagcaaggtggaaaaagccagctcccagacacctttcctaaagtgagtaagggttgacttcttggtatatcacaaatgcttcccactcctcagagatgtgccccatccttaccaggcacagtgactaaagagagcaaggtgacaccaggactggactgacaaactcttcgagactaaagcagcccctgtgggtacattaattagatctggtgtcaactcgagtgaggctctgcccattccctcccaccacgattcagtggcatctctcaggtttggacacttttggaggcccaggcagaactgctcagaagccccatgtggtgttactcaaagtgggatccttggatcatgcccagggctgcttgttaaaaggattcctgggctctaacccctctaatctaaagtgtgccgtggctcaccagtcagtttaacaagctctttcaggtggtcctcaagtcactcaggtttgactcccaacagtaatataacccggggaaccaaaaggacgctgttggggaagttaggcacagctgagctgaattagcgaagtggttctgaggtcaggatgaaggtgggggaggcgggcttgttaaatagttcaacccttagagctgccttgatgagtctacgtgctcccagcatgcctccaatgctctagggggctggctgagctacccagtttttaaacttgagaaggaagaaagctgagggctgcctacactagcccctttagaagccccaagcaggggtaatgacatggggcagcactcatttctgtagcatgcctaggctggcctctggtccccaggcaggttttataatccagccagagcaagggtctctctcaggcctggtcaccaggatgcattctcaaaagcctctgggaacatgaaactagagcattcctttcttcaaaactgtttctctagcctgaagaggaaacccaggtaggaaaaaagagtttgtcaatgtctacactgctagatagcgaatagagaatttccttcagtgtctagggtttactagggcagcggctaactcatacatccccaaagttcccttgggaagggaataaaaaatagtttctagttaacttcctcagggagaaaaccaatttggctaagccaggcttaactataggtaggactgggtgactgcaccaggcaggcctgtgcatgggttttggaggctctcctggcaaacccttatcaccctgctggtaagtgttgtccttgcttggtgtttcattggggtcggtgttgggaaggagcccagggagcttcagaatgactgccagagcgggtagggctaggggctctgagcccgcctgtctggactgccatgccagctacaacccttacctttggggtgacattgctctggcttcctgtgccattatgtgaggacaataatagcaccaagtgccattgtgaggcttaaaggagtgtgagaagcccatgaattgttcctggcatttaatactcaataaatactgtcaaatcttagatgtgtctgccatcagatgtcctgggtagtgcagccattttttagttttgttaaaatgtggaatgaagctgggcgcagaggctcacacctgtaatatcagcactttgggaagccaaggtgggcggatcacttgaggtcaggagtttgagaccagcctggtcaatgtggtgaaaccccgtctctactaaaaatacaaaaaaattagccgagcatagtgttgcatgcctgtggtcccagctactcgggagactgaggcaggagaatcgcttgaacccaggaggcagaggttgcagtgagccaagatcacgccactgcactccagcctgggtgacacagcaagactccttctcagaaaaaaaaaaatgtggagtgaataaactctccttttcgctgatgtaataagagtttagtatattaaaatccttgaaaggggaggtaaatgtatgttgaatgctaaaaggcagtaaaaatttgcatgttttctgaaagaacttgagcaagaccacaaatctgttaccttttggagaaaaaaaaggagttgaggaatgaaatatacccttgcaggctggctcagagccattaaccattaacatactggcgactttgccctgttcttcattccagtttcagtttgcatttctgcagtgccgggtggcaggcactgtgccaggtgcagatactgcaagtgcatctggtgtctgccccgtgtttcttgcccagggctggttatgacagtggtcagccatcgtttttcagccttccccttcagggaccccttgagcagaatctgcctggtgggtgaggtggagcagatgagcctcatgactgggccgaggggcccgcatgctctagctcactctggatcccatgtgcacgctcgcacacacaacacacccagcaggatgggcgtgtctagaagaatgccgagcaggtggccttggacaattcacaaccagccgagcaggtcccctcctgcgccctgtgctagatgccagctgccccagcaggcctgttgtgactgccaggccccatttaggattgttttcctttgctgtcctttgcagggtggggctcttgtatacccacagcctgctctgggcaaaattatgtagcacggtctctgctattaattttttccagtaaattaaaggctagagaagaagaagaagaaaaatcaaggatccaatattaagaaatctgagcccaaaccttctactccagtgctgaacatggtgaaggattaagcctcctatcaagaaaaacaagcctgacagcctgtagactgatagagggaggtgtgccttctctccagaaagcctacttctgcaggaacccaggagtatggaatgagccatgcaaagtctgattcaaaaaataacccaatgggcatgcacccccagtcactcatccggaatccggctggcagcctggcagcccggcagcccatggctcccatgcacagtgcttgagagcttcattgtttcctgtctgctggtgccatcaacagctctggggtggcaggggcagatcttgggctaaaggacagtggccaacagctttgggccaaaaggccacaacaagaccagccagctaagaggaggaatgtcatgtccacagcgaatacctactgcagcaaggctgtaggagactttggagaggaaggaccctgtttccaacaacttgaccatgtttcccatccagggacctctgtgcagagagtggtggtgagcaagtatttccaactgggagcccccacagagtcagtggctggtctgtgcacttgttactggactcctagcactgtgcttggcttgtggtgggtactctacaaatgctgcatgcatatgtgcgtgtgccagtggactccagccttgtgatgtaccttcatctctgtgcccttgatagggcggttccagggttgcctctgcgtgagttcaaccctcgggtatttgagcagcacgtagcctcagcccagcattgtgctggctactggggcaatctaggcagcttataaaggctgggccttgccttgaagaagcttagagatgaggttaggcatttagcacaaatgcacgtctgggctctgaatgccagaggagttcaggagatgggccctcagtgagagcggtttggcactatgggaggggcagggccaccaggtcatcgcttctcaagctcttgatgggctctccttctgtcctgcccacaagagcccagccttgggctccccatctagctgtccagacaggctgggggtggggggctgttggtgaagggagggtgggccagagccatctgctctgcacaggttgggtcacgattctattccaccactttcactggtcccttggtatccaggcacatggcagccactgctccagagagtgaggagaggggctggggggatggagcctcgcaaggagcatggacacctagcacttacgtcatcaccatcggcatctgccttacctggctacctctctgttcagcacacctgggagcagcacccttgcagcccttctcccttgacagagctgtgacattgaaccctgccctggtctggtagctgagggcccagcctccccttgcctcctttgtcccatcagcccaggccatcatgggtacagaaggtagcaatgaagtctcacactcggggtaaccaacatgcaatacttatggaaagactgtgtgatcaagggttgagagaatagtatactgaacccaaatgtacccattacatagtgtgaacaattatcaacatgcagtactcgttgaaagaaaagggatgataaaaatgcactattattgaaagtaagaaagtgtggggtctgttaaacagacaaaggagcccactgagaaagctcccaaaggccaaaactgcaacaatttgagcaacaaaataaataatgtagcattggaacataatatgaagtataaaataaacgagtccatagtgaaagaaatggttgaataaattgagaataaacatctcccatgtagaattccgggtagtttatgcaggtgctctgccttcaaacatatggagcataactccccacttctgtttgttgttttgagacagagtctcacgctgtcgcccaggttggagtgcagtggcacaatctcagctcactgcaacctctgcctcccaggttcaagcgattctcctgcctcagcttctcgagtagctgagattacaggtgtatgccaccacaccaggctaatttttgtgtttttagttgctatggggtttcatcatgttggccaggctggtctcgaactcctgacctcaagtgatccacctgcctcagcctgccaaagtgctgggattacaggcgtgagccacctccccacttcttaagcgtggactgcatatagtagctaccttctaaaggacacattcaagaaagggacaaaaagtaaccttatggaggaacctgacaaactacctcagccaggcgatgaagggtaacatcagcataaacatgatgaagcaggttgatagtatgtatccttgatgtgtgatgagaatggtactttacctctgtggccttcctccaaaaaactgttacgcatggtctgggcacggtggctcatgcctgtaatcatagcactttgggaggccaagggaggatgattgcttaagtctagcagttcaagaccagcctgggcaacatagcaagagcctgcctctaccaaaaaaaaaaaaaaaaaaatgtaattagctgcacatggtggtgtgtgcctgtggtcccacctactcaggaagctgaccaggaggattgcttgagcccaggaggttgaggctgcagtgagccatgatccactgtactctagcctgggcgacagagcaagacactgtctcttggaaaaaaaaaaaaaaacataaacccatctagtcataaggataacatcaaacaaatcccacctgagggatgttctacaaaatacctggccatacttttcaaaactgtcaaagtcatcaaaaacaaggaaagaatgagaaaccgtcaaaaccaagaggagtctaaggagacatgagacatgacagctcagtgtaatgtagtgtcctgggtgggatcttgggacagaaaaaggccattaggtaaaaactaggggaattcaaataaggtatggactttctttagtaatgtatcaaaattggttcattcattatggcaaatgccacctattagtggaagatgttaatagggaaaactgactaatgggtctgtgggaactctgtgtactatctttgcaatttttctgtcaatctcaaactattccaaaatgtttattttttaaaatgctttttttttttttttaagacagggtcttgctgtgtcatccaggctggagtacagtggcataatcatggcttactgcagcctttacttctcaggctcaagtgaccccccatcttagcctcccaagtagctgtgagcacaggtgtgtgccaccgcatccgactaatttttttttttttttttaatttttgtagagacagagtgtggctatgtcgctcaggctggtctcaaactcctgagttcaagtgatcttccagccttggcctcccaaagtgttgggattacagtcatgagccatcacacccgaactaaaaaatacattgtttttttttttttttttgagatggaatttcactcttgttgccaaggctggagtgcaagggtgcaatctcagctcaccacaacctctgcctcctgggttcaagcgattctcctacctaagcctctaagcctcccgagtagctaggattacaggtatgcaccaccatgcgcggctaattttgtatttttagtagagacggggtttctccatgttggtcaggctggtcatgaactcccaaccttaggtgatctgcctgtcttggcctcccaaagtgttgggattacaggcgtgagccaccacacccggccatgcatttttcttattgttattttgtaagcgctgtatttcctcagggggagcagagggcaagggaaagtttccattaagctgggctaatgatgagcgccctgtccctgccctgcctggttttgttcttggatgtgccagagaagcgggagggaggaacgtgaggccacctggccccagttccccagctggtggaaaacagaggcaaggagggttactgcaggaaagtgtgaggatgtgcaggaacctgttagatgtgcctgggccaggttggagaaagctggctgctgtcaggtcagctcctgggaagacggactcatcacggcctcactgagccacacggcatcacactgcactggtgtggccacacacttggtggcaagtggagacctcattagaagggtgaggggcctgccctatttgctgtcaccatccctgacctagtgacagatggcagctggtattcagggcctcagccatccagcctagaggtaaaccaagcatgtttcaccagtgccccctattccccgagacctctcaccttccttcagaggcctgcggtggtggaagggcatgggctttggaggcagcagatacgggctcgggctcaggcaccaccacttgacagctgggaaaccttgggtgatttacgtaagctctccaacctgtttctccagttgtaaaaggcaggtaatacgcctgcttcacccaccttacaaggtgagtcaaggatcaaatgagaggcggtagaacaggagggactgtcttaggggttattgtttgggcagatgaggcaagagtggtcagcactttttaagcagcaggtaaagccttggtcttggggctaattggtggtagagttttgtatatagtcacgccacatcatgttttggttaacaacagaatgcatgtacgacagtggtcccgtgagatcataatactgtatttttactgtaccttttccatgtttagattcacaaatacttaccactgtgttccagttgcctacagtatccagtacggtgacaagctgcacaggtttgtagcctaggagcaacaggctaccccatctagcctaggtgtgcggtagggtaggccatctaggtctgtgtaagtgcactccatgatgttcacacaacgacgagatcacctgactgcttttctcagggtgtatcctcgtcattaagtgacatgactgtattaggttgctttcagttgcaggtaatagtaagtccaactcacattgtctcatataactgaaaatccagaggccacgtgggcctcgggagccatgtgatcagggccatgtttctcagtctcagagcatatgtgtgtgctggcttctcacgctggtttccttctaggtagaaaaatggttataggaggcccaggccacacattctaccatcccctaataggaaagagctgcttttccccgtcatacagtgtccacgacgtctctctctttagactattttaggtcacatgcttgtgctctgaattgatcactggggcaaggacaaatcatgctgactgacttaagcctgagttactcccaacctgaacaaattactggggcaaagagagataaatgaaaattattggcttagccagtcagggcctgggcctggaggtaggagggcatcaagccctggcaaaccttttggctgccacaggtggggaggagtggcatggatgccaacagtgtccctacaggcttctatcccagtaatcactgtttgagagcaatggccatttgcctctctagcatccatttacccctttggcaacaatcctaatttgcatttggagctttgttccttccccgttcccaaaaactacgtgcttctaatgaagcctcatttccctctcaagggagaggcatgtgaccaagactttggccaattggtgcactgtattctccaagccattggactgcttcttggaaaggcacttggtttgattaaagccagtgaaacacaatgatactcgctggaaggaaggctggggtggaaccaagtgtgcctgtctgctgaacctgaccccaacaggatgtagggtctggagctattggtgctgccattttacaaccccatggagagcctgagattgaggctaatgtagaaagatggagggagggtgaggaacctaataggaccagcctaattcctggactctgcagtttgagtcaacagattgcctcttttgcttcaaaagccagtttgggtcaagttttctaccagttgcaatggtgtcttaaatcatattatactttccttcctattcaaaggcagtaaatgccaccaagcagtgcatgtgggcaactagaatgcttggtccaatccttactatttgtcacttgacactaatattacatgaaaagcatcccagtcatgaaaggtatggaagaatgctcaataataccaagaagggagagcagtgtggaactattgtttactggtattattatctcaggggtgtttcccctgattatccatgaggttctctttatgctccgctccctgtagggtctggcaggcttcccaacttatctggtgttcaaggtgggcctaagggtgaaactggagcccacctggatacagagatctgtattagttttgtgtttattgatgggagaaagtatttggggtcatccaccttgaatgctacataaatgtcttctactcaaggagtcacataataaatctctccaaaggtgcggtggctcacacccgtaatctcagcactttgggaggctgaggcaggaagattgcttgagcccaggagctcgagaccagcttgggcaacgtggtgaaaccccatttctataaaaaatacaaaaattagctagctgtggtggtgtgcacctgtggtcctagctacttgggaggctaaggcaggaagatcttctgagcccaggaggtcgaggctgcagtgagccatgattgtgccactgcactccagcctgggtgcatttgagcaagatcctatctcaaatgagtgaatagacaaatctctaggactcaccttgagggctgtcaggaaaccctctggaaaaggatgtctcatggatatgccagtgtaaactctcctgaaataaccctttctcttctctacccagactaactttacctaccctttggggcccaactcagatccctccttcttggtaaaaagccagttcagactgaagcaatcccttctattaaccacattaattattactgcaattaatctcacaataccttgaggctccgagtgctgagaggattttgccttttgttatagtgatggaaaggatgcatttcaatatgttgccttgcagtgcaaacctttgttaacagggcaaaaatagcacagggggcaggaattacattcctggatgtgcatttggcttatttacatggatttgggtgccctctaaggacaccatcttctctcccctccaagagggtcaggccacaggacatccatgttcttggcctcccatgggagagggtctctcgccagaggaagggaaagccaagtggccacagagttccagcctgtccctgtgacagcccctgcctctggccagacatccacccacccttgctaagtcagcctgctctggggctactaggcccagtccttgctgtctgtcggagacagaccatgaagtgcagtgtgtggagggctgggacatagcataccgaattaccccagggagcttggaaaacatctcttcccactctctgttaggcccacggcttcctctactggaggagacggcatgtgaggatggaactcggtcattcctctgtcaccaccgatgtgaacagtctggaatcctgcacacaggagactgacgatccctgagcaacctttagtagctcctaccattgggcattttcttggtacagatcacaaataagagacatcatagaaaatgttattcttttattatttcaaggaggtaatacatagcccaatatggcaaagcaaaagggaattagaggcagcaaatggccaggtttttctaagcgcctcatgctgcatctctgagctcctgtctgcccgcagcccacagctgcttacatgaaggccaggtcagtagacagatggcccaacttgatactccactgactgagaaagggctcaatgtgcagcacagcagaggcactgccaggacccagcacgctgggcggcaccccacgctgccaccaccagctacagaggctagtgccttagtagcagccagtgtgtctagcacttgattttattcctgtgagcctagagtgggcaggacgtgaataaatcctgagtcataagttaaggtgaaagacttagtagtgttaatactcttggtgagaaaagacaacacagtcttggaggagagtgggcttggagtctggtggaagaaagatagaaacccccagaagggcctcggcctgcaggcactgccttgaggccatcagagggggttttcacggtacatgatagggaggagtgaggcaggtgggcactggagggctgtttcctctggcacagttgaactagagggtcactttccactcataattggtttcctaggtctaagtcaccacacctggggctgaagcaagtcttgcctgtgcaccaagcgtggccttggaccctggagagatgcaaggctcagttctccagtgttgaagtggaaggactcccaactgaaggagatctttctctccccacctccagctcttttcccttacaaatgaccagggtgcaagtcgagaggcagaggcacctcctggtgcaactccaccacagtcttacagagaactcatcttggtgggacccaaagcccagccttggcatgaagcagacttattccacccatcggagggcacccagtctggtgactgaatggtggcgtgcaagtgggagtcagcagtggctctggatgccgtaatactcagatgccattcatctctgtgtgatcgtcctggctggagagctggtgaggagggactgcttcctcctggcatgcactgttcaccaaccacaccacgtgggctgatagatttttggtttgacaggtgtggaaagaatttttaaaaccagccactgtgttctccaaacccagagccattggttttgtttgacaagaaagtaccaagagaaccacagctccactgaggctaaggcttgtgtagcacagaatgcagtatgtattgaaacgtataaaccttgtctgactggggagatgggtgagcaaagagctgccgggacccaggtcctctagtcggttgcaggctctgccgatgtctcatccttaagctcctcaaaacctgggactggcttctgtagaaagtatgtagtggcctggatcaccttgtctggtccaatgttgtacactgggtgagtgggctgctgcaaagagaagaaaaggtgccagttaatcaccccggtggtccttgaaaacataacacatcctttgctccatgaaaggcacttctaagaatttagtataaggaatcagagatacacacaaagcccaaaggttcaaaaatggtgtatttgctaaaactatctagtacatgggacacaggttaatatacagccattataaacacgcatttaaatatttaacgatacaggcaaatacttacaacatattatgtgagaaaacagtatgtacaatactatctcaaactgtttttttttttttttttttttttttgagagagtcttgctctgttgcccaggctggagtgcattgacacgatcttagctcactgcaacctctgcctcctgtgttcaagcaattctcctgcctcagcctcctgagtagctgggattacaggtgtgagccaccacgcctgggtaatttttgtattttttttttttttttttgagacggagtctctcgctctgtcgcccaggctggagtgcagtggcgggatctcggctcactgcaagctccgcctcccgggttcacgccattctcctgcctcagcctcccaagtagctgggactacaggcgcccgccactacgcccggctaattttttgtatttttagtagagacggggtttcaccgttttagccgggatggtctcgatctcctgacctcgtgatccgcccgcctcggcctcccaaagtgctgggattatttttgtatttttagtagagacagggtttcaccatgttggtccggctggtctcgaactcctgacctcaggtgatccacccgcctcggcctcccaaagtgctggggttacaggtgtgagccaccacacctggtctcaaactttttaaaaagtgtatttgtacctgtgatgtatataaatagcaaaaattgtacccataccaaaatattaatagtgatatgattgtttttcattttcttttttatattttatgtatcccaattattaaaacaataaacatgtatttacatttataatcaagaaaaagggggccggacgcggtggctcatgcctgtaatcccagcattttgggaggccgaggtggatggatcacccgaggtcaggagttcaagaccagcctggccaagatggtgaaaccccgtctctacaaaaatacaaaaattagccgagcatgatggtgagtgtctgtaatcccagctagttgggaggctgaagcaggagaattgcttgaacccgggaggcggaggttgcagtgagccaagattgtgccactgcactctaacctgggcaacagcgagactctgtctcaaaaaaaaaaaaaaaagaaaaaaggaccacaaccctaatatgtagtaaggctgtcagatcatatttaaatatataaacaaaatttaaatatgaaatttaaattaaatagatgttattctagtacatcacagaaacccaaaagaaactttagatttgacacggcataatcctaggccaatattcaggattctcccactgtgggataatgaagaaggggacacaactgcaggagagattttaaaaattttgagagaatactaggagcaacctcatgctgaaacatacaaaaattcagataaaacaataatttttaaaaaccaggaaaactgccaaaattgacttaaggaatttttaaaggcctacatgaagaaattagtaacaacaattgcttattctgccacccccacataccttaaaagatactagacctagatggtttctcaggcaagtagtatcaaacctacaaagaaacagataatctctgatctatacaaaccttttaaggactgaaaaaaaaaaaggggctagtgcgggggccaggtacaatggctcacacctataatcccagcactttgggtggctgaggtaggatagcttgaggccaagagttcaagaccagactaggcaacatagcaaaaccctgtctctacaaaaaatttaaaaattagcaggttctggtggtgtgcacctgtagtccctgctacttgggaggctaaggcaggaggatagcttgagcccaggagttccaggctgcagtgagctatgatcacagcactgtactccagcatgagtgacagagtgagatcatgtctctgaaaaagaaaagaaaaagaaaaaaggtaagaggtgcaggaagctacccatttaattttatgaggctatgatattatcctgaaacactggaaaaggacaatacaataaaattttagatcaatctttcttatgaatgtacatgcaaaaaaatcctaaataaaagtactaggcaaacatactggcaaactgaatccagcagtatactgaacaaaacacacagacacagacacactgcctctactatgaccaagaagggcttatcctgggaatataaggcttaacatcagaatattaatgaaacatatcatattaaagaagaaaaatcagatgcggagaaagcattcaataaaatttaacactaccttatgactgaaactaacaaaaacaacctagcaaatcaggaataaaagtgaatatcactaacttgatataatgtaactatcacaaccttacagtaaacatcatgcttaatgatcaggttataaaaagccttcccattataatcaggagcaagagacgaatgccctctactacctttagtcagcactatgtggggatcttacccaacaatacaaggcaagaaaaataaaatggaaactaacttagacaaacttaaaactattaaagagttcaacaaggtggctggacacaagatttataaatattattagcatttctatacactagtaacaaacagttacaaaactgaaaataagaaaagattccagtcacaagagacatgaaaactgtaaattagacataactctaaccgaaaaaaaaaaaatgctagtcctttatggaaaaaattataaaaaaaacactgaaagacattaaagaaaagaaaaattatgttcataaatggaagcctaaatattgaaaagaagtcagttctctttgtactcctgggaagacaggaagaaaaaaaaaaaagttggttctctcctattaatctaaaatgtagtgcaattccaataaaaatcccattagaacttgacaggctgatcctacaattcacaggaaaaagcaaaaggcaaagaatagccaaggcaattttgaagaaaaacaacaaggcagacaggacttgcctacctgttttcagacttgcttaaaagagtgcagataggcaaacagaccaaaggaacaaaataagagagtccagaaacagggccccttcatgtatggaaacttgagggtgtggtacacatgagatacacatcagcaggaaaggttgtagacttcagtaaatggtgctggtcaattggttatccatatggaaaaaagataacattatatccaagcctcaccatacacagaaaccaaatccaagagaattaaaaatctagattaaaaaagcaagctttagactatttagaagaagttacacttaatgacttgctgcattgccttgttcattcccttcatagcacgcatcacaatttgtgatgtatttgtttaatgtgtgcctccttttgtctgcttccctcaaaaaatggtagagattccttaagttaatcctcacctaccctcccccaaaaacaaacccctgaatgacagaaaagacaaatagatttgaccacttcaaaattaaaatattaaaatatttttgtggggaaggggtgctgggggcagggtctcactctatctcccagactggagcaaacagagctcactgcagccttgactacctgggctcaagcgattctcccacctcagcctcccaaagtgctaggtttacaggtgcgaaccaccatatctggcctaaaatcttctatttaacaaaaaaacaccaaaaacaaaatgctatggtttggatgtggtttatttgtccccacaaaaattaatgttgaaatctgatccccaagatggctatgttgagaggtggggtttgtggaatgtgtttgggtttgaggggtggatccctcaggagtgccttggtgctgttcttgcagtagtgcgtgagctctcactcttgctctggggagtctggattagtccttgagggaatggattagttcctgcaagggtaggctgttataaagccaggatgctctcaggctctcctctgtttgcatgggttggcttcccctttgatttccacatgttataatgcagcacaacccttgccagaagccagagccatgcccttgaatttctcagtctatagaaccatgagctaaataaacctcttgtctttatacattacctagtctcaggtattctcttatagcaatgcaaatcagagtcacaaaatgaaaagacaagtcacaagctggaagatattcactacacacatgtaactgatagaagattagtattaaaaatatacagagaactacaaatacttaagggaaaacaactgaagttacccatcagtaagaaaatgagcacagaatatgaactggcagacaattcgcagaagacaacacaaatggccaacaaacatttgaaaatattctcaacctcaccagtaatcaggaaaacacaaaatcaaacaaataccacttcacacccatcaaattggcaaaaaggaaaaggtctgactatggatcgattcatcttacacaaccacactggggagcagttacagaggtatctatcaaagatgacaatatgtgtccccttcaacccagcaggtcccctcctggagacattctaacatgtgaacccaatgagacagataccacaacgttcactgcaacactgtaatagcaaaaaattgataactagcaggagaacagagaaacacactggggtacatttatataagggagtatcatataatagttaaaatgaataaactggagcaacacatgtgaacacagataaacctcaaaaatacaatggcaagtggaaaaagcaatgcagaatgactggtacagtaggtaccattacaaaaagtttgaaaacatgcaagcaactgttatattgcttataaaaaactatatattgcttatagatacatatgtatgtagcaatagcacaaaaacatccacaggcatgatacatgtcaaatttgggacagggttacctctggagaaggagggaggaaaaaaaactggaagagggctacataagaggcaaatagggggaaataattagggcctggaaaagctgggtggtggtttttctgattaagaatgaggttgagcatcttttcaactatctattggccatttgtgtttcttccatttgaaatgtttcccaattaaaagaaacaaagatggggccaggcgtggtggctcacacatgtaatcctggcaccttgggaggctgaggcaggcatatcacttgaggccaggagtttgagaccagcctggccaacatggggaaaccctgtctctactaaaaatacaaaaattagctgggtgtggtggtgcatgcctgtaatcccagctactcaggaggctgaggcacgagaattgcttgaacctgggaggtggaggttgcagtgagccaatatcatgccactgtactccagcctgggtgacagagtgagactttgtctcacaaaaaaaaattaaaaattaaaaaaaaaatttttttaaacaaaaaaggaaggttacaatgacacagatgagaaaataaggcagtgacctagatggtagcagcaggccatgtttacactggtggaagtagggcttagtaagagtagggaactgcacacaaaaattcatgacagtctgcatgggccctgtgatttgatcactggggacagtctccattggattcatgtccaggctcacgtctaggctcagagcacctccaggttgtcctcagctggctgcagcagtgagcatcctgccctcatagggctattgttttttcaggaaagcagacaaacacacattaaacaacacaccaccaactgagtaaagtactacaaagaatatgaacaaggcactgaggcagagcattctggggatctcattctctgaagagatggcatctaagctgagcctctgggagagacgcggcaggctgtacagccagtgccgcatggctgcagtgctatcacgagcctgctgggactcacagcctcagagtgacacgtaactgtggcctcctctaggggaagctaataccagcagtgggctaggtcctcagccctgggataaaggcacaacagctctttgacagatcagaccgcccatctggaaccctgagcttgcccagaggtgcgtctcctctgtggtcacatcctcactaacggctgcacagctcgaagggcagagggaccacaagcttccgcctgtccacacaggaaatgcagagccagttctgcttacttggaaagccttctgtccgcgaggtccctgtggagaaggggtgtgaagccctgcacccgtcttaccagagcgttttcgggcacacccaggaccacatcatgcaacatggctccgctgccgaagtgctgggctatggacaggccgctcaggcagtagcaggtgtggtagaaatcacgcgacctgtaaggacaggcagctctgagcaggcgctcctctgctccgcacacatctacaaatgtagccacaccaattcagagaccactggtgcaatcacacgtccccccccatcctccatgtggctagaggaggcatggttttcccagcagtgttatttaaagccccactggctgagcacagtggctcacacccataatcccagcaagcaggaggctgaggcaagagaacggtttgaggccaggagttcaaaaccaacttgggcaacatgggagaccccgtctctacaaaaaattaaaaattagctaggtgtggtggccgatgcctgtaattccagttacttgggaggctgaagcaggaggatcactcgagcccaagaggtgaaggctgcagtgagtcatgattgtgacactgcactccagcctgggtgacagagtgagaccctgtctcaaaaaagtaaaatacaataaaataaaagccccatcctccagccctgcccagcagtgggaactgtattttttttcttttctttctttttttaccttaaactattaaaggaaactgtaattttaaagtcagtctctccagctgtcttctggaaagggctctccaggggcagtactaatgataaattgatacacttctctagaaaaatacctaaatatctagaaatgggccacatccttcctgatacattgtgggaccaggccttcccctggatgccaagagcagcaggacgtgtgctgggatgggggaagacagagggtgggtaacaaaggtgagaggacttattttatttccctttttctaacacataagccatctcagatttgagcttaatcatttaatccactctataatagttgtcatgattacagtctctgtttacaacactgaggggttttaaaatcctgtatcctattctatttagatcagtttttttttgttttttttaaaaaaaagaagagttatctacccagcaatctgtttccctgtctgggggagggggttgcatgcaggctgggggacaagacgggcagctggaggtgccaagatcaatggcctcaaggggtgctcccaactgggtgctttttcccatacaacctagcgctatgcaggtgctgaaggtgacacctctgctcttgagatctggctctgagtaggcctgaggtgcacgcccctctgctctctcctcccctctcccttccctccccagagagaaaacactcacttgccaggtttatccagaagcccccccgcagggcactggcagcacatcaggatgtactcctgcagggcctgctgatggaacatccagtggctcatgctaagggcagggtcacctgttgaagggcaaagggtcagtaagggcccggcagatccagccaagtatcaatgacctaattccactttctcacctgggggaatagtcaaggtttcctgctccccttcctcttccattcattcttggtacaactgctatcttccccatgtcctacgcacagcatgtcccttctcctgaactttgacatgtgtcaaagagcagcaattcaaagtggcactttcactttcttgaaatgcaccctgttaacgtggatggtgatcctcaaccacatctctggcaggcagtgaaccagcctagctgtttagcttaccttcccagactgacctcggtagctgctcccaacttggtccataactctaccctggacttcaagagacattccctctagcatatctctataacttgttaaccagactgattagctcagagaactcttaatgggtaataaagtctgtttcttctacttttctaagcctaaatttaattgatctccaaagggaattctctaacttgtctctcagctcaaagaatttacctaagaaacattactagtaactgccctcctgcatcatatgataccctagcaaaaactgggtattctggtaatactactaaggtactgacaagcaactggacttcttcactctgaagtccaatcactatggtcaaagaattctgtgggccacacagttatcaagtgggaaggagggacaaatcacggacaggtgtgcagaaacatctgcatagaaatcgattaaaaatatatatacatataggatgtacactaagtccttggtcaattttatattttgatacctgggctaaaagatgcctgacaataaatcatttttaaaaaaaagatgcccaacaattggtaaatggcacctgaaagctaattgttctttcttccagtctttttggttctatgcgtttttctacctagttattataactgtgtagcttatgtttttcacttataccactataggcataaattttctattctattacataatctgcatagccatcactgtgaatagccatatagtatttcattaagtggacatataaggtaactgtatcataaaaagaactgagctaaaaatcttatatatatgtcagtatataaattcctatggtgggccaggcacgatggcttatgcctgtaatcccagcactttgggaggctgaggggggttgatcacgaggtcaggagatcgagaccatcccggctaacacggtgaaaccctgtctctactaaaaatacaaaaaaattagccggacatggtggtgggcgcctgtagtcccagctactcaggaggctgaggcaggagaatggcgtgaacccaggaggcggagtttgcagtgagctgagatcacaccactgcactccagcctgggcgacacagcgagactccatctcaaaaaaaaaaaaaaattcctatggtgaaaattataaaagtttatggtatcaataacctttcccattttggagaaaatagcaaaaaagaaaaacgggggaaaagatttctaaaaataaaaatgaaaagtttatgatacagtctataaagagattgaagcaaaatattaaactgttgaatatttcctttttttttttcttttttgagacagagtctcactctgttgcccaggttggagggcaatggcacgatctcggctcactgcaacctccgcctcccgggttcaagcgattgtcctgcctcagcctcccgagtagctgggattacaggcatgcaccaccatgcctggctaattcttgtatttttagtagagacatggtttcactatgttggtcaggctgctctctaactcctgacctcaggtgacccaccctcttttggcctcccaaagtactgggattacaggcatgggccaccgcacccagcctaaattgttgaatatttcaaacagacaataagaatttattaaatttctttaaaaagagacacagaggaaaagggtttccaaggttgagcactaggtgagggacagtggccaggtgacatttagaggccagggacaaaagcttctcgtcttcaaccctgagtcgcactcagccctgaaacacccattaagagacacaggaaactaagtccgacctaaggagaagcatccaatctcccatctcaggctggctgcaggccacatgctttgatacacttgcactattttaattcccttcctttcttttcctcacctgtaagcacagtgaactttgttgtagaagatacatacatatatgatgggacttcactctatcttcttttacttatttccaaggttgtttccagttccttgccattatgaggaatgctggactaaatctttgtcaatattatgtatgcttaagattattttcttcaaatagactgaccacggtggaattattcggttaaagggaataaacattgttaaggcttttaatagatactgataaactgctttaagaatttatagactactctcagcacaatccctgtggagtagccctgctctgcaggagctgtcaaaaataaatatataaataaactaaaaataaaaacaaagactttatatagctaccagcaaaatttaaaattttgctataccacctccagcattagcacctttttgttgttgttgttgagatgctatcttgctctgtcgcccaggctggagtgcagtggtgtgatctcagctcactgcaacctctgcctcccaggttcaagtcattctcctgtctcagcctcctgagtaccttggattacaggtacaagcccccacgcctggctaatttttgcatttttagtagagacagggtttcactatgttgatcaagccagtctcgaactcctaaaatgatctgcccaactcggcttcccaaagtgctaggattacaggcgtgagccaccacgcccggccagctttagttactttttaaaagttatcagcaattaaaatggtaaaaagaaatagtacctgatagtttattttgatttgcatgcctctgattactaattagggtgaaatttttccataacttgtgtttaatatttgcatttccttatgatggtgtctgtttggcctaatcttctgagatccaatagccaattttattaatctagctttttcttatacttgccccttgtctacatcatatgctgcatctattttctcctttttgctcctctgttttggttatgtgagtttaaaactttttaaaatttttaaaatttaattaatgtaaaacatatatatgttttatacttaatattgtaatcatactattgatttttccttcacgatttcctttttaagaaaatatttaatgtgtatggggatttttggggggatgagtgatgaaaatgttctaaaattgtcatgatggttcgcaactgaataggtaagttgtgtggtatgggaattatatctcaacaaagctattatttaaaaaagcatatttattaaactttaggaaactgcattacacatctgtacaaaatgtacatatatttcatatcctataacaaataaaagactattattataaggtaaatgataacctgtggctaaaattagagtctgaaaagaaaacgctatgtttattatataaaaaactatagactgtttcagtgacttcctatattattaaagcatagaagctcaaagttcaaaagctctacaaggagcttccagatatcctgaatttggacaccagcacacataatcacaacaagatgaaagcagatacgattatagggtgataactgcacactggaatccaccttttaaatcctttctacctcttcctgaaattataggtcgccattctaatctcattttgcatttcaaaggttccttttatctaaaaaaatcaaaagtctttccacaccataactgataggtgcagccatctgtagctcaatttcacaggtaggcaagaaaattccagggtatgtccaaaagaacatataagaaaccagtaactaccaagccaagtggaaactcacaggcctgctgctttcttattgctccacaaaacaaaaaaacaaagtaactcactgatttagtcagcacttgagatttcttaagccttttttttttttttttagacggagtcctgccctgttacccaggctggagtgcaacggcgcgatctcagctcactgcaacctccgcctccggggttcaagggattctcctgcctcagcctcctgagtagctgggattacaggcaacgtggcaccatgcctggctaattttttgtatctttagtagagatggggtttcaccatgttggccaggctggtcttgaactcctgagctcatgatccacccacctcggcctcccaaaatgctgggattacaggcttttgtgtttttttgagacaaagtcttgctctgtcgctcaggctggagttgcagtggcactctctgcctgcaacctctgcctcccagactcaagtgatccttctacctcagcctcctgagtagctaggactacaggcatgtgccaccatgtctggttaactgtttttaattttttgtagagacaagctctcactatattgcccaggctggtcttgaactcctgagctcaagaggtcctcctgctttggcctcccaaagtgctgggattatggtcatgaaccaccatgtccagcattttaaggtactaatagtaattccttcttctactcaaatactgtcatttacacatagaaggtagtcaatggcatggagccactgatggtcacttgctgggtcagggcatggcctagacccacgtgctgcactatgtagagcattctttttgctttttagttagcaatatgatcaatgccttttaaaaaatgtatttgtacatttaccaaaataaaattagtaatgcacatggtttttttttttttaaaggcacagtataatacagaaggatagaaaatctaaaaagttggccaggtatggtggctcacgcctgtaatctcagcactttgtgtggccaaggaaggtggatcacttgaggccaggagtttgagaccagccaggccaacatagtcatatcctgtctctactaaaaatagaaaacattggctgggtgtggtggtacacgcctgtaatcccagctacacaggaggctgaggcaagaaaatcaattgaaccgaggaggctacagtgagccgagattgcaccactgcactccagcctcagcaacagagtgagactctgtctcaaaaaaaaaaaaaaaaaaaaaaaaaaatctaaaaagtctccctccttctgtcttctgtctgcttctcttctcccaaaggtacccattgttcaaggggttttgtgtagggttccaggaaaagctgtgtacatctcgggctgtgtgcccaggcactgctccaggccccgcccccttacacttcatgttgtatcttgcagagctttctatatcagcccatggtatgcagctactgtttggagagatttttattatttaacccttaaccttttgataggcacttaggctgctattgaaactccacttcaatatacatcctttgctaatatccctgcaggtaaattcctgacagtgcacttgctgtgttcaaagggtaagtgcccttataatttaaatggatgtctccaaactgccctccaaaaaatgacttaacctatttacatccccactatcaaattacctgttttctcacactctccccaacatagggtatcaagttttttaatctctgccaatccaataataaaaacaaatagtgccactcttttgattagcatttcttttactacaagtgagctaaacaatttttcgttggattaatggccacctactgtggttatgagcagggcagggttcagatgccagctagtctggattcacacaaccacatactaacccttgtgagtgccaatcaggtattataaagcaatcacttaacctcactgtagtttgtttcctcatctgtaaacaatggtacctatttcatagggttgttttgagaattaaatgagaaaacatatgtgaaatgctcagtacagcccctggcatacagtgagggcttgggaagactccgctaccagtagtagtggcagttgtagtagaaaaagtaagaaggacagttctttcactgggacctctttcttcagatcctttgcctgtttttcagttgggttgtccatccatttcttactggtttgtatgattttttttcaaattaaagaaattagccattcatcacttgttataaatatttttcgcacctttttgcttgttttgtttgtagaatttccctgtttctgtaaaataacttttgttgtctttttttatgcaagaaatacctattaactatagaaagattagaaaatacaaacagaagcaaacatcacctgtaacttcacatcctagatactttctatgaattttttgtagtcaactcttcactaaaaatgggattccacacatattgctttgatatgatcacaatatattgtgactatctttctacactgcatccccttttgactcccaaagtcagtattttgccctcctttcaacacacttcccttctttacagactcctgtctgttccaagttcaagagatgccctgtgtctgagaagacaacacaggccttctcccagccaatgaaaaaagctggaagcaccaagattcataggcacccttttccatagacaaagctttgaatgccactaagccccctagaacatgtgctacaagaaacaattaaccagcagcccccctggaagactttgacaggtggtgctcctgttatagctcattccacatttccctgggattgcagaattactgagtcttatccatgccagggacaggtttgtaaaagactgaccattttaccaggggcttgacctcaccagttccaaataaagagatcaccatgaccccaagtttttttctatcttagaaatgttgggccaggcacggtggctcacgcctgtaatcccagcactttgggaggccaaggcggacagatcacctgaggtcaggagttcgagaccagcctgaccaacatggagaaaccctgtctctactaaaaatacaaaattggctgggcgtggtggtgcatgcctataatcccagctatttaggaggctaaggcaggagaattacttgaacccagggggcagaggttgcagtgatccattgcactccggcctgggcaacaagagtgaaactccgtctcaaaaaaaaataatactaaaataaaaaatgtttgacttggggaattcctgacttccctactggtggtcaaggcagagactgtgcaggctccaaagtcagtgcacttgctgacagtgcacttgctgtgttccaagggtaagtgccttatatgccttaatactgacacctaaagcccagtgggcccaggccgggaaaatgggacagaggctctgcttactttaattcagtgtcagaaatggtcacaactcaacaactcaaaggaaattaagaaactaaataatgaggctcagggccgggtgcggtggctcacgcctataatcccagcactttgggaggccgaagtgggcggatcacctgaggtaaggagttcaagaacagcctgtccaacatggtgaaaccctgtctctactaaaaatacaaaaattagccaggtgtggtggcacgcgcctgtagtcccagctactcaggaggctgaggcaggagaattgcttgaacctgggaggtggaggctgcagtgagccaagatcgtgccactgcactccagcctgggagacagagcacgactccatctcgggggcggcggggaggggggaagacggggggtggggggctcagaaacaggaaaaaaaagtatggggaggggcagaaaagaatctcatcttttacatttgagcagttacattatccaactaagtccgaagaacagcttctctttggacccagggatctcattccaaaaacagatcagcaaccagcagggccccatgacttcctctctcccacaggtctactcagagacacctgctctcacatcaagtacaccagaaagatggtgcaggagttagcaggcagactgaggtttcaagagatagagagagaatgttcccagactttttgctcactaactacttcggttttgcgttcccatttgagaccccacagaaacgaacgtggatttctctactccaatggtgcaggtggaacaaactcccatttaggcttattcaatgaatgtaaaataaaacatttctaatagtgacaactctgcagccagtcagacacggcgagtctcttctccatggtgtaggggcaacccacccctacaacccacccctacacatgggttctggttctctacccctttacgcagttgcctttcctgttgctgttgcaacagtgactgttgcaacactgagggttttcagctctgccctgcacccagaggaggtggcaatcaccacagagcccaggacaggagtgggctgctccttccagataacgcagaagcagcgcccacttcctccccgctccccgtagcaatttcaaggaagctcattctgtcgcagccaatttgaagaagcaaagaatgacactaaaccaatgaaactaaatcttactctgcattcgcatgccccacggcatgaggttccacactgggcactcaaaatccaggatagacagagctcatttcaacccctctaaaaaagcacgctgggcttccagactttgtgagtagtggagggaaatcatccagccccaagtgaacagctccccaggctcaccttgggcgtgcagtgcgcggtggagcaggggcaggagccccgcctgccagaaggagtagcagccatccaccagcttgttgcagcggccctgaaatcctccttcaaatcgcatctgccggcttgtcacccattgctgaggagacacagatgggaaaggcagttgtaggctaaaagagacaaaatccagcccgacagaatctccaggagtcaatctgtgggatggagggtttcccatcttgtggcttcttggcactctagttttggtgctctggttttctttccttccctccccacactgccatagacacagagtgaagcatttaagccaacgctgtagaggcatccagcactgatctctgctcaatgcctggcagacaactaccttttcctgggttccaaagcagtgccagtgctgagaagataaagaggccaagctggtttgtaaggagaccttcaaagtctcttaataaacatggcttaagttggaaattgaaggcaagactaccagtagctcatttctcattacttccctgctccggggagtttattaaaagcagataaatggaatttggtactacatttcttttttttttttttttttttttttttttttttgagacggagtctcgctctgtcgcccaggccggactgcggactgcagtggcgcaatctcggctcactgcaagctccgcttcccgggttcacgccattctcctgcctcagcctcccgagtagctgggaccacaggcgcccgccaccgcgcccggctaattttttgtatttttagtagagacggggtttcaccttgttagccaggatggtctcgatctcctgacctcatgatccacccgcctcggcctcccaaagtgctgggattacaggcgtgagccaccgtgcccggcctggtactacatttcatcagatgatctcaaactgctcctgacttttacttggcacctggggaaatttacccaaggtctcttagcaagtcactagcaggcctgaaagcagaagccattcattctaattaccaaatgacaactctgcccagtctgtggctgatataagaaaatcttttactttgaagctgtaaaataggtcttggtcttgatgtcactcagcggtcacacacgataccaccattccttgcttatctacaagttttctaaacacactctactacaaagatcaagatagtcatgggtttggtccctcagaatgagcagaaccaactggctgagcagatatgacatttccatttccctccctagaccacctaggccgttccagccacggacttacagagctgcctcactcaactgaaagggtacaggggagggtacttcctgtttctagagtcttactaggtaaaggtcctgaaaggagccactgggacccttgatggaagtgggggccagccctcccctaaaagctgttgtttagattattccctcttcaaggcaacacctgcccatagagagtcacagtcacaaatgcttaaaagagacagaaaacactgtactgcaggttcaggtactaatatatcctcggttgatcttaaatgaaccagggcttccagcatgtaatggaagtgggctaagcattactcaggcagagagaaagcaggcgctgcagtgggagtcggttcctcatttctacttaccgcagggcttaagtgtttttaagcagactaatttactttttccagtgcctaagcccatggatttgttctgtttccttgggctataggaattcatacttcagatatgggtcctacttctcccaaagcaaatggaagggagtagtctggattagagcaggggtccctaacccccagaccatgccaggctgcacagcaggacatgagtggtgggtgagccagtgaagcttaatctgtatttacagctgctcctcactgctcccattactgcctgagctccacttcctgacagatcagcagcagcattagattctcataggagcgcaaaccctactgtgaaccgtgtatgccaggcttctaggttgcacgctctacatgagagtctaatgcctgatgatctgtcactgtctcccatcacccccaaatgggactgtctagttgaaagaaaacaagctcagggctctcactgattctacattatggtgagttgtataattatttcattatatattacagtgtaataatagaaataaagtacacaataaatgtaatgtacttgaatcatcctgaagccatcaccccccgtcccacccccaaccccaggtccacggaaaaattatctcccacaaaactggtcccttgtgccaaaaagattattactgtgggttagagggacactaacatttattaagtacctactatgtgccaggctgtttataaatgttctctcctttaaccttaaaaaaataaggattgttatccctaccttataaaagaaaaaaatatcaagctaaaagagattagacaatttgcccaaggactcatgtctcaaatgtagtagggacagggttcaaatctagaacactgtctttataactgaggcactccctaatcacattccttatctctgcctgggagatgggacttttttgtttcatgccttattggtgttcagattttaaaacatctgagaaactcttaagttcagcatacaaagttggctgtttcagcatgagccttcaagccttcatgaatctttaaaaagactacaccgggggaggctttctgaaggtggaggcaagacactgctggttacatgtctacagggtacaacagaaactctccaggaagctcacgatgggccgcataacgggaggctggcatctgaactcagggagaggaggtgcatgtcagttgcagctggtttgctttgacgtcatggtcagggggtacatgctccccaaatgacatgacggggaatgccttctccctggtggccgtggaggtgtgtgtgtttgtgcacccactgatcatttaactacaatctagtgactccctgaagctgactgctttctgagtttcttctgaatactggccaggagcgtggggtccagacataaatgttgggctgccttctcaatgcaattagccagctctgcctaaacaactcatttaaatgtaggtactaaatgtttacacagtgcagcaggtaataaaagtttggtttcgaaatgctgcaaagctcttcttgtaacttttcctcttaggaggttctttctataacacacgataacctctaattctacgaaactgaagtataaggaaggtactctgctcacaccagatgtctgcagcacacagtctatgtagtctacacactatgtaaaaagctctaagcaggaagacagaaaggcagaagggggagccaagacagagcagctgctcactccttcctctgtgttggaacagagctaactctcttagcccttcccatagccaaactctcctgaagcctgcatgtctgagtacaatcacatcaccatgacctggggcctgagagggggatggctcaaaagatacttactaataagctcttcaagttcaaggaacgttccctcttgaggattaccagcgcggccaggccacagaaggtatagccaccatgggcttccatccctggtaccccgccaatgccaccttcccagttctgacacctaagaagagattgagaaaagcagaatgagtggccagtgagtggacgtacacaagaccaggaccatcctaggtggcagagaaaaagttcactcagattaaggtgtgaaccatcacaactatgaatgaaaagatgccaactaattaacttttggaaatgtcttttcaaaaaaaaaaaaaaaaaaaagctgggcctggtggcacccatgtgtaatcccagctgctcaggagactaaggcaagaagatcacttgaggcgaggagttcgaggctgcagtgagctatgatcacaccattgtgctccagcccgggtgaaagagtgagactaggtctccaaaaaatgtaagtataataaaaactgtaaaatgttaaaaacccagacacttagaaacagcctacttgtgtaagaaacataataattcaaattattactctttgggaaaaagttataaaatcatacatatacatatatgtacatatatacacatatatatacatatatatatatacacacatatatatacatatatatacatatatatatagtgataaccatcaagttaaaataaaattaaagagtgattgttgattctagtgatcttttatttttgaaacagggtcttaactctgttacctaggttgactgcagatcatggctcactgcagcctcaacctcctggactcaggcaatcctcccacctcagcctcctgagtagctgggactatgggcgtgccccaccatacccggaccattttttgtattttttgtagagatggggcattgccatgttacccaggctggtcttaaatttctggcctcaaggaatcctcccaccccagcatcccaaagcgttgggatgacaggcatgggccaccgcacttggcctctggtgatctttgagtacaggtctactagtaatatttttcctttttgtttttctatttgttcaaaaagtttttataatgaacctgtatactattaaaaaataaacgttatttttaaaaattataattaggccaggtggtgatggcttcttaaacagcctgcagaaccatgagccaaataaacctcttttctttctaagttacccagcctcaggtattcctttatactgacacaaaatggactaacacaagaaggacaagaaataactgacttagtagaatagagaaacctttcctacccaaaggatagggatgggagaggggcaacaaaaagcaaggtgatctgctccaataaaaggctccaggattagagatacagggaacctccacaaagtggaatgcgtctgaaccaagtttgttggttgcaaacttatataagaatcagacctttaagtcccctactcaaatccagcagaagatgggaagtttcagaggtttaatcaaaaggatctgagttccagaatatccaacaagctaagaggaggagggagcactgtaccaaatgtgattacgtgagagtcagtaatctcaacacaatacccccagccccattcctctgtgtatttcacacaaggctgccagtttcataccccaagcaggaatttagaagattcctctctgagggaactgataagcccaagggaaaaaccctacagacactgctttgagaattccccaatgaatggcttgatcctgcccactctcgcagagctccccagcagcttttcagtgctggatccttaaatatgaacagacagctgtagagtaccagacatttgaccacagtctctactatgaaagaggagaccaaaacaaacaaaaataaattggaggaaataagacagggagcaaaagaaaactttttaaagttgtatctttagataaaatattatatgaagtaagactattgagaggacaaaatatccccagaaaagaacaagagagtagataaaaaagtagtcaggaagtaaaagtagtcagggaggaaaactaaaaataggattacaaaaataaaaacaagaggattagaagataaatactaagagaatctctcaaagtataagaagaaggattaagagatggaaacgaaccatgcaatgaaatatttttatttttatttatttatttttgagacagagtctcgctctgatgccgaggctggagtacagtggcacaatcttggctcactgcaacctccgcctcctgggttcaagtgattctcctgcctcagcctcctgagtacgtgggattacaggtgcatgccaccacgcccggctaatttttgtatttttagtaaagacagggtttcaccatgttggtcaggctggtttcgaactcctgacctcgtgatctgcctgccttggcctcccaaagtgctgggattacaggtatgagccactgcacccggcagtattatttttatttatttatttattttgagatggagtctcacactgtcacctgggctggagtgcaatggtgcgatctcggctcactgcaacctctgcctcctgggttcaagcaattctcctgcctcagcctcccgagtagctgggattacaggtacccaccaccacacccggctaatgttttgtatattttgtagaggctgggtttcactatgttggccaagctggtctcgaactcctgacctcgtgatccgcccgcctcagcctcccaaagtgttaggattacaggcgtgagccaccacgcccagcctcaaagtattcttaaaagtcagacaatcaaatgtactaatgggatgtcatatttttaaaaggctggccaggtgcgggggctcatgcctgtaatcccagcactttgggagaccaaggcaggaggatcatttgaggtcaggagtttgagactaacctgatcaacatggcgaaaccccgtaaaaattagctgggtgtcgtggcgcacgcctataatcccagctacttgggaggctgaggcaggagaatcgcttgaacctgggagaaagaggttgcagtgagctggtctgcaccaccgcactccagcctgggcaacagagcaaggcaccatctcaataaataaataaataaataaataaataaataaataaataaataaataaataaataataaataaataaataagaggctgggcatggtggctcacacctgtaatcccagcacttggggaagccgcagcaggaggattacgtcagcccaggagtttgagaccaacctgggcaatgtggtgaggctttgtctctacaaaaatttaaaaaattagcggatggtggatgcctgtagtcacagctactcaggaggctgaggatgatcacttgagcctggaaagtcgaggcaacagtgaaccatgatcgtgtcactgcactccaatctgggagacacataaaacaaaaagagacgtctcaaaaaaaaaaaaaaaaaaaaaaaaaaaaaaaaaaaaaaaaaaagggcccggcgtggtggctcacgcctataatctcagcactttgggaggccgaggcaggcgatcacttgaggtcaggagttcgagaccagcctggccaacatggtaaaaccccatctctactaaaaatacaaaaattagctgggcgtggtcgtgggcttctgtagtcccagctactcaggaggctgaggcaggagaattgctggaacctgagaggcagaggttgcagtgagccgagatcacgccattgcactccagcccgggtaacaacagcaagactccgtctcaaaggaaaaaaaaaaaagagcaaacacagaaaacacaagagaagaaattatcaaagaaatactgtaataaagaatcttggtactaaagtatatgcacttccaaatcgagtgcccagcaaaatgaataaaaataatccacatcaagattcatcatcaagtttccaaacaagaataaacattccaggccaggcgaggtggctcatgtctgtaatcccagtactttgggaggctcaggagggcagatcacttgaggtcaggagtttgagaccagcctggccagtatgacgagaccctgtctctactaaaaatacaaaaattagtcaggcatggtggcaggcacctgaggttgcagtgagctgagattacgccactgcactccaacctgggtgacagagcaagactccatcacacacaaaaagaataaagattccaagccgctaaagaaggacaggatggggatagaaaaagagagacagaagaaaaaaacatacagagaattaagaatcacaatggcactgccaggtagtacagcacagtggaatccatttgatttctctgtatttctgcttaatataaaatttaaaggctgggtgtggtggctcacgcctataatcccagcactttgggaggctgaggcaggcggattgcttaagctcaggggtttaagaccagcctgggcaacatgggaaaaccccgtctctactaaaaacacaaaaattagccaggtgtggtggcatacacctgcagtcctggctacttggaaagctgaagcaggaggatcacttgaacccaggaggtcaaggctgcagtgagccaagatcacgccactgcactccagcctgggtgacgaagtgagaccctctttcaaaaaataaataaattaaattaaattaattaaattcagtatcccaccacttgacatataaggaaactatgacacagagcagtggaataacttgtccaagcacaaagctaattagaaatggcaggctggccatcgtggctcacacctgtaattccaacactttgtggggctgaggcaggaagattgcttgaaaccaggagttcaagaccagcctgggcaacacagtgagactctgtctttacaagacattttaaaaattagctaggtgttgtggtgcacacctgtggtctctgctactcaggaggctgaggtgggaagactgcttgagcccaggaggtcaaggctgcagtgagccgtgatcatatcactgcaatccagccagggcaacaagcaagaccgtgtcttcaaagaaaaaaaaaaaaagctgggcgcagtggctcatgcctgtaatccttgaactttggtaggtcaaggtgggtggatagcctgagcccaggagttcaagccccacctggacaacacagacagatcccatctctacaaattttttttttaaacattagctggttatggtggcacgcgcttgttgtcccagctacttaggaggttgagatgggaggattgcttgagcccaggaggtggtggctgcagcgagctgtgatcacaccactacactccagctcgtgcaacagagcaagactcggtctcaaaaaaagaaagagagaattgaaagacagaggaagaaagaaggaagagaagaggaaagaaagggcaaaactgggattcaaacccaggctgtctgagttccgtatctagtctgtgcctaaccagtcaacccccctgcaaatgacagctgtacactgaacaaaatacaaaaaaacagcttcctgagggttcagctgactgaaaaagggcaggcagattttggtggagtttgaaacttggaacagagaacagcatgcagttagtccctcccttcccccacaactttttctctctggtttgccctcaggatggcagccatagcccagggcggcagcagcaggccaggggtcaggggtcagggcgggcagccaacactctaatgggaagccaaccatccttctggcaggaagatgcaggctgccagaaactgaggacgaatccagaaacaggaaagtcaaagaagaaaaatcccaaattctgcatttaaactcagttcaagtttccacatacgtgctggggaaacaaagcaacttctaagcaagaactgagctctgagctgctgcatgagtgacagtttgtagcttgagtctgaccaagttgactgcctgctaaactgaaaacatcaaccccttttggggcaaaccaacagaatccataccgttctgttgtatgacacctccaccatcatatcacaatgtctaggacacaacacaacatcactcagcacaggaagactcatggagctgacatgccaactccaggacacacagatgtggaaattcccagacaagcaatttaaagcagacattataattccatacttaccacagcaaaatgaagaaaaatgcactcataaagaataaaaagatggaaaatctcagctgagaaacacaaaatataaaagagaaccaaacacaggcagtgcctactctccagctctcaactatagctgccttaccattgagcatgacagtcctcaatgaactctggttactattatcagccttattaacaatgacattggaagccagaagataatgaagcaatgcttacaaaattcagaaagactacagtttataccattgccaagttagaaatctctaaccaaataattaagtgtgagattagaacacagatacatgcaagatattaaaaatgtatctcccaggtacccttttttgggatctgttggagtacaatacttcatgaaaataagaaaaccaagaaaaaggaggacagggacttcaacgaaggagagaaatgaagtgaatttcatgctgaaaggaagcttcgggatgcctgctgtgtagcaagctgagagcaatctgtccagactgaagcaggagggcagagggctccagaaggggcaactcaaaacgcacgtgtgcacagagacaggttacctgaagggtttgactatgtttagagtaattttttatagctctgacagacaatttgggaaggaattcataagtacattcatgatatatccattaactccaggaaaatgaaactcatacaaaaaagtaaacatgatctcagcatatcatctggtatcactgtaaattatatttatatggtaatacatactactttgataaaaataaaatttttttaactaaaacagtatctcagcttggctatcattccatcatagtatatatgtgtctactataccttttgcttctttttttgagatggagtctcgccctgtcgcccaggctggagtgcagtggcgtgatctcggctcactgcaagctccgcctcctgggttcactccattctcctgcctcagcttcccgagtagctgggactacaggcgcccgccaccatgcccagctaattttttgtatttttagtagagacggggtgtcaccatgttagccaggatggtctcgatttcctgacctcatgatccgcttgccctggcctcccaaagtgctggaattacaggcgtgagccaccgcacctggcctgctttttttaaactatgaaatatttggagcatccaggaaagtacagcaaacaaaatatagaacatacacgtatctaagacctagcttagaattagccatatacacttcaggtctttgttgttgttaactattacagctgaagtctcctatgcagacttatctcatttcctttgctctcccctcagcgggaatcactatgctaaatttggtgtttatctttcgtatacatgtttttatattattaccacatgattcttctcagaaacaatacagaattctcttgcatgtttcaaattttaagtaaatgtgctaatctgtatggtttttttgtatttttttcttttcattctttcaactcaacatagagatttttccatattgatacatgtaactctagttcattcattttcactgctacattatattccgatgcaactataccacacttacccatctcgtgcttatgagcactgaatctgctttcagcttttggctcttataaacaagtcctgtgctcctctctcccattcgtgtgtgcaagggtttctgtgggagtggaattactgggtcctacgcaagggcacctttgacatactgtcaaattgctctaaaaactggttaaatcaattcaggctctcactaatattgtttaccaaagttttttatctttgccaatctaaaatataatataacattaaagaaagtttggaaaaaagaagacattttaagtatttaaaaaaatcattagataaccctaatggatctcctgtgatttttgtatttccttccaagtccctctgcattttctttatttttctgaagtagtgtcgtgaccgcctgctctccaagaggccaggagaaaccctggcttctctcaccttgctatccattcagcagtgccctcaaagaggtctggagtgatgatgttggtcagcgaggctacggaggcagcacagtatgcgcttctggaaagacagaaacgggaaacacattaagctctacggaagagctaatgaggctcagtgaactccgcgggcggactgctcgccttgcctagtaagctgtaatcacctcctgtcctcactcttggcacacggtcagtcctcctgggtctccaactgagaggtgtgacattctatttggatagagttgctcacggcatggcttcagtgaaagaacatgacattctattctccctacctccacatggtccaatctacatcagaggaaataacagccatatcaattcatgtcaaaagtggattcagctcttctttcaaagacctataatggttgccataaatctatggtatcattcaggtacttctgatatgctcattcatttggatgttagtactgtttcagagccaggatttctgtttacagccttgacacattaaagattaactatactttttctgcaacagataaactgcaaaacaggccaccaaattgtaatagatcaaacaaggataggaacaggtgagtccactccaatacagtccttaaacctctagagggagaaaagagccttgatttcaaacctctcaccagtacacacacacacacacacacacacacacacacacacacacgttaaatgaaaaaggcgcacgtctatattttttgttttgcttttgttttggtttttattgagacagggtctcactctgtcgcccaggctagagtgcagtggtatgatctcagctcactgcaacctccgcctcctgggttcaagcaattctcctgtatcagcctcccaagtagctgggattacaggcgcatgccaccatgcctggcttatttttctatttttagtggagatggggtttcgccatgttggctaggctggtttcaaactcctgacctcaagcaatccacctgccttggcctcccaaagtgctgggattacaggcataagccaccgcgcccgggctattttttaaaaaagcattattaggctgggcacagttgctcatgcctgtaatcccagcactttgggaggctgaggcaggtggatcacgaggccaggagttcaagaccaacctgaccaatattgcgaaaccccgtctccactaaaaacacaaaaattagctgggcatggtggcgtgtgcccgtagtcccaactacttgggaggctgaggcaggagaaccacttgaacccgggaggcgggggttgcagtgagccaagatcatgccactgcattccagcttgggcaacagagtgagactctgtctcaaaaaaaaaaacaaacacaaaaaattattatacttgatttaggatcattcttgctgttccatcctcccagccctaattcttctcggggcacattttatttcagcttctccctctgtcatggtatacacacacagactgcctttccttcccctctatggttttttcaaatacccggcacagggaagacaaaaatcattggtttgaattctgctcaaaaatccttctcctggccaggcatggtagctcatgcctgtaatcccagcactttgggaggctaaggcaggtggattatttgaggtcaggagttcgagactagcctggccaacatggtgagacctcgtctctactaaaaatacaaaaattagctgggcatggtggcacacgcctgtaatcccagctacttgggagaccgaggcaggagaatcgtttgaaccccagagacagaggttgcagtgagccaagatcccaccactgcgctcctgcctgggcaacagaaagaaactccatctcaaaacaaaacaaacaaaaagtatattcctaagggctcctaagaaacataaaagaagggcctagtttccatcttcttttttttttttaagataggatctcactttgttgcccaggctgcagtgcagtggcgctatcatggctcactgcaacctcaaactcctgggctcaaactgatcttgcctcagcctcctaagcagctgaggctacagatgcatgccaccacacctggctaattttttaaaaattttttgtagagacagggtcttgctgtgttacccaggttggtcttgaactcctggcctcaagtgattctctcatctcagtctctcaaagtgttgagattacagacatgagccactgccgctcggccctggtttccatcttactcagtatagatataacatgaagtcagacttactgaggtattccaaagaagtctctgcagaagctgcatgcattatgatcctaccagcatttttagcagccaaaggcacagtggaagtttagttccaccagcaggcattgggagcacacaagagtcacaagtgccaatgccaaatgtgatcatctaccagcagctaattttgaagatctgtctaatttccttgcaattgtaggcctcttaaagaggctcagatgcatttgctcttgaatcctattgtgacttgtgaggtaggaggcgacctataatacagtttgcctctcacaagtgtgaggactaagaagtgatgacagaagacaggagtcccaggtctcacgctgagatggggaggaaacgtaatacaaccttttcatgtatttctccccctttccctccacccagtcatcgcagctctcaaatttgaatttgtccactaactttccatccttgctgccatcacccaaatccaagccttcttcaacctggatcagtcttcctgctctctctccctccagccctgaaaccagagggcttttattggaacactacagtccatcactgcaattgggaaacttctaagaaaatacaaatcagatcacatcactaaactccagactccataggagatttcagggcctctgtagcctgttcccagcctgtccctccagctccactgctcccctgcccaccaggccatctacacttcaacactgaacttgtcctttcttgagcaacacatgctttctcaccaaacttctgcaaatgctagatccctgcctccaccttatcctcacagaatgatctagattatataacctagaaaggaggtctcctttcttaagaactgagaaaaaatagtgcttgctatgagttcactgtgatttgattttttacaatacactggaactacagacccttgagtaggctcatctctgaaactatcagcagtgtaacagagcagaaagatcatccagagactgctgtctatcccagaagggcagcgagctagtctccagatgtcaaactctcccatcactgctgcttttctccaagtcaaatccacccaaacaagcactcctgaggactggctgatgcttccaggcaaaggacaatgaaagaaatgccaagtgaaaaatgatggaatcggggtactagaaaccaggcaaagcaaggaaaatggatgcaatctgctagcttttctctatcattcatatctttaatcctttatgtaaatagaaagcacgggcacgaatggcagagcatcacccaaagagcaaaggtcagggaagaatatggctacagtgcttggcaggggaaccaagctgccttactggagaagtttcctagcatttatctagaacatataaataaagagcatagggaaaaaaaaagtgctggaatgaataagatagcaaataatcacagctgcaaaaggtatatgataaaataccaaaaggatcttgctatgatttgtttgcttttgcctaataatcttagtaggtttttaaaagctgcgtttcaagactgtgcatattttgggggaatagcaacagaacaggaacgaaaatgtagtgaacacgagggaaaaaaactcttttaacattttccttaagaagaatcaacacatactgatttacctcagtcgttctactggtttcactggtatacacagatcctaatctaatttttttggttggattagacaagttagagatagaagaacatcttgaactaaaggcctttgcagcctgattacctattatctgtaatgtattttatgctccacaatgttcgtggttttttcctcccctatactttcaaaccaatggttaaaccagatgcttaagccagactattaatcaacttgtgtagaagcaaacccatttacacataggcagtaagacagctttgctatagaaacctcacaaaatgtatttctcaactaaataataagaaaatggcataaaatctcaataagccactgtcttagagaaatggcttattcaatgaattccctgtatgcctcataagtaatctgccaggtgaggaagcaacttgcttggtacatcagacacttatggaagaaaataataatttcgagctaactggcaccaatcagttaatgcgattttattgcactgcactctcccggcccacaaggctctctgcacctcccagaaaaactctcatgtgcctcaggaggacctcagggattagacattctcatgatttcatcaaattcactcagaaggtatttactgaggccctgctggactttcccctcccttcctatctcagagaggtgaaggaatacattacaccatacagttatttatattgtggtatatcattttgtaccaaacaaatgtatttttaatttctaaaacaaaagcatttgtttcttatattttcacatttacataaaataagtcaagtgatcatgacacctgaggacatctgcatcacatctgaatgattctgacgtgtcactgacatgtcatcccatgtgtcattctgggacaaagcagcagcttccccatgatgttccttaggcttggcatctctaatggcagatgagctctagagtcaactgatgtggcagcctgtgcaaaaccccactcacctcacatccacctcacctccgacatgcatgagaaaggagccgtcaggttgcttcagggagtacaaatactgaagaagcttctctctgagaaacagggaaagaggtaggagaggcaacagtcagtgcgtgtcagcaggcggggaactcctctaggtttctgtcactgctggctttcactgtacctgttaatgatgtcataggcctcctcggtgccaatgatgcacaatgcattgactgctgcatatgtgggtgcaaggtgtggatactgaccgggtcctcctccaaagccaccttctgggctctgacacagctccaggaactgacacacactaggtacacagccaaagggcaaaaacaaagtcagagagcattcatgtcaaaacaccaaattcccactagattccaggcctttccaatgatcccccactccctcaaaagttgaggggaacctctcctcccacttgttgaatataacctctccccaaagggcttaattctctctccagctatcatcatttctgtctgccctcctctgagtttcgtacttaagcgcttgttggtcatgaagcagggaacacaaggctgggaagaaaccgactttcgtagctatggggtaagagtctcccgtgcttcccacacaaacctttcccagactttccactcaacttgctgccctggacctgtggtaccagcctcctcctccttgcctttgggaacctcccagcctttgaattttgccaaaacatggtgctcaactgcttctttccacactaaccatcctagtcaggatccatcacctaggcctatcatgaacatgtaaatagaggtcttctcactcccattgccacctaagcctctgtgggccactgatttctactccaccagtaagaagcaagttttgtttttttgtttttttttttgaggcggggttgccctcggtcgcccaggctgcagtgcagtggtgtgatctcagctcattgcagcatccgtctcccaggttcaagagattcttttgcctcacccttccaagtagctgggattacaggcgtgcaccatcacgcccagccaattttttgtattttcagtacagacaaggtttcaccatgctggccaggctggtcttgaactacctgacctcaagtgatccacccgccgcagcctctgcaagtgctgggattacaggtgtgagccactgcatccggctgaaaaacacatttttaatggagcctgcttccatggctgggagaacagaagagaggcaggctgctctcatgctcaccttaattgcggtaaacataagaggagctgcactgactcgccgtgagaatgcctcccagtctgcgggttcttggagaattctccacgttaattcaaacaggctcccattccctcactgaggggagctgttttctgagggtttgcctccaagcctggcatcaggctgcccagaggttacagtcttgctttaggtgaaatcaagagagccctatcatcagtccggggtcttccgaagtgcaccagaaagggtgccccaggaaagccctggttatcaagctgtttctccacagctcagcagggtcacagccttcccgccaggagaaacctccatttacaacaagcaaactgtctttgcagtgttcatggggccttctttcctgggcgctttcacctcattatttccttgctactgctgccagaaagactacatagcctactctccaagaagacacaagtttataactgtttgccaacatcacatttaattgctttcgatttcagagttcccattatccgggcagagaaagcaaaagcaaacgctgctgccttgctctgtgagttctgaaacgtcacaggttaaaacaacacatacttctttttgcacctacaattttactgtagaaaacacaaggattgaaactgaagttgaaaacaattatgtggcactatggtttttgtttttgattttgagagagggtcttactctgtcggccaggctgcaggacagcggcataatcacggctcactgcagcctcaacctccccagactcaagctatcctcccacctcagcctcccaagtagctagaattacaggcatgagccaccacgcctggctagtttttgtattttttataaagatggggtttcgccatgttgcccaggctagtcttgaactcctgggctcaagcaatcctcccacctcggactcccaaagtgctgaggtcacaggtgtgagccatcatgcccagcatgtgacacatttttaacagcaattaatttctgtagagaacttgaatttgttccttctttccaaatcgtcatcaattcttatgacatttcccagaaacaaatagttaataagctcatgccctaacaaaggctggctgcactagcataccaaaaggtttctgtaccacaaaaagttttagctgatacaaaacttaacagcacattttttaaaagaaagaaaaagagtcacctggttatccactccctttcccagctcctaagatagaatcgtgccgaacgcaacactactgaccctaaagcctcgaattagttaggatctgaatgtaccagacacaccttgataccatccctccatgccaacctccctcagctgacatgctgcatctgactgtctggggctgtgctagagaactggaggttgggcttctcttgatctcagacacttccgtattacagaacattctgatcccaaggctttccaacttgcaccttaaggaattggcaagttgactatgaactaccagctgtcattcacagacttcttagcaattctgaagaccaaaatgttaatgatacttctacatatttaaaaaaaacaaacaaacaaaaaaaaggagccaggcatagtggcttgtgcctgtaattccagtactttgggaggccaaggcaggaggattgcttgaagccagtagttcaagaccagcctgggcaacacagtgagaccccagctctacaaaaaaatatttttttttcccacaaatgtagggggagaaaaacttatcatagagacaagaagttcaccaataaataaaaaattacaagcaaaaaacattgtacaaacaccaagtggcacattttgtgaaaaacaagtattcacaaaatcattcctttagaatatgactgaaagctgcaatacatcaattttctttaacgtcagcaaggcatttcattctagcttacgtgccaattaccagcaaagtgggaaactatcttctatatcatggatcttcaaacccaaaatgtgtgcatcagaatctgtagaaagctaataaaagaatacagagacccagtcctgctgaggtggaaaagatcctgggcctttgtatttttaccaaattctcaggtgattcagatacatgcaaagcttgagccatcactagtccttgctgcacaactaaaattacttggggggtgttttaaaaaaatcccaacacccaagccacacctaattccaattaaaccggaatcactatgggtgggacccaggtggcagtattttttttaaactccccacgtgattccaatgttcagccaggtatcagtgcttctcaaacttgagttgcatagaaattacctgtggatcttgctaaactgcagctctaattcagtagaactagatgggtctgagagtcctctttttttttttttttaggagatggagtgtccctctgtcgcccaggctggagtgcagttgagcgatctcagctcactgcaagctctgcctcctgggttcaagtgattctcctccctcagcctcccgagtagctgggactacaggtgcatgccgccacgcccagctaatttttgtattttttagtagagtcagggtttcactgtgttgcccaggctggtctcgaactcccgagctcagacaatccgcccgccttggcctcccaaagtgctaggattacaggcgtgagccaccatgcccggctgagagtcctcatttctaataagttcccaggtgatagcaatgctcctggtctggggaccacattttgagtagcaatgagatacatctgtgctgtccaataggcagccactagccacatgaggcaatttaaattctcaattaattaaaatagaaaattcagctcttcagtcacacaagacacatttcaagtactccacaactaactgtggctagtggccaatatagaacacgtatagatgtttatagacacctatagacatttacagaatatagaacattttcattatcacagaaagttctgctggacaccaccacttttatcattccatcattaaagagtatgtaaatcttgtaagagggtcaagttcaaagcagggatatcagcgattgcctctcagccttataaggagtttacttgggactcttaggtgatggctgaggactgatctaaagtgattgattctggccaggcgtggtggctcatgcctgtaatcccagcactttggctgaggtgagggggatcacttgagctcaggagttcaaggccagcctgggcaacatggcaaaaccccatctctacaagaattataaaaattaaccaggcacgttggcacccacctctagccccagctactcaggaggctgaggtgggaggatcacttgagcttggggaagtccaggttgcagtgagctgtgattgtgccactgcattccagcccagacaatagagtgagaccctgtctcaatcaattaatcaatgttgattctaaacaccgtcatcagtttggatgaaggattcaaaggcatgtacagtaaataagcatataatacaaaatgagcagcaaaacaaatcagaaaccaataagaataaaacaaatgcaacaggtacaaatagcaagaattacgcttagagatggcaggggtgggggatgggtaaggcacatgaatatgggaaatgactaggaacatagcaggaaaagaccagtaataagggtccacgagttgtgaagaacaacaataaaaatgcttgttaaaagcatcataaatgcagtattagtcagaactgtatctggctctagcctccattttccacctcaaagggaattcacatgagagttgtaaaaatgactactttttttttttttaagtatttggctgggtgtggtggctcgtgcctgtaatccctagactttgggaggccaaggcaggaggatcacttaaggccaagagtttgagaccagcttaggcaatacagcgagaccttatctctatttttaaaataatataaaaagcttaatattacagacaatcacagtgagaaagctacccagcaaaatacctcaaatatacaaaggataattacataaacattctagtaggtaaaaactgagactaatttgtagcaagaagtatttaggttacataaaaaacttcagcactagactaggctatcatagacagacttaaggcctaggataagttataaaaattatagctatgttctgcacaattgggcaggtttaaaaaaaaaaaaacagaaaaaaagattacagctttggaaataggaacagtcatccatgggcagaacggcttaggaggggatgtaaatgcaagatgcatgagctggcatcacatcaagcttgttctcgtactaactaaaacagcttcagcttgatatagtgaagaggaaatctccttccctaggtagaatatgacaatggacaggtgaagacgggcagcatctcttgttgattccgggtggcctctgctgctcacagagtcagacgtgttatttgactcttcatcaagcaccggcaagtctctggatggctgctgttctggaagaatggtcaggtcgaaagttggctactataggccgggcgcagtggctcacgcctataatcctagcactttgggaggccgacgtgggcggatcacttaaggccaggagtttgagaccagcctggccaacatggtgaaaccccatctctactaaaaatacaaaaattagccaggcatagtggcatgcgcccgtagtcccagctgcttgggaggctgaagcacgagaatcgcttgaacccggaaggtggaagttgcagtgagctgagattgcaccagtgccctccagcctgggggacacagcaagactgcctcaaaggaaaaaaaagttggctactttagagcagagtttctcaactgttgacactggggctcagtaattctttggtgcagggaccgtcctgtagaggatatttagcagcacctctgacctgcacccaccaggtgccaacagcacctggccaggaaaaatgcccaggagacaaaggcctagatatggtgtcctcactgaaaggtaaggaaacatacaaactagacttaaaaattaaaaggaaaaatatttaaggggctattccggggataagctactaacaaccttttgaaagggaaaggataaaacactgaaatagcaaaatttgaatttatctttggaaaaatcttacaagctgaaatgtcctaaaatggtttttaagttaaaggcaatttttaaatcttacagaagctaaaaacataactttaacagtgcgatggtctccctgtgaattttattttgctctgtttcactgaagctgctttcagtaacaaagaatgggattctcattagaggatgcttccttcagtgccaaaaccattaagcaaagcaaatgtacttagtctagttccaaaatattaattcattttagataaacacatataaatgtgtgcatataacctcttaaaagagggaagctaggccgggtgcggtggctcacatctgtaatcccaacactttgggaagccaagacaggtgtatcacctgaggtcaggagttcaagaccagcctggccaacatgttgaaagcctgtctttacaaaatacaaaaattagctgggcgtggtggcacacccctgtaatcctagctacttgggaagctgaggcaggagaatcacttgaacccgggaggtggaggttgcagtgagctgagatcatgccactgcactacagcctggcaacaagagcaaaactccgtctcaaaaaaaaaaaaaaaaggccgggcgcggtggctcatgcctgtaatcccagcactttgggaggctgaggcaggtggatcacctgaggtcaggagttcgagaccaacttggccaacatggtaaaacccaatctctactaaaaatacaaaaattagccgggtgtggtggctcccgcctgtatgcctgtagtcccagctactcgggaggccgaggcaggagaattgcttgaacccaggaggtggaggttgcagtgagccaagatcgtgccactgcactccagtctgggcaacagagcgagactctcaaaaaaaaaagaggcaagctgaagtcctacctatggactgggcatggtggctcacgcctataatcccagtgttttgggaggctaaggcaggaggatcaattgagcccaggagattgagaccagcccaggcaacacagcaaggcactgtctctaccaaaaataaagaaaacattccaggctatgaatacattattcttgaaacctctgataccagcagtaacaacctcgccttgctggctttggtcagcggtcatagcagctgacaaaagtattttgtccactagagggaacccagcttatcatattgttccctaaacaaatagaagcacagcagtgaacaaaataggaaagagaaacctttgtgtaagtgtagggggcgtgtgtgttacatgcaggggaaaagaaggcaggaaaataataaaactgcagagctagactttttgactctaggtcaccttaatatatttgtatgaagaaagaaaactgaacgcatttcaaagcatttcatttccctgtgcaagataaataaaaaggcaatattctatttcagctagtctaaaaaaaatcttctatttatatagaagtccttaagatttatctgtatcttactaaaaataatctatttccttatgggtcagagccagtaggctttgttcataacaagtgttttctgcacctagaagtaaccacctcctaggcacaaagcaaaatacattattgggaagtctaagaaatgtttaaaagttcactaaatcaatgcgtagaagaaccacaggtaaagcttttaaggcatctgtgaagcagaaactctcattaactgtcaagtggtttttgaaataaggacaaatcagcttatttttaaaccattccttttttaattacaaaataataaaagatcattgtagaaacttcagaaaatgcaagtaagcttaaaaaaaatgttttgtttgtttgttttttgagacaacagtctccttctgttacccaggctggagtgcagtggtgtgatctcggctcactgcaacctctgcctcccggattcaagcaattctcctgcttcagtctcccgagtagctgggattacaggtgccagccaccacatctggctattttttgtatttttagtagagacagggtttcaccatgttggccagactggtctcgaactcctgacctcaagtaatccgcctgtctcagcctctcaaagtcctgggattacagccatgagccactacatccagccagaaagttcttctttttctttttctttttttgagatggagtttcactcttgttgcccaggctggagtgcagtggtgcaatcttggctcaccgcaacctccgcctcccgggttcaagcgagtctcctgcctcagcctcctgagtaggagccgggagtgcagtaacagaaggagactcttgtctcaaaaaacaaacaaacagcctcctgagtaggattacaggcatgcgccaccacgcttggctaattttgtatttttagtagagacggggtttctccatgttggccaggctggtctcaaactcccgacctcaggtgatccacccacttcgttctcccaaagtgctgggattacaggtgtgagccaccgcgcctggcctttttttttttttttttttaagacagagtctcactctgtcctccaggctggagtagagtggcatgatcttggctcgtcgcaacgtccacctcccagattcaagcaattctcctgccttagtctcccgagtagctgggattacaggcatacaccaccaagccaggctaatttttatatttttagtagagacaagatttccccatgttggccaggctggtctcgaactcttgatctcaggtgatctgccgaccttggcctccccaagccctgggattacaggtgtgagacaccgtgcccagcccagaaagtttataaaatcacttttaaccccatcgtccagaaataactactacatgtatctttctggttctatctatgcatatcatcatctatatttttaatgtatgtaaattaaatcttttaaactattttcatttcacatctctctatataaatacatatattttaacatacaaatatacacattcatatatttattgagacagggtcttgctctgttgcccaggctggaatgcagtggtgccatcatggctcactgcagcctcaaacccctgaactcctgtctcggcctcctgagcagctagaactagaagtgtgcaccaccacgcccagctatttttatttttatttttgaaatggagtctcactatgtcgcccagactggtcttgaattcctgggccccagtggtcctctgaccgtggcctcccaaagtgctggggttacaggtgtgatcatgcgtggccacatttatacattttttaatggttatatagtatttcacagaatgtactgcaccataaatgacttatgttttattttttaaatttatgtattttatttatttatttttttgagatggagtgtcactctgttgcccggactggagtgcaaaggcgcaatctcgactcactgcaacctccgcctcctaggttcaagcgattctcctgcctcagcctcccgagtagctgggatgacaggcatgcaccaccatgcccagctaatttttgtattttagtagagatggggtttcaccatgttggccaggctggtctcaaactcctgacctcaagtgatccacccacctcaacctcccaaagtgcttgggattacaggcgtgagccaccacacccagctttacatttaaaaaaaattttttttaaacattctctactgttgatatttaatttagattgcttccaatgaaaggccctttaaaggctcctctcttcctatgtgacattgccccagaagcggcgctgacacttcctcagaaaagccttcactataaaacaccaagtacacagcctagaaaaaaactcagtcgattttggctcgagttcttccacctcaggcaccccctgtgattctctcttccagtttttcatgggtctgcggcctcctccatccagcgttcagatccaggctcacagaaatccccattttttctttcttctctcacacccaactttcccattgtgcaagagtgaagggaaaactttccaaatatcctgattgtgtaggagtgaagggaaaacttcccaaacaatccccaggcccccgagctggtatttcaaaaacacacgaggctggatgtggtggctcacacctgttatcccagcactttgggaggccgaggcaggtagatcagctgaggtcaggagttcaagaccagcctggtcaatatggtgaaagcctacctctactaaaaatacaaaaattagccaggcacggtggtgggtgcctgtaatcccagctactcaggaggctgaggcaggagaatcgcttgaacccgggaagcagaggcagcagtgagctgagactgtgccactgcaccccagcctgggtgacagagtgaaactctgtctcaaaaaaaaaaaaaaaaaaaaccacgtgggcctttctttgacaattaaattcctgttactgcagaaactgtgtccaactctccttccagtgctggaagcagccaggcttgcagtggcatcccgatgatcaaaacaatgcacttgcctctccctcagaaagcatcctacgtaccacaagggttaatggcctaattctttattatcttccccatccacattcatcacaagacaccctgcccaggaaggcaagaatgagaggttattgttaagacagaatgaatgagacaatgtgcagttctgttcctctgacctgacaatgtgactgaggcaggggctctgtgaccagagaggggccccggctaggcctctgtgtgtcccagcacagctgcctccttgtgctgtggagaaacaaacctggctcagaagtctctcatcccagatgcttcgacctcaagagcaccagaggaagctgagaaattcgagatgctgcctagagcccatgctgcctctcagtggatctcttggatccaattcctggctgccctttcttattccaggtatccctaggactggagtcatgatcagtcttttcttctttaatatataaatggtgatgagtgtctgggaatgagatgccagatcacgaatgccatctgtacaaggatcttgggaagaagctcagttgcttagatctctaatcatcgatcaggtttaggaaaactgagagtcatggcatttgtatgccacaccagtaacacatccagtcccatcaagagctacatggtcgctccaagcaccgggagcggggaggtacttctatagaggtgcgtaggaaaggcaaaggcatttttgttcactggactggcacgtgcttccccacagaagctgttcaaatgcatactgtactttctggcaaaatcttgtctctcagagttgatgattaagacttttctcaaagaccagagtcaagagccaaaagaaaaggccacagaagaaaccagaatccttctcttggaagttcaaagtcttgttctacccaccagcttacattagttttctaaagtggaggagtttcaggaagttgccggaggtcatgagaagagcaaagatttctttgtggcactgtttttttccattccaaacaaacaaaacagaaacaaaacaaaatcccaaactcaaaatacaatttcagagaacaccccagatttcccaaagacagactcactctgtagccactatctgggggatgggttcatctagcagttccaagctgtgcaggatccaatagcagagccatgggcggctggcatccagacactgggagagagacaggagagaaaacatcccttattcacaatcactccaagacactgctgccaaggctgtatctgtctcactcccagcagcctggcaagggggaggagggcacccttgctcaaacaacaatcagtgaataaaggacactttgctttgtggccttagccaggagctgaaatgaccatctgttaaaaaaaaaaaaaaaaaaaaaaaagataacaaggctgggcgcggtggttcatgcctgtaatcccagcactttgggaggccaaggtgggtggatcatttaaggtcaggagttcaagaccagcctggccaacatggcgaaaccctgtctctattaaaattacaaaaattagctgggcatagtgatgtgcgcctgtaatcccagcgacttgggaggccgaagcaggagaatcacttgaacccgggaggcagaggttgcagtgagccgagatggcaccactgcactccagcctaggcgacagagcaagactccgtctcaaaaaaaaaaaagaaagaaaagaaaaaaaagacaacaggattaaaaaaaagatgaccctgaacccagtggatccctccctggcaggcatctaaggaaggctgagcagaggacttcctacaggccaggaggttaggggctgctattttctcggtatagaaccaaggagatatacattctctgaagagatttcctagcttaactcaatcactgattcaacaaatatttgatagtatctacttgtgccaagcactgtattagacactggggggatgataataaaatttggtttctaccgtttatttttttgagacagggtctcgctctgtcacccaggctagagtgcagtggtatgatctcagctcactgcagcctcaacctcccgggctcaagcaatcctcccacctcagcctcctaagtagctgggactacgggcacacaccactatgcctggctaattttttaagtttttatagagacagcatcccactatgttgcccaggctggtcttgaactcctgggctgaagcaattcacctgcctgagcctcccaaagtgctgagattacaggcattagccaccatgcctgaactggtttctgttcttgagatgcttgggatatagaatgtgtgtggttacctgtaggggaagagagcactggacagacatataagttacctcatgtctttctggaaccaacacgtgtacatatacctggagaaatgctgtaatggacgaaaacagagttttgagggagcacgtggaagagactgactaattctgcctggggagctaggaaaggcttccaaaggcaaaatgcagacggctcttgatcctaattaaaccataaatgattattgagcattcaaggctaggcagggtaggtaggagtactgccccagttttataaattaaaatatataaatgaggtccaaagattaacctttttcagattataaaaatagcaaatgtcagaggtgagacaagaacctaggtttttagagtcaatccagtgttctttccgttggcccaagctgctctcttcaaaactatgctgatatcccaagctgtggctaacccaccacctggaaggtaggctggtgagctactgaagacactgccagggatgcagcttaagtttgaatcccagctcctcatcttactcgctatgtgcctttgagcaaatgacttaattttactatgcccatttcattatctgcaaaaaacaagagattgatctacctcatgtagttacaagatttaaataagagaatgcaactgggcgcagtagctcacgcctgtaaccccagagcctcaggaggctgaggcaggtggatcacttgaggtcaggagctcgagaccagcctggccaatatggtgaaaccctgtctctactaaaaatacaaaaattagccaggcgtgatggtgcacacctgtaatcctggccactcagaaggctgaggcaagagaatcgcttgaacctgaggcggaggttgcagtgactcacgatcatgccactgcactccagcctgggaaatacagcgagactccatctcataaattatgagagaatgcatggtaagctttcagcacactgttcaataaattgttagctgatatggtaccaactgtaacataactattgaggacttgagtcaaggattgaaaattcatagcccacaggccaaatctagcccatggatgtgtattgtttaactggtagtagctgcaacatttgtcaggagagtcacatgaaaacgtgatttccggcttcatttggaggaagaaaaaaaaaaaaggaaacaaagatgatttggcaaccctgggtctgcattcccagatggcagtaatgggcaggaaagaagttaagggcacagggtctccagttagcctcagtctccatgcagcccacttcactgatttatgctgcctgcctgggccctacaggcatttgagttggcaaatcattgccacaaataatcaaatgtggaacccaaataaaaagcagattaaaaatagagatgctgctctgtgttaagcagggcagaaagactggagacttcctgttcacattcaccctttgcctgccgctcagtcccatccaacatctgtcccctccaccgtcacccagtcctgacgttgctctgggaaatattaaagatctactcttaaacagtaatgttaaattgcaaggaccactctctatactggtcctctagtcagtatagaaattagatcttattacaagaaagggttttttgtctctttaatgaagatatgaaaagtaatgtacttactagaaggagtggtgaagttggaaaatttgtaaccatcacgatacagacttaacaggtttggacaatagtcctcaataaatgagcgagaaattagatcagcttatagggcaaagggttaagggtgaacaggtaactggcatttagccagctgtcaaggaggtctagataaagcacgtgaaccccttagtcatcatctagtaacagaagaaagccccatcctatctagggtgctccactcactctggaagagactaggttctgccctttcagggctgagtcccagctctgtgacagcaccctacctcctgccagagccacagagaacaaagagtgactctgcaacaggtcagccccaacagtcttttacgtttaaatagaaaaaggaggaggatttggtggataatttgacagcaagagttcctgggtaatgtgtttacctcataggcatctgtcagttgtcgaaggcctcttttcagataatggaagtgcttctccctctgcaaaacaagcctggaaagacaaacagtttataagcccattctaatagcttatgcttccaccatacacacgtatgtgcacgtacacacacacgggtaaacactcagcttcaggacgtccccctgcaatcactgactggataaccagcaacttctctggttccaaagagcaactaaaccagagaaaagaagctcttgtctgaatgtctctaaagcatctgaaaaccatgccagctgacatttagagtgcgattgtctcctaaaggcagtgactttgggctaacggaaaagccgcaatgagcacacgcagccaggcaatgacagtccacccagaaacttcctccagcatctaagaacagatatctttgtgcctccccatcctataagcaatttaaatctgagcctcgccacttccctgcctcagccgctgtcatttcagtcaccccgtctgggatgacttctccaaggcccataatttactccctgcctgcctctcggttatccaactattattctctccctgaaattccacctcccacgtgtgacccacagccctggccagaggaccgtgttctgcagccagtcgctgtccttggctttcaagtcagcaatactggctttaagatggaatgtgccgcccatggccacctgcacaggccgggcaaagcacagaggctgcacttctttcttggtctggcagaagagcctgtgtgactagggaaggaaacaaaaagcacagattgtcaagatgttccccgtgcttgcagattacagaaacaaaggaaagagaaccattccctttgctaggtagtcaattccacaattgtttatcaaattcccactgtacttggctcagagtaagagccttcatgcagtctttttttttttttttttttttcctgagacggagtctcgctctgtcacccaggctggagtgcagtggtgtgatttcagcttactgcaacctccacctcttgggttcaagctattctcctgcctcagccacctgagtagctgggattacaggcacgtgccaccacacccagctaatttttgtatttttagtggagacgggggtttcaccatgttgcccaggctggtcttgaactcctgacctcaggtaatcccctgccttggcctcccaaaatgctgggattacaggcgtgagccaccgcacccagcccttcatgtagtctttacctcaaaaactcttccaattcagaaatgaggtaagtatatcaatggctacaaggaaagaatgggtaggttttgcaagggaaaaacatactactgaggctcaaaagggaggggatatctcatgaagaaaggaatgatcaggaaagtttgtgtgaaaaaggaggaatgtgcgatgagtggccctggcagaaggagaaaattttaattcaattttaattcaagtttaaatagctgcaggtggctaatggctactctactatgctgcacaggtatcaagtgtacaagaggagtgacaggtgggagaatctgacctcaatacagggatgaaagaggaatgggaggaaagcaggagtactgccccagtttaaaaacaaacaaacaaacaaaaaaacaaggatctgggatgctgactaaggcatttctactcaatttactaggcaaagggaagtcctgaaggtttttgagatgaggaaagaaatgatcagaactgtgctttggagaaacagtaggtagtcagtatgtgtttacaaactgaagtatctgaaaatatcgcagtgggcagacagatggggtggggagacagggttagaagctctgaggagctgacccagttggggctacttagggcccgaactagtgtgtgacccgtgatcagctgacttttggatgtgtgggtcttaggatgctgggactgcattcaggtgatgatgtcaatcaggctgctggacacacacgtgaggctcaggagagggattcaggttacacacacagactacgaagcatttgtctgcacacaagtgacaggtgaagccacagaaggtgagagggcagagagagaagtttggaaacaaaactgtgggaagacccatctctaagggtttggaggagccagtgaaggagagaaacaggagagtttacatatgctagggaagagcaaaggaagtgtcatgtcacaggccatcagggaggagagaatttcaggaaggtgtttaacagtggcagatgctgcagcaagactgaggggaaaagacaacaaaccacagaagggctagagacctccaagagcattcagagcagaggtgaaggcaaattgtaaacaagagaaggccagactcagtttctctttcaggaaagtccactcaggacgcagggagcacccatctgtgtgggcagagtgttgtccagcactggggtagaggctgctctgtaccctagagcgacagtccagaggtggacacacatgtgaaaatgacaagcagagccctgtccaataaacgctgtgatcagccacgggaagagatggagggtcagaaaactcttcccaaagggaagagcattgagtttaaggctggaaagacatgagttaagcaggcaaaatgaagaaaacaccatgacacatttgagttagtttagttcagctggatcaaaagtacaaggcagtaagcagagaaattccacattagaaatgcaaaagctcagaggaaatccatagggaaggtctgtaaagaggatggaggagggctgggatgagggtatagtaggagaggtgagcctggaataaggaaggatgctgcattctttgagcgagaaatgatgggtacgaagctagcgaaatataggtctctgatgtgggaagaaggaaacaggaaagtcaggtgggtcagcctcgattttctcaggaactaggagtcaagatggtgggagagctgtggagtggccacggtggtgggtgtgttagggaatctacatgagacgaataaaaggattataaggcagttagtgaagcgccagtgaaattaagaaatataacatgttggtgaagccagtcagcagcctcaggagaaaccaagcctgctgacaccttggtcttagacttctggcctccagaaatgtgaaaaaataaatctctgtggtttaatgcaccccatctgtgataccgtcttatggcagcccaagctgactaataccctcaccggtccttcattctcaactcacctctatccaaaaatcttttctgtgtaggaagttaagaaagaaaaggtagagctcttcctatttttacctgaacaattcagccccaaaaccattcaattacatggagcagaataagacaggtttcgtgcaggacttgagggggtgcagggtgggatgcaggctgtcagctcaagtggatgaggagggcccccgtctcactgtgcagagggtgacaggagagcaagtgggtaaatctattaaggctatgggaagtcaggtttccactgtctgagaaggaacttacacatctatgtgtactgggtaatgatttaaatagaatttcttatgaggggtgagcccactgggcttccagactcttcacaatgtgcctccacccacactactctccaacctcatctccgcccctgagctctggtcatgctgccttctttgagctccgctcctttcagtctcctggctttagcacatgctgttccctctgcctggaacactctccccatcctttaagttagccacccctattccacctacagattcagcttaaatgtcactttctgtaagaagccttccctaacttcccaatccaaattagattctcccagtgattctctctctcaaattatcccatcggtaactgtatatttgtgttcatttgtttaatgtccacctcccccactagaccaagagcccagcaggggcaggcccagggctagccttgctcactctggcttccctgagcccagcagagtgtcctgtcctttggagactctctagatactgctgctgaaagagaggatcacacaaaggcagcagaatggaatgagagcaaagccacttcctccccccaaacctgggccatcctggaaaacatgcatttgattgtgacagatgagaggacaggggattcagtccattgctggttcctggggactttctaaactcactaaagccaggggcctctctagtcaaaaaataagcacctggcatgtaagcaataaagcaatcgaggaaaggtgaacttatttgtgagaccttggaaagaacaacagtaagaagggaatacatcctctacctgctcaggatctgggaaattctaaaattgtatcacatacaggaatagtagaaaacacgggagctaagctggtgcctgtgagagacctgctttgaggactttaactcagagtattctggcttcagagccattgtcagcacttaacctccagggctctattagcacagggacattatcaatatttctcacttctgaggagcacccgtctccttgcccaggagaaaacaaatttaaaaactacatgtgagcgaggtatctgtgtagtttatgcatttcaggtttcttattaaagccaaggtgataaatgcaaaagggtacattcaaaagggtgtgaaaccgtgacaatacccacagggaagaaaaaatgaattttcatgggaaagcagacatgaataaacaaaaccatgaaaagcatggtcaaaaagctccttgggactgactacctcactccaggtagacagtcccaaccttagagaagaaaatcatttctgggaaggggattaagtatagaatgtactgacattcagctccaggcttgactttcagcccagtctgctattcagctttggccctggaacactgaataggcaaatgcctacttcagcatcatcacaggcatccctggacctgtgcgtggtctgtggtcctgggcatgtgtgtgagtctgtcccatttgatcagcatcatgacctcagacacacaaacaagccctgccatctagatttactgctaacagctaaccatgcacttcagctaacagtgaaggttacttcctgtattaaagtgtcagacttttaaattttgactattaatatgttaaatattgagactgtgataatgatttaaaattctgataaattttctaatttattcttatatcctcgcttattctatgatggtgatgtttgccttcagccttatattgatatgttgaattatatactcagccattcagccaaaatgtatagtatctccaatattaattagcatcctttaaaacactcaatttcataggcaacaatgataaaaacgggtaattgtgaaattcctgaaactaacccagagccctgatatattctatttccacaaggatccgagcccaggaggaacactttttttttcccacccatacttgacctaccagctatgaatcaggggatttcactcctttaatatcatctaccaccactctcaaaaaacaactgcttcctcccagactataacctcccattttccctcatatctcagtgtgaataaaagtctttcttcagctcatgagctaaggaaaaacaaattttaaaaaaggaatgaaagagaccaagggctctatcctgatggtaagtgaaaagggaatgtcaaataatcaaaggttcatgtgagaaacagaggctgtgtgtccccagagcccaggcagtggacagtgactcagcccgatcgggtgagtcatcgggggtacaaccacaacaacaaagcccctccaaaagcaatcacccacaccctcaccattatgaagtcttgtcccctctggggaggctaagcttgaaccagcttgtgcctaggggcagcgaactgccaaggataccattacatttaagagagctcgttctcccaagctatttaaataaatggcgtcatttgctaatctctagctgtatctcatgacaagaggaataattcattttattgaggtcagagcattgggttaatgcagagatttggtttagcagttaagggaaagactatactagtaagctgatatttttcctcctttccttccccag

SEQ ID NO: 735265 - DNA, 71526 bp, Homo sapiens
cggcgaggtcggtcattctgcctgtccggtagcaccacgaaacacctgccactgacacctccccaccagcccccgagggttcgcgcaggcatcccgagccgcgccccctggtccgccgcagccagattccctcccgggcgggttacgcccctaggcgcaaaacggaaccactccgtatgaagaagacaaagtataaccagtcacaccaaagagaggcagcattatttagacagccggctactcccccagagactccacccagtcccctgggcccggcgtccagcgcgcagacggtgcccggctccaggagttccagctccctccacgtgtcctgtcttcccagcagcctcctctgccgcctcgggaggaaaatctcctgacaactcgcggtctgcggactacgactcccaggaggcgccgcgccgcggctctccccgcccccccccgcccccccccccctccccgggacgcgcaggcgccttgggctccgtcaacaagccgggctggcgtcgcctggatgcggtttcttccgggatttgtagtttttctggagctacccgggccgtctgttagagggacaagaactacaagtctcggctgccccagcgctgcgagcctggtcacgtggcgggggccgaccgggcgtgcgtgccgccgttgatccggtgctgcagtgaggagcgtggttcttgcccgtgttgtgtgtgtgtgtgagtgagagagcgagtgagtgagtgagtgagtgtgtgtgtgggggggactcggcttgttgttgtcggtgacttccccctccccttcaccccttcccctccccgccgccgctgcagtggccgctccctgggccgtaggaaatgagcgataacgatgacatcgaggtggagagcgacgaagagcaaccgaggtttcaatctgcggctgacaaacgggctcatcataatgcactggaacgaaaacgtagggaccacatcaaagacagctttcacagtttgcgggactcagtcccatcactccaaggagagaaggcatcccgggcccaaatcctagacaaagccacagaatatatccagtatatgcgaaggaaaaaccacacacaccagcaagatattgacgacctcaagcggcagaatgctcttctggagcagcaagtccgtgcactggagaaggcgaggtcaagtgcccaactgcagaccaactacccctcctcagacaacagcctctacaccaacgccaagggcagcaccatctctgccttcgatgggggctcggactccagctcggagtctgagcctgaagagccccaaagcaggaagaagctccggatggaggccagctaagccactcggggcaggccagcaataaaaactgtctgtctccatcgtctcatcctcctttcagttcgttggtagagccctcagaaccatttaagagactctttatttttctctttctcccttttttttttaaatttttatttttacgtagaagctcttggacaacagctctcgttctccttccccatttccactgtatattttttaatgtattcccttcagggattccctgtccccaacaggaatttttaaaccaaaacaccccaacttggcagctttttctgtggaggacagacggccggccggacctctgagcacatagtgtcctgcccaccctaccagctcctccagccctgccgggcacatgcccgggggacgcctgccctgcccaggtggcctcctggcccgccctcacctctgatagactttgtgaatctgaactgctctactttgagaagatgaccggtttggagtaatcagaatgaaccctcctcctttttaagggttttttttttttcctttttctaaaaagctatgtatcgctcctattgaaagaccagatccttagagaagtttgtggtataaaaagaaagtggggacagattcgcagcacagagtcgctggcatgtttcactcctgcttctctcagccagctgtttaagcctgcggcgccagcctcacggagggccgtgtgacactctcgtggtatgtatgggagatggcagcagtgaagcagcagccaccagggagtggccatttggggttgggacagggagggtgttttgggtggcatagaggttttgtattgagggccagtgatgatgttttgatatttatttcctgctacttaaatttgaatctgagtgaattgtacctatttctgatgatgtcggtcttgcaaagcgacagattcataaagtaatgatgaaatctttctttcttcccgtgtgtatttctaagaaatagagccaactgattttgtatgtaaataccaagagcaatttacctggtactaaacccgcaccccagtgcggacccttcccagccctcatcccacttcctttcctactgtcctggaacctgtctccattgtgtgatccagccctggttctggctgtggtcagcagatcccagtgaagggttttgtgtgtttaggcctcatttctttgtctttttcctactccgttcctggcatttgctgatttctagtgtatactctgtagtctcagttcgtgtttgattccattccatggaaataaaaagtatgttgtacatactgccgaagaattgtcttgcaagttaaggcttccccctttactataagactataaataaaaacttattttatcctttcttggtggtggtgtcttcttacccttgttaaggccaaggtggttgatgagagacccctctggaagctgttagggcctcaatgtaagtctgagtgagaagtggaggtggcttacccggtcttgcagaaccaggagcagccataagccagagttgcttcccctttctcagctcagcctgagagagtaaatgggtggtgatggctttgttcattggatgaggcttttgaggttcaacagggatgtagccttagctgtggcaacatttctagatctagtttctgctaagcaagtgacctttgggggaattggtagcccagagctgtggttcaggttctcctggtaatgagtgcccagttcagaggtggctgttctccaggacctttcagtttctagatagttccagtttattaagaggaggcagcagagctgccaaggactggaagtcaagaaggctccaactgcaccgagttagctctactcagactgggacccaacaccagcctgaacttgtttgaccttggaagaaaaaggaattatggccagaacgcagctcagtgttggttttcctgtctggctgacaggaaatactgctgttcctagacccagagaggaagtcaagtcaaatcagttcttggatttgtcaccatctttagagtggtggagagcactgtggctcctatcaattgtatgtcaaatccgtaatatctttttttgtttaatgggagctggggcagatgggtcttgtcaatttgaaacatgatcaagcctccaaaggccatgattacattaaggaaaagaaaaatgctgggaaagcaagatcccatttataaaggcacttcttttcaagatagaggaaagaaactgcagtaaggaagaaatggaaatgagaatcagcttattgcctaaagccctcaaggttaacatgctttcctctttttcattgcccttaactatatctctttgtatatctgggcttaagtatacagttggtttgcttagtattggtgttagaagtgagctgtgggtgaagccatgttgatgcagagatggaaggcatgtgaagctggcacccagtagggagatagcaaacaggaaggggcagtcaagccagcatgaggacaggtggtgtccctgagagccagtccctggctccagtgtattggctggacaaaggattgagtttaggcttctctagatttcagtaaaccagttcagacaaggggcacagtggctaggtggctggttcacctaggaaaatccaaaccacctgattgacatggtgagcggactttggcacagggtggaggtaccactggaagcagcttcctgggcaggaacacagggcaggggagctccgcctggaaactgctcagctgaaaaggccaagtcaaagtcacagccaagcaagccccttctggtatgtgtgtctaggaagcgagtgtgagtattccctcaggataccaaagtcggaccatagcttactctctcacagtaatggtaatctctggtttattttttatattactctggacactcacttacacaaaaccagataagctgtagatttgcttggtcactgtggcaggtggcttcactgaggagtctgttaagcgtgctatttccctacctttacagttgccccaagtgcaagggtatttaaaatggcccagtttttaaagttcttgatacgctaaccccattgtaaaacatcaacaacttcttaggtaaagaatctaagctcacagagctgtcatcttagctgagacaggtttaaaaaacaagactgagtagacaataggagccagagccctgaactgggactgaagtaagcagaattctgtttctgatagtatcatgtgtgttttatgcttggcctctgaaagcagactggctgggttcacagtcctgtctctgccactcggtggctgtgttacttctcccagcctcagcatctttatctataaaatgaggataataatagcactagcctcatgagatggttatgaggcttaaatgagataatgcttataatgtgcttgacctcaggaccaagcaagcactgaggtgcctctgctgtcattatctacacaaagcatgtaaccagggctgactcagcaaggtggaaaaagccagctcccagacacctttcctaaagtgagtaagggttgacttcttggtatatcacaaatgcttcccactcctcagagatgtgccccatccttaccaggcacagtgactaaagagagcaaggtgacaccaggactggactgacaaactcttcgagactaaagcagcccctgtgggtacattaattagatctggtgtcaactcgagtgaggctctgcccattccctcccaccacgattcagtggcatctctcaggtttggacacttttggaggcccaggcagaactgctcagaagccccatgtggtgttactcaaagtgggatccttggatcatgcccagggctgcttgttaaaaggattcctgggctctaacccctctaatctaaagtgtgccgtggctcaccagtcagtttaacaagctctttcaggtggtcctcaagtcactcaggtttgactcccaacagtaatataacccggggaaccaaaaggacgctgttggggaagttaggcacagctgagctgaattagcgaagtggttctgaggtcaggatgaaggtgggggaggcgggcttgttaaatagttcaacccttagagctgccttgatgagtctacgtgctcccagcatgcctccaatgctctagggggctggctgagctacccagtttttaaacttgagaaggaagaaagctgagggctgcctacactagcccctttagaagccccaagcaggggtaatgacatggggcagcactcatttctgtagcatgcctaggctggcctctggtccccaggcaggttttataatccagccagagcaagggtctctctcaggcctggtcaccaggatgcattctcaaaagcctctgggaacatgaaactagagcattcctttcttcaaaactgtttctctagcctgaagaggaaacccaggtaggaaaaaagagtttgtcaatgtctacactgctagatagcgaatagagaatttccttcagtgtctagggtttactagggcagcggctaactcatacatccccaaagttcccttgggaagggaataaaaaatagtttctagttaacttcctcagggagaaaaccaatttggctaagccaggcttaactataggtaggactgggtgactgcaccaggcaggcctgtgcatgggttttggaggctctcctggcaaacccttatcaccctgctggtaagtgttgtccttgcttggtgtttcattggggtcggtgttgggaaggagcccagggagcttcagaatgactgccagagcgggtagggctaggggctctgagcccgcctgtctggactgccatgccagctacaacccttacctttggggtgacattgctctggcttcctgtgccattatgtgaggacaataatagcaccaagtgccattgtgaggcttaaaggagtgtgagaagcccatgaattgttcctggcatttaatactcaataaatactgtcaaatcttagatgtgtctgccatcagatgtcctgggtagtgcagccattttttagttttgttaaaatgtggaatgaagctgggcgcagaggctcacacctgtaatatcagcactttgggaagccaaggtgggcggatcacttgaggtcaggagtttgagaccagcctggtcaatgtggtgaaaccccgtctctactaaaaatacaaaaaaattagccgagcatagtgttgcatgcctgtggtcccagctactcgggagactgaggcaggagaatcgcttgaacccaggaggcagaggttgcagtgagccaagatcacgccactgcactccagcctgggtgacacagcaagactccttctcagaaaaaaaaaaatgtggagtgaataaactctccttttcgctgatgtaataagagtttagtatattaaaatccttgaaaggggaggtaaatgtatgttgaatgctaaaaggcagtaaaaatttgcatgttttctgaaagaacttgagcaagaccacaaatctgttaccttttggagaaaaaaaaggagttgaggaatgaaatatacccttgcaggctggctcagagccattaaccattaacatactggcgactttgccctgttcttcattccagtttcagtttgcatttctgcagtgccgggtggcaggcactgtgccaggtgcagatactgcaagtgcatctggtgtctgccccgtgtttcttgcccagggctggttatgacagtggtcagccatcgtttttcagccttccccttcagggaccccttgagcagaatctgcctggtgggtgaggtggagcagatgagcctcatgactgggccgaggggcccgcatgctctagctcactctggatcccatgtgcacgctcgcacacacaacacacccagcaggatgggcgtgtctagaagaatgccgagcaggtggccttggacaattcacaaccagccgagcaggtcccctcctgcgccctgtgctagatgccagctgccccagcaggcctgttgtgactgccaggccccatttaggattgttttcctttgctgtcctttgcagggtggggctcttgtatacccacagcctgctctgggcaaaattatgtagcacggtctctgctattaattttttccagtaaattaaaggctagagaagaagaagaagaaaaatcaaggatccaatattaagaaatctgagcccaaaccttctactccagtgctgaacatggtgaaggattaagcctcctatcaagaaaaacaagcctgacagcctgtagactgatagagggaggtgtgccttctctccagaaagcctacttctgcaggaacccaggagtatggaatgagccatgcaaagtctgattcaaaaaataacccaatgggcatgcacccccagtcactcatccggaatccggctggcagcctggcagcccggcagcccatggctcccatgcacagtgcttgagagcttcattgtttcctgtctgctggtgccatcaacagctctggggtggcaggggcagatcttgggctaaaggacagtggccaacagctttgggccaaaaggccacaacaagaccagccagctaagaggaggaatgtcatgtccacagcgaatacctactgcagcaaggctgtaggagactttggagaggaaggaccctgtttccaacaacttgaccatgtttcccatccagggacctctgtgcagagagtggtggtgagcaagtatttccaactgggagcccccacagagtcagtggctggtctgtgcacttgttactggactcctagcactgtgcttggcttgtggtgggtactctacaaatgctgcatgcatatgtgcgtgtgccagtggactccagccttgtgatgtaccttcatctctgtgcccttgatagggcggttccagggttgcctctgcgtgagttcaaccctcgggtatttgagcagcacgtagcctcagcccagcattgtgctggctactggggcaatctaggcagcttataaaggctgggccttgccttgaagaagcttagagatgaggttaggcatttagcacaaatgcacgtctgggctctgaatgccagaggagttcaggagatgggccctcagtgagagcggtttggcactatgggaggggcagggccaccaggtcatcgcttctcaagctcttgatgggctctccttctgtcctgcccacaagagcccagccttgggctccccatctagctgtccagacaggctgggggtggggggctgttggtgaagggagggtgggccagagccatctgctctgcacaggttgggtcacgattctattccaccactttcactggtcccttggtatccaggcacatggcagccactgctccagagagtgaggagaggggctggggggatggagcctcgcaaggagcatggacacctagcacttacgtcatcaccatcggcatctgccttacctggctacctctctgttcagcacacctgggagcagcacccttgcagcccttctcccttgacagagctgtgacattgaaccctgccctggtctggtagctgagggcccagcctccccttgcctcctttgtcccatcagcccaggccatcatgggtacagaaggtagcaatgaagtctcacactcggggtaaccaacatgcaatacttatggaaagactgtgtgatcaagggttgagagaatagtatactgaacccaaatgtacccattacatagtgtgaacaattatcaacatgcagtactcgttgaaagaaaagggatgataaaaatgcactattattgaaagtaagaaagtgtggggtctgttaaacagacaaaggagcccactgagaaagctcccaaaggccaaaactgcaacaatttgagcaacaaaataaataatgtagcattggaacataatatgaagtataaaataaacgagtccatagtgaaagaaatggttgaataaattgagaataaacatctcccatgtagaattccgggtagtttatgcaggtgctctgccttcaaacatatggagcataactccccacttctgtttgttgttttgagacagagtctcacgctgtcgcccaggttggagtgcagtggcacaatctcagctcactgcaacctctgcctcccaggttcaagcgattctcctgcctcagcttctcgagtagctgagattacaggtgtatgccaccacaccaggctaatttttgtgtttttagttgctatggggtttcatcatgttggccaggctggtctcgaactcctgacctcaagtgatccacctgcctcagcctgccaaagtgctgggattacaggcgtgagccacctccccacttcttaagcgtggactgcatatagtagctaccttctaaaggacacattcaagaaagggacaaaaagtaaccttatggaggaacctgacaaactacctcagccaggcgatgaagggtaacatcagcataaacatgatgaagcaggttgatagtatgtatccttgatgtgtgatgagaatggtactttacctctgtggccttcctccaaaaaactgttacgcatggtctgggcacggtggctcatgcctgtaatcatagcactttgggaggccaagggaggatgattgcttaagtctagcagttcaagaccagcctgggcaacatagcaagagcctgcctctaccaaaaaaaaaaaaaaaaaaatgtaattagctgcacatggtggtgtgtgcctgtggtcccacctactcaggaagctgaccaggaggattgcttgagcccaggaggttgaggctgcagtgagccatgatccactgtactctagcctgggcgacagagcaagacactgtctcttggaaaaaaaaaaaaaaacataaacccatctagtcataaggataacatcaaacaaatcccacctgagggatgttctacaaaatacctggccatacttttcaaaactgtcaaagtcatcaaaaacaaggaaagaatgagaaaccgtcaaaaccaagaggagtctaaggagacatgagacatgacagctcagtgtaatgtagtgtcctgggtgggatcttgggacagaaaaaggccattaggtaaaaactaggggaattcaaataaggtatggactttctttagtaatgtatcaaaattggttcattcattatggcaaatgccacctattagtggaagatgttaatagggaaaactgactaatgggtctgtgggaactctgtgtactatctttgcaatttttctgtcaatctcaaactattccaaaatgtttattttttaaaatgctttttttttttttttaagacagggtcttgctgtgtcatccaggctggagtacagtggcataatcatggcttactgcagcctttacttctcaggctcaagtgaccccccatcttagcctcccaagtagctgtgagcacaggtgtgtgccaccgcatccgactaatttttttttttttttttaatttttgtagagacagagtgtggctatgtcgctcaggctggtctcaaactcctgagttcaagtgatcttccagccttggcctcccaaagtgttgggattacagtcatgagccatcacacccgaactaaaaaatacattgtttttttttttttttttgagatggaatttcactcttgttgccaaggctggagtgcaagggtgcaatctcagctcaccacaacctctgcctcctgggttcaagcgattctcctacctaagcctctaagcctcccgagtagctaggattacaggtatgcaccaccatgcgcggctaattttgtatttttagtagagacggggtttctccatgttggtcaggctggtcatgaactcccaaccttaggtgatctgcctgtcttggcctcccaaagtgttgggattacaggcgtgagccaccacacccggccatgcatttttcttattgttattttgtaagcgctgtatttcctcagggggagcagagggcaagggaaagtttccattaagctgggctaatgatgagcgccctgtccctgccctgcctggttttgttcttggatgtgccagagaagcgggagggaggaacgtgaggccacctggccccagttccccagctggtggaaaacagaggcaaggagggttactgcaggaaagtgtgaggatgtgcaggaacctgttagatgtgcctgggccaggttggagaaagctggctgctgtcaggtcagctcctgggaagacggactcatcacggcctcactgagccacacggcatcacactgcactggtgtggccacacacttggtggcaagtggagacctcattagaagggtgaggggcctgccctatttgctgtcaccatccctgacctagtgacagatggcagctggtattcagggcctcagccatccagcctagaggtaaaccaagcatgtttcaccagtgccccctattccccgagacctctcaccttccttcagaggcctgcggtggtggaagggcatgggctttggaggcagcagatacgggctcgggctcaggcaccaccacttgacagctgggaaaccttgggtgatttacgtaagctctccaacctgtttctccagttgtaaaaggcaggtaatacgcctgcttcacccaccttacaaggtgagtcaaggatcaaatgagaggcggtagaacaggagggactgtcttaggggttattgtttgggcagatgaggcaagagtggtcagcactttttaagcagcaggtaaagccttggtcttggggctaattggtggtagagttttgtatatagtcacgccacatcatgttttggttaacaacagaatgcatgtacgacagtggtcccgtgagatcataatactgtatttttactgtaccttttccatgtttagattcacaaatacttaccactgtgttccagttgcctacagtatccagtacggtgacaagctgcacaggtttgtagcctaggagcaacaggctaccccatctagcctaggtgtgcggtagggtaggccatctaggtctgtgtaagtgcactccatgatgttcacacaacgacgagatcacctgactgcttttctcagggtgtatcctcgtcattaagtgacatgactgtattaggttgctttcagttgcaggtaatagtaagtccaactcacattgtctcatataactgaaaatccagaggccacgtgggcctcgggagccatgtgatcagggccatgtttctcagtctcagagcatatgtgtgtgctggcttctcacgctggtttccttctaggtagaaaaatggttataggaggcccaggccacacattctaccatcccctaataggaaagagctgcttttccccgtcatacagtgtccacgacgtctctctctttagactattttaggtcacatgcttgtgctctgaattgatcactggggcaaggacaaatcatgctgactgacttaagcctgagttactcccaacctgaacaaattactggggcaaagagagataaatgaaaattattggcttagccagtcagggcctgggcctggaggtaggagggcatcaagccctggcaaaccttttggctgccacaggtggggaggagtggcatggatgccaacagtgtccctacaggcttctatcccagtaatcactgtttgagagcaatggccatttgcctctctagcatccatttacccctttggcaacaatcctaatttgcatttggagctttgttccttccccgttcccaaaaactacgtgcttctaatgaagcctcatttccctctcaagggagaggcatgtgaccaagactttggccaattggtgcactgtattctccaagccattggactgcttcttggaaaggcacttggtttgattaaagccagtgaaacacaatgatactcgctggaaggaaggctggggtggaaccaagtgtgcctgtctgctgaacctgaccccaacaggatgtagggtctggagctattggtgctgccattttacaaccccatggagagcctgagattgaggctaatgtagaaagatggagggagggtgaggaacctaataggaccagcctaattcctggactctgcagtttgagtcaacagattgcctcttttgcttcaaaagccagtttgggtcaagttttctaccagttgcaatggtgtcttaaatcatattatactttccttcctattcaaaggcagtaaatgccaccaagcagtgcatgtgggcaactagaatgcttggtccaatccttactatttgtcacttgacactaatattacatgaaaagcatcccagtcatgaaaggtatggaagaatgctcaataataccaagaagggagagcagtgtggaactattgtttactggtattattatctcaggggtgtttcccctgattatccatgaggttctctttatgctccgctccctgtagggtctggcaggcttcccaacttatctggtgttcaaggtgggcctaagggtgaaactggagcccacctggatacagagatctgtattagttttgtgtttattgatgggagaaagtatttggggtcatccaccttgaatgctacataaatgtcttctactcaaggagtcacataataaatctctccaaaggtgcggtggctcacacccgtaatctcagcactttgggaggctgaggcaggaagattgcttgagcccaggagctcgagaccagcttgggcaacgtggtgaaaccccatttctataaaaaatacaaaaattagctagctgtggtggtgtgcacctgtggtcctagctacttgggaggctaaggcaggaagatcttctgagcccaggaggtcgaggctgcagtgagccatgattgtgccactgcactccagcctgggtgcatttgagcaagatcctatctcaaatgagtgaatagacaaatctctaggactcaccttgagggctgtcaggaaaccctctggaaaaggatgtctcatggatatgccagtgtaaactctcctgaaataaccctttctcttctctacccagactaactttacctaccctttggggcccaactcagatccctccttcttggtaaaaagccagttcagactgaagcaatcccttctattaaccacattaattattactgcaattaatctcacaataccttgaggctccgagtgctgagaggattttgccttttgttatagtgatggaaaggatgcatttcaatatgttgccttgcagtgcaaacctttgttaacagggcaaaaatagcacagggggcaggaattacattcctggatgtgcatttggcttatttacatggatttgggtgccctctaaggacaccatcttctctcccctccaagagggtcaggccacaggacatccatgttcttggcctcccatgggagagggtctctcgccagaggaagggaaagccaagtggccacagagttccagcctgtccctgtgacagcccctgcctctggccagacatccacccacccttgctaagtcagcctgctctggggctactaggcccagtccttgctgtctgtcggagacagaccatgaagtgcagtgtgtggagggctgggacatagcataccgaattaccccagggagcttggaaaacatctcttcccactctctgttaggcccacggcttcctctactggaggagacggcatgtgaggatggaactcggtcattcctctgtcaccaccgatgtgaacagtctggaatcctgcacacaggagactgacgatccctgagcaacctttagtagctcctaccattgggcattttcttggtacagatcacaaataagagacatcatagaaaatgttattcttttattatttcaaggaggtaatacatagcccaatatggcaaagcaaaagggaattagaggcagcaaatggccaggtttttctaagcgcctcatgctgcatctctgagctcctgtctgcccgcagcccacagctgcttacatgaaggccaggtcagtagacagatggcccaacttgatactccactgactgagaaagggctcaatgtgcagcacagcagaggcactgccaggacccagcacgctgggcggcaccccacgctgccaccaccagctacagaggctagtgccttagtagcagccagtgtgtctagcacttgattttattcctgtgagcctagagtgggcaggacgtgaataaatcctgagtcataagttaaggtgaaagacttagtagtgttaatactcttggtgagaaaagacaacacagtcttggaggagagtgggcttggagtctggtggaagaaagatagaaacccccagaagggcctcggcctgcaggcactgccttgaggccatcagagggggttttcacggtacatgatagggaggagtgaggcaggtgggcactggagggctgtttcctctggcacagttgaactagagggtcactttccactcataattggtttcctaggtctaagtcaccacacctggggctgaagcaagtcttgcctgtgcaccaagcgtggccttggaccctggagagatgcaaggctcagttctccagtgttgaagtggaaggactcccaactgaaggagatctttctctccccacctccagctcttttcccttacaaatgaccagggtgcaagtcgagaggcagaggcacctcctggtgcaactccaccacagtcttacagagaactcatcttggtgggacccaaagcccagccttggcatgaagcagacttattccacccatcggagggcacccagtctggtgactgaatggtggcgtgcaagtgggagtcagcagtggctctggatgccgtaatactcagatgccattcatctctgtgtgatcgtcctggctggagagctggtgaggagggactgcttcctcctggcatgcactgttcaccaaccacaccacgtgggctgatagatttttggtttgacaggtgtggaaagaatttttaaaaccagccactgtgttctccaaacccagagccattggttttgtttgacaagaaagtaccaagagaaccacagctccactgaggctaaggcttgtgtagcacagaatgcagtatgtattgaaacgtataaaccttgtctgactggggagatgggtgagcaaagagctgccgggacccaggtcctctagtcggttgcaggctctgccgatgtctcatccttaagctcctcaaaacctgggactggcttctgtagaaagtatgtagtggcctggatcaccttgtctggtccaatgttgtacactgggtgagtgggctgctgcaaagagaagaaaaggtgccagttaatcaccccggtggtccttgaaaacataacacatcctttgctccatgaaaggcacttctaagaatttagtataaggaatcagagatacacacaaagcccaaaggttcaaaaatggtgtatttgctaaaactatctagtacatgggacacaggttaatatacagccattataaacacgcatttaaatatttaacgatacaggcaaatacttacaacatattatgtgagaaaacagtatgtacaatactatctcaaactgtttttttttttttttttttttttttgagagagtcttgctctgttgcccaggctggagtgcattgacacgatcttagctcactgcaacctctgcctcctgtgttcaagcaattctcctgcctcagcctcctgagtagctgggattacaggtgtgagccaccacgcctgggtaatttttgtattttttttttttttttttgagacggagtctctcgctctgtcgcccaggctggagtgcagtggcgggatctcggctcactgcaagctccgcctcccgggttcacgccattctcctgcctcagcctcccaagtagctgggactacaggcgcccgccactacgcccggctaattttttgtatttttagtagagacggggtttcaccgttttagccgggatggtctcgatctcctgacctcgtgatccgcccgcctcggcctcccaaagtgctgggattatttttgtatttttagtagagacagggtttcaccatgttggtccggctggtctcgaactcctgacctcaggtgatccacccgcctcggcctcccaaagtgctggggttacaggtgtgagccaccacacctggtctcaaactttttaaaaagtgtatttgtacctgtgatgtatataaatagcaaaaattgtacccataccaaaatattaatagtgatatgattgtttttcattttcttttttatattttatgtatcccaattattaaaacaataaacatgtatttacatttataatcaagaaaaagggggccggacgcggtggctcatgcctgtaatcccagcattttgggaggccgaggtggatggatcacccgaggtcaggagttcaagaccagcctggccaagatggtgaaaccccgtctctacaaaaatacaaaaattagccgagcatgatggtgagtgtctgtaatcccagctagttgggaggctgaagcaggagaattgcttgaacccgggaggcggaggttgcagtgagccaagattgtgccactgcactctaacctgggcaacagcgagactctgtctcaaaaaaaaaaaaaaaagaaaaaaggaccacaaccctaatatgtagtaaggctgtcagatcatatttaaatatataaacaaaatttaaatatgaaatttaaattaaatagatgttattctagtacatcacagaaacccaaaagaaactttagatttgacacggcataatcctaggccaatattcaggattctcccactgtgggataatgaagaaggggacacaactgcaggagagattttaaaaattttgagagaatactaggagcaacctcatgctgaaacatacaaaaattcagataaaacaataatttttaaaaaccaggaaaactgccaaaattgacttaaggaatttttaaaggcctacatgaagaaattagtaacaacaattgcttattctgccacccccacataccttaaaagatactagacctagatggtttctcaggcaagtagtatcaaacctacaaagaaacagataatctctgatctatacaaaccttttaaggactgaaaaaaaaaaaggggctagtgcgggggccaggtacaatggctcacacctataatcccagcactttgggtggctgaggtaggatagcttgaggccaagagttcaagaccagactaggcaacatagcaaaaccctgtctctacaaaaaatttaaaaattagcaggttctggtggtgtgcacctgtagtccctgctacttgggaggctaaggcaggaggatagcttgagcccaggagttccaggctgcagtgagctatgatcacagcactgtactccagcatgagtgacagagtgagatcatgtctctgaaaaagaaaagaaaaagaaaaaaggtaagaggtgcaggaagctacccatttaattttatgaggctatgatattatcctgaaacactggaaaaggacaatacaataaaattttagatcaatctttcttatgaatgtacatgcaaaaaaatcctaaataaaagtactaggcaaacatactggcaaactgaatccagcagtatactgaacaaaacacacagacacagacacactgcctctactatgaccaagaagggcttatcctgggaatataaggcttaacatcagaatattaatgaaacatatcatattaaagaagaaaaatcagatgcggagaaagcattcaataaaatttaacactaccttatgactgaaactaacaaaaacaacctagcaaatcaggaataaaagtgaatatcactaacttgatataatgtaactatcacaaccttacagtaaacatcatgcttaatgatcaggttataaaaagccttcccattataatcaggagcaagagacgaatgccctctactacctttagtcagcactatgtggggatcttacccaacaatacaaggcaagaaaaataaaatggaaactaacttagacaaacttaaaactattaaagagttcaacaaggtggctggacacaagatttataaatattattagcatttctatacactagtaacaaacagttacaaaactgaaaataagaaaagattccagtcacaagagacatgaaaactgtaaattagacataactctaaccgaaaaaaaaaaaatgctagtcctttatggaaaaaattataaaaaaaacactgaaagacattaaagaaaagaaaaattatgttcataaatggaagcctaaatattgaaaagaagtcagttctctttgtactcctgggaagacaggaagaaaaaaaaaaaagttggttctctcctattaatctaaaatgtagtgcaattccaataaaaatcccattagaacttgacaggctgatcctacaattcacaggaaaaagcaaaaggcaaagaatagccaaggcaattttgaagaaaaacaacaaggcagacaggacttgcctacctgttttcagacttgcttaaaagagtgcagataggcaaacagaccaaaggaacaaaataagagagtccagaaacagggccccttcatgtatggaaacttgagggtgtggtacacatgagatacacatcagcaggaaaggttgtagacttcagtaaatggtgctggtcaattggttatccatatggaaaaaagataacattatatccaagcctcaccatacacagaaaccaaatccaagagaattaaaaatctagattaaaaaagcaagctttagactatttagaagaagttacacttaatgacttgctgcattgccttgttcattcccttcatagcacgcatcacaatttgtgatgtatttgtttaatgtgtgcctccttttgtctgcttccctcaaaaaatggtagagattccttaagttaatcctcacctaccctcccccaaaaacaaacccctgaatgacagaaaagacaaatagatttgaccacttcaaaattaaaatattaaaatatttttgtggggaaggggtgctgggggcagggtctcactctatctcccagactggagcaaacagagctcactgcagccttgactacctgggctcaagcgattctcccacctcagcctcccaaagtgctaggtttacaggtgcgaaccaccatatctggcctaaaatcttctatttaacaaaaaaacaccaaaaacaaaatgctatggtttggatgtggtttatttgtccccacaaaaattaatgttgaaatctgatccccaagatggctatgttgagaggtggggtttgtggaatgtgtttgggtttgaggggtggatccctcaggagtgccttggtgctgttcttgcagtagtgcgtgagctctcactcttgctctggggagtctggattagtccttgagggaatggattagttcctgcaagggtaggctgttataaagccaggatgctctcaggctctcctctgtttgcatgggttggcttcccctttgatttccacatgttataatgcagcacaacccttgccagaagccagagccatgcccttgaatttctcagtctatagaaccatgagctaaataaacctcttgtctttatacattacctagtctcaggtattctcttatagcaatgcaaatcagagtcacaaaatgaaaagacaagtcacaagctggaagatattcactacacacatgtaactgatagaagattagtattaaaaatatacagagaactacaaatacttaagggaaaacaactgaagttacccatcagtaagaaaatgagcacagaatatgaactggcagacaattcgcagaagacaacacaaatggccaacaaacatttgaaaatattctcaacctcaccagtaatcaggaaaacacaaaatcaaacaaataccacttcacacccatcaaattggcaaaaaggaaaaggtctgactatggatcgattcatcttacacaaccacactggggagcagttacagaggtatctatcaaagatgacaatatgtgtccccttcaacccagcaggtcccctcctggagacattctaacatgtgaacccaatgagacagataccacaacgttcactgcaacactgtaatagcaaaaaattgataactagcaggagaacagagaaacacactggggtacatttatataagggagtatcatataatagttaaaatgaataaactggagcaacacatgtgaacacagataaacctcaaaaatacaatggcaagtggaaaaagcaatgcagaatgactggtacagtaggtaccattacaaaaagtttgaaaacatgcaagcaactgttatattgcttataaaaaactatatattgcttatagatacatatgtatgtagcaatagcacaaaaacatccacaggcatgatacatgtcaaatttgggacagggttacctctggagaaggagggaggaaaaaaaactggaagagggctacataagaggcaaatagggggaaataattagggcctggaaaagctgggtggtggtttttctgattaagaatgaggttgagcatcttttcaactatctattggccatttgtgtttcttccatttgaaatgtttcccaattaaaagaaacaaagatggggccaggcgtggtggctcacacatgtaatcctggcaccttgggaggctgaggcaggcatatcacttgaggccaggagtttgagaccagcctggccaacatggggaaaccctgtctctactaaaaatacaaaaattagctgggtgtggtggtgcatgcctgtaatcccagctactcaggaggctgaggcacgagaattgcttgaacctgggaggtggaggttgcagtgagccaatatcatgccactgtactccagcctgggtgacagagtgagactttgtctcacaaaaaaaaattaaaaattaaaaaaaaaatttttttaaacaaaaaaggaaggttacaatgacacagatgagaaaataaggcagtgacctagatggtagcagcaggccatgtttacactggtggaagtagggcttagtaagagtagggaactgcacacaaaaattcatgacagtctgcatgggccctgtgatttgatcactggggacagtctccattggattcatgtccaggctcacgtctaggctcagagcacctccaggttgtcctcagctggctgcagcagtgagcatcctgccctcatagggctattgttttttcaggaaagcagacaaacacacattaaacaacacaccaccaactgagtaaagtactacaaagaatatgaacaaggcactgaggcagagcattctggggatctcattctctgaagagatggcatctaagctgagcctctgggagagacgcggcaggctgtacagccagtgccgcatggctgcagtgctatcacgagcctgctgggactcacagcctcagagtgacacgtaactgtggcctcctctaggggaagctaataccagcagtgggctaggtcctcagccctgggataaaggcacaacagctctttgacagatcagaccgcccatctggaaccctgagcttgcccagaggtgcgtctcctctgtggtcacatcctcactaacggctgcacagctcgaagggcagagggaccacaagcttccgcctgtccacacaggaaatgcagagccagttctgcttacttggaaagccttctgtccgcgaggtccctgtggagaaggggtgtgaagccctgcacccgtcttaccagagcgttttcgggcacacccaggaccacatcatgcaacatggctccgctgccgaagtgctgggctatggacaggccgctcaggcagtagcaggtgtggtagaaatcacgcgacctgtaaggacaggcagctctgagcaggcgctcctctgctccgcacacatctacaaatgtagccacaccaattcagagaccactggtgcaatcacacgtccccccccatcctccatgtggctagaggaggcatggttttcccagcagtgttatttaaagccccactggctgagcacagtggctcacacccataatcccagcaagcaggaggctgaggcaagagaacggtttgaggccaggagttcaaaaccaacttgggcaacatgggagaccccgtctctacaaaaaattaaaaattagctaggtgtggtggccgatgcctgtaattccagttacttgggaggctgaagcaggaggatcactcgagcccaagaggtgaaggctgcagtgagtcatgattgtgacactgcactccagcctgggtgacagagtgagaccctgtctcaaaaaagtaaaatacaataaaataaaagccccatcctccagccctgcccagcagtgggaactgtattttttttcttttctttctttttttaccttaaactattaaaggaaactgtaattttaaagtcagtctctccagctgtcttctggaaagggctctccaggggcagtactaatgataaattgatacacttctctagaaaaatacctaaatatctagaaatgggccacatccttcctgatacattgtgggaccaggccttcccctggatgccaagagcagcaggacgtgtgctgggatgggggaagacagagggtgggtaacaaaggtgagaggacttattttatttccctttttctaacacataagccatctcagatttgagcttaatcatttaatccactctataatagttgtcatgattacagtctctgtttacaacactgaggggttttaaaatcctgtatcctattctatttagatcagtttttttttgttttttttaaaaaaaagaagagttatctacccagcaatctgtttccctgtctgggggagggggttgcatgcaggctgggggacaagacgggcagctggaggtgccaagatcaatggcctcaaggggtgctcccaactgggtgctttttcccatacaacctagcgctatgcaggtgctgaaggtgacacctctgctcttgagatctggctctgagtaggcctgaggtgcacgcccctctgctctctcctcccctctcccttccctccccagagagaaaacactcacttgccaggtttatccagaagcccccccgcagggcactggcagcacatcaggatgtactcctgcagggcctgctgatggaacatccagtggctcatgctaagggcagggtcacctgttgaagggcaaagggtcagtaagggcccggcagatccagccaagtatcaatgacctaattccactttctcacctgggggaatagtcaaggtttcctgctccccttcctcttccattcattcttggtacaactgctatcttccccatgtcctacgcacagcatgtcccttctcctgaactttgacatgtgtcaaagagcagcaattcaaagtggcactttcactttcttgaaatgcaccctgttaacgtggatggtgatcctcaaccacatctctggcaggcagtgaaccagcctagctgtttagcttaccttcccagactgacctcggtagctgctcccaacttggtccataactctaccctggacttcaagagacattccctctagcatatctctataacttgttaaccagactgattagctcagagaactcttaatgggtaataaagtctgtttcttctacttttctaagcctaaatttaattgatctccaaagggaattctctaacttgtctctcagctcaaagaatttacctaagaaacattactagtaactgccctcctgcatcatatgataccctagcaaaaactgggtattctggtaatactactaaggtactgacaagcaactggacttcttcactctgaagtccaatcactatggtcaaagaattctgtgggccacacagttatcaagtgggaaggagggacaaatcacggacaggtgtgcagaaacatctgcatagaaatcgattaaaaatatatatacatataggatgtacactaagtccttggtcaattttatattttgatacctgggctaaaagatgcctgacaataaatcatttttaaaaaaaagatgcccaacaattggtaaatggcacctgaaagctaattgttctttcttccagtctttttggttctatgcgtttttctacctagttattataactgtgtagcttatgtttttcacttataccactataggcataaattttctattctattacataatctgcatagccatcactgtgaatagccatatagtatttcattaagtggacatataaggtaactgtatcataaaaagaactgagctaaaaatcttatatatatgtcagtatataaattcctatggtgggccaggcacgatggcttatgcctgtaatcccagcactttgggaggctgaggggggttgatcacgaggtcaggagatcgagaccatcccggctaacacggtgaaaccctgtctctactaaaaatacaaaaaaattagccggacatggtggtgggcgcctgtagtcccagctactcaggaggctgaggcaggagaatggcgtgaacccaggaggcggagtttgcagtgagctgagatcacaccactgcactccagcctgggcgacacagcgagactccatctcaaaaaaaaaaaaaaattcctatggtgaaaattataaaagtttatggtatcaataacctttcccattttggagaaaatagcaaaaaagaaaaacgggggaaaagatttctaaaaataaaaatgaaaagtttatgatacagtctataaagagattgaagcaaaatattaaactgttgaatatttcctttttttttttcttttttgagacagagtctcactctgttgcccaggttggagggcaatggcacgatctcggctcactgcaacctccgcctcccgggttcaagcgattgtcctgcctcagcctcccgagtagctgggattacaggcatgcaccaccatgcctggctaattcttgtatttttagtagagacatggtttcactatgttggtcaggctgctctctaactcctgacctcaggtgacccaccctcttttggcctcccaaagtactgggattacaggcatgggccaccgcacccagcctaaattgttgaatatttcaaacagacaataagaatttattaaatttctttaaaaagagacacagaggaaaagggtttccaaggttgagcactaggtgagggacagtggccaggtgacatttagaggccagggacaaaagcttctcgtcttcaaccctgagtcgcactcagccctgaaacacccattaagagacacaggaaactaagtccgacctaaggagaagcatccaatctcccatctcaggctggctgcaggccacatgctttgatacacttgcactattttaattcccttcctttcttttcctcacctgtaagcacagtgaactttgttgtagaagatacatacatatatgatgggacttcactctatcttcttttacttatttccaaggttgtttccagttccttgccattatgaggaatgctggactaaatctttgtcaatattatgtatgcttaagattattttcttcaaatagactgaccacggtggaattattcggttaaagggaataaacattgttaaggcttttaatagatactgataaactgctttaagaatttatagactactctcagcacaatccctgtggagtagccctgctctgcaggagctgtcaaaaataaatatataaataaactaaaaataaaaacaaagactttatatagctaccagcaaaatttaaaattttgctataccacctccagcattagcacctttttgttgttgttgttgagatgctatcttgctctgtcgcccaggctggagtgcagtggtgtgatctcagctcactgcaacctctgcctcccaggttcaagtcattctcctgtctcagcctcctgagtaccttggattacaggtacaagcccccacgcctggctaatttttgcatttttagtagagacagggtttcactatgttgatcaagccagtctcgaactcctaaaatgatctgcccaactcggcttcccaaagtgctaggattacaggcgtgagccaccacgcccggccagctttagttactttttaaaagttatcagcaattaaaatggtaaaaagaaatagtacctgatagtttattttgatttgcatgcctctgattactaattagggtgaaatttttccataacttgtgtttaatatttgcatttccttatgatggtgtctgtttggcctaatcttctgagatccaatagccaattttattaatctagctttttcttatacttgccccttgtctacatcatatgctgcatctattttctcctttttgctcctctgttttggttatgtgagtttaaaactttttaaaatttttaaaatttaattaatgtaaaacatatatatgttttatacttaatattgtaatcatactattgatttttccttcacgatttcctttttaagaaaatatttaatgtgtatggggatttttggggggatgagtgatgaaaatgttctaaaattgtcatgatggttcgcaactgaataggtaagttgtgtggtatgggaattatatctcaacaaagctattatttaaaaaagcatatttattaaactttaggaaactgcattacacatctgtacaaaatgtacatatatttcatatcctataacaaataaaagactattattataaggtaaatgataacctgtggctaaaattagagtctgaaaagaaaacgctatgtttattatataaaaaactatagactgtttcagtgacttcctatattattaaagcatagaagctcaaagttcaaaagctctacaaggagcttccagatatcctgaatttggacaccagcacacataatcacaacaagatgaaagcagatacgattatagggtgataactgcacactggaatccaccttttaaatcctttctacctcttcctgaaattataggtcgccattctaatctcattttgcatttcaaaggttccttttatctaaaaaaatcaaaagtctttccacaccataactgataggtgcagccatctgtagctcaatttcacaggtaggcaagaaaattccagggtatgtccaaaagaacatataagaaaccagtaactaccaagccaagtggaaactcacaggcctgctgctttcttattgctccacaaaacaaaaaaacaaagtaactcactgatttagtcagcacttgagatttcttaagccttttttttttttttttagacggagtcctgccctgttacccaggctggagtgcaacggcgcgatctcagctcactgcaacctccgcctccggggttcaagggattctcctgcctcagcctcctgagtagctgggattacaggcaacgtggcaccatgcctggctaattttttgtatctttagtagagatggggtttcaccatgttggccaggctggtcttgaactcctgagctcatgatccacccacctcggcctcccaaaatgctgggattacaggcttttgtgtttttttgagacaaagtcttgctctgtcgctcaggctggagttgcagtggcactctctgcctgcaacctctgcctcccagactcaagtgatccttctacctcagcctcctgagtagctaggactacaggcatgtgccaccatgtctggttaactgtttttaattttttgtagagacaagctctcactatattgcccaggctggtcttgaactcctgagctcaagaggtcctcctgctttggcctcccaaagtgctgggattatggtcatgaaccaccatgtccagcattttaaggtactaatagtaattccttcttctactcaaatactgtcatttacacatagaaggtagtcaatggcatggagccactgatggtcacttgctgggtcagggcatggcctagacccacgtgctgcactatgtagagcattctttttgctttttagttagcaatatgatcaatgccttttaaaaaatgtatttgtacatttaccaaaataaaattagtaatgcacatggtttttttttttttaaaggcacagtataatacagaaggatagaaaatctaaaaagttggccaggtatggtggctcacgcctgtaatctcagcactttgtgtggccaaggaaggtggatcacttgaggccaggagtttgagaccagccaggccaacatagtcatatcctgtctctactaaaaatagaaaacattggctgggtgtggtggtacacgcctgtaatcccagctacacaggaggctgaggcaagaaaatcaattgaaccgaggaggctacagtgagccgagattgcaccactgcactccagcctcagcaacagagtgagactctgtctcaaaaaaaaaaaaaaaaaaaaaaaaaaatctaaaaagtctccctccttctgtcttctgtctgcttctcttctcccaaaggtacccattgttcaaggggttttgtgtagggttccaggaaaagctgtgtacatctcgggctgtgtgcccaggcactgctccaggccccgcccccttacacttcatgttgtatcttgcagagctttctatatcagcccatggtatgcagctactgtttggagagatttttattatttaacccttaaccttttgataggcacttaggctgctattgaaactccacttcaatatacatcctttgctaatatccctgcaggtaaattcctgacagtgcacttgctgtgttcaaagggtaagtgcccttataatttaaatggatgtctccaaactgccctccaaaaaatgacttaacctatttacatccccactatcaaattacctgttttctcacactctccccaacatagggtatcaagttttttaatctctgccaatccaataataaaaacaaatagtgccactcttttgattagcatttcttttactacaagtgagctaaacaatttttcgttggattaatggccacctactgtggttatgagcagggcagggttcagatgccagctagtctggattcacacaaccacatactaacccttgtgagtgccaatcaggtattataaagcaatcacttaacctcactgtagtttgtttcctcatctgtaaacaatggtacctatttcatagggttgttttgagaattaaatgagaaaacatatgtgaaatgctcagtacagcccctggcatacagtgagggcttgggaagactccgctaccagtagtagtggcagttgtagtagaaaaagtaagaaggacagttctttcactgggacctctttcttcagatcctttgcctgtttttcagttgggttgtccatccatttcttactggtttgtatgattttttttcaaattaaagaaattagccattcatcacttgttataaatatttttcgcacctttttgcttgttttgtttgtagaatttccctgtttctgtaaaataacttttgttgtctttttttatgcaagaaatacctattaactatagaaagattagaaaatacaaacagaagcaaacatcacctgtaacttcacatcctagatactttctatgaattttttgtagtcaactcttcactaaaaatgggattccacacatattgctttgatatgatcacaatatattgtgactatctttctacactgcatccccttttgactcccaaagtcagtattttgccctcctttcaacacacttcccttctttacagactcctgtctgttccaagttcaagagatgccctgtgtctgagaagacaacacaggccttctcccagccaatgaaaaaagctggaagcaccaagattcataggcacccttttccatagacaaagctttgaatgccactaagccccctagaacatgtgctacaagaaacaattaaccagcagcccccctggaagactttgacaggtggtgctcctgttatagctcattccacatttccctgggattgcagaattactgagtcttatccatgccagggacaggtttgtaaaagactgaccattttaccaggggcttgacctcaccagttccaaataaagagatcaccatgaccccaagtttttttctatcttagaaatgttgggccaggcacggtggctcacgcctgtaatcccagcactttgggaggccaaggcggacagatcacctgaggtcaggagttcgagaccagcctgaccaacatggagaaaccctgtctctactaaaaatacaaaattggctgggcgtggtggtgcatgcctataatcccagctatttaggaggctaaggcaggagaattacttgaacccagggggcagaggttgcagtgatccattgcactccggcctgggcaacaagagtgaaactccgtctcaaaaaaaaataatactaaaataaaaaatgtttgacttggggaattcctgacttccctactggtggtcaaggcagagactgtgcaggctccaaagtcagtgcacttgctgacagtgcacttgctgtgttccaagggtaagtgccttatatgccttaatactgacacctaaagcccagtgggcccaggccgggaaaatgggacagaggctctgcttactttaattcagtgtcagaaatggtcacaactcaacaactcaaaggaaattaagaaactaaataatgaggctcagggccgggtgcggtggctcacgcctataatcccagcactttgggaggccgaagtgggcggatcacctgaggtaaggagttcaagaacagcctgtccaacatggtgaaaccctgtctctactaaaaatacaaaaattagccaggtgtggtggcacgcgcctgtagtcccagctactcaggaggctgaggcaggagaattgcttgaacctgggaggtggaggctgcagtgagccaagatcgtgccactgcactccagcctgggagacagagcacgactccatctcgggggcggcggggaggggggaagacggggggtggggggctcagaaacaggaaaaaaaagtatggggaggggcagaaaagaatctcatcttttacatttgagcagttacattatccaactaagtccgaagaacagcttctctttggacccagggatctcattccaaaaacagatcagcaaccagcagggccccatgacttcctctctcccacaggtctactcagagacacctgctctcacatcaagtacaccagaaagatggtgcaggagttagcaggcagactgaggtttcaagagatagagagagaatgttcccagactttttgctcactaactacttcggttttgcgttcccatttgagaccccacagaaacgaacgtggatttctctactccaatggtgcaggtggaacaaactcccatttaggcttattcaatgaatgtaaaataaaacatttctaatagtgacaactctgcagccagtcagacacggcgagtctcttctccatggtgtaggggcaacccacccctacaacccacccctacacatgggttctggttctctacccctttacgcagttgcctttcctgttgctgttgcaacagtgactgttgcaacactgagggttttcagctctgccctgcacccagaggaggtggcaatcaccacagagcccaggacaggagtgggctgctccttccagataacgcagaagcagcgcccacttcctccccgctccccgtagcaatttcaaggaagctcattctgtcgcagccaatttgaagaagcaaagaatgacactaaaccaatgaaactaaatcttactctgcattcgcatgccccacggcatgaggttccacactgggcactcaaaatccaggatagacagagctcatttcaacccctctaaaaaagcacgctgggcttccagactttgtgagtagtggagggaaatcatccagccccaagtgaacagctccccaggctcaccttgggcgtgcagtgcgcggtggagcaggggcaggagccccgcctgccagaaggagtagcagccatccaccagcttgttgcagcggccctgaaatcctccttcaaatcgcatctgccggcttgtcacccattgctgaggagacacagatgggaaaggcagttgtaggctaaaagagacaaaatccagcccgacagaatctccaggagtcaatctgtgggatggagggtttcccatcttgtggcttcttggcactctagttttggtgctctggttttctttccttccctccccacactgccatagacacagagtgaagcatttaagccaacgctgtagaggcatccagcactgatctctgctcaatgcctggcagacaactaccttttcctgggttccaaagcagtgccagtgctgagaagataaagaggccaagctggtttgtaaggagaccttcaaagtctcttaataaacatggcttaagttggaaattgaaggcaagactaccagtagctcatttctcattacttccctgctccggggagtttattaaaagcagataaatggaatttggtactacatttcttttttttttttttttttttttttttttttttgagacggagtctcgctctgtcgcccaggccggactgcggactgcagtggcgcaatctcggctcactgcaagctccgcttcccgggttcacgccattctcctgcctcagcctcccgagtagctgggaccacaggcgcccgccaccgcgcccggctaattttttgtatttttagtagagacggggtttcaccttgttagccaggatggtctcgatctcctgacctcatgatccacccgcctcggcctcccaaagtgctgggattacaggcgtgagccaccgtgcccggcctggtactacatttcatcagatgatctcaaactgctcctgacttttacttggcacctggggaaatttacccaaggtctcttagcaagtcactagcaggcctgaaagcagaagccattcattctaattaccaaatgacaactctgcccagtctgtggctgatataagaaaatcttttactttgaagctgtaaaataggtcttggtcttgatgtcactcagcggtcacacacgataccaccattccttgcttatctacaagttttctaaacacactctactacaaagatcaagatagtcatgggtttggtccctcagaatgagcagaaccaactggctgagcagatatgacatttccatttccctccctagaccacctaggccgttccagccacggacttacagagctgcctcactcaactgaaagggtacaggggagggtacttcctgtttctagagtcttactaggtaaaggtcctgaaaggagccactgggacccttgatggaagtgggggccagccctcccctaaaagctgttgtttagattattccctcttcaaggcaacacctgcccatagagagtcacagtcacaaatgcttaaaagagacagaaaacactgtactgcaggttcaggtactaatatatcctcggttgatcttaaatgaaccagggcttccagcatgtaatggaagtgggctaagcattactcaggcagagagaaagcaggcgctgcagtgggagtcggttcctcatttctacttaccgcagggcttaagtgtttttaagcagactaatttactttttccagtgcctaagcccatggatttgttctgtttccttgggctataggaattcatacttcagatatgggtcctacttctcccaaagcaaatggaagggagtagtctggattagagcaggggtccctaacccccagaccatgccaggctgcacagcaggacatgagtggtgggtgagccagtgaagcttaatctgtatttacagctgctcctcactgctcccattactgcctgagctccacttcctgacagatcagcagcagcattagattctcataggagcgcaaaccctactgtgaaccgtgtatgccaggcttctaggttgcacgctctacatgagagtctaatgcctgatgatctgtcactgtctcccatcacccccaaatgggactgtctagttgaaagaaaacaagctcagggctctcactgattctacattatggtgagttgtataattatttcattatatattacagtgtaataatagaaataaagtacacaataaatgtaatgtacttgaatcatcctgaagccatcaccccccgtcccacccccaaccccaggtccacggaaaaattatctcccacaaaactggtcccttgtgccaaaaagattattactgtgggttagagggacactaacatttattaagtacctactatgtgccaggctgtttataaatgttctctcctttaaccttaaaaaaataaggattgttatccctaccttataaaagaaaaaaatatcaagctaaaagagattagacaatttgcccaaggactcatgtctcaaatgtagtagggacagggttcaaatctagaacactgtctttataactgaggcactccctaatcacattccttatctctgcctgggagatgggacttttttgtttcatgccttattggtgttcagattttaaaacatctgagaaactcttaagttcagcatacaaagttggctgtttcagcatgagccttcaagccttcatgaatctttaaaaagactacaccgggggaggctttctgaaggtggaggcaagacactgctggttacatgtctacagggtacaacagaaactctccaggaagctcacgatgggccgcataacgggaggctggcatctgaactcagggagaggaggtgcatgtcagttgcagctggtttgctttgacgtcatggtcagggggtacatgctccccaaatgacatgacggggaatgccttctccctggtggccgtggaggtgtgtgtgtttgtgcacccactgatcatttaactacaatctagtgactccctgaagctgactgctttctgagtttcttctgaatactggccaggagcgtggggtccagacataaatgttgggctgccttctcaatgcaattagccagctctgcctaaacaactcatttaaatgtaggtactaaatgtttacacagtgcagcaggtaataaaagtttggtttcgaaatgctgcaaagctcttcttgtaacttttcctcttaggaggttctttctataacacacgataacctctaattctacgaaactgaagtataaggaaggtactctgctcacaccagatgtctgcagcacacagtctatgtagtctacacactatgtaaaaagctctaagcaggaagacagaaaggcagaagggggagccaagacagagcagctgctcactccttcctctgtgttggaacagagctaactctcttagcccttcccatagccaaactctcctgaagcctgcatgtctgagtacaatcacatcaccatgacctggggcctgagagggggatggctcaaaagatacttactaataagctcttcaagttcaaggaacgttccctcttgaggattaccagcgcggccaggccacagaaggtatagccaccatgggcttccatccctggtaccccgccaatgccaccttcccagttctgacacctaagaagagattgagaaaagcagaatgagtggccagtgagtggacgtacacaagaccaggaccatcctaggtggcagagaaaaagttcactcagattaaggtgtgaaccatcacaactatgaatgaaaagatgccaactaattaacttttggaaatgtcttttcaaaaaaaaaaaaaaaaaaaagctgggcctggtggcacccatgtgtaatcccagctgctcaggagactaaggcaagaagatcacttgaggcgaggagttcgaggctgcagtgagctatgatcacaccattgtgctccagcccgggtgaaagagtgagactaggtctccaaaaaatgtaagtataataaaaactgtaaaatgttaaaaacccagacacttagaaacagcctacttgtgtaagaaacataataattcaaattattactctttgggaaaaagttataaaatcatacatatacatatatgtacatatatacacatatatatacatatatatatatacacacatatatatacatatatatacatatatatatagtgataaccatcaagttaaaataaaattaaagagtgattgttgattctagtgatcttttatttttgaaacagggtcttaactctgttacctaggttgactgcagatcatggctcactgcagcctcaacctcctggactcaggcaatcctcccacctcagcctcctgagtagctgggactatgggcgtgccccaccatacccggaccattttttgtattttttgtagagatggggcattgccatgttacccaggctggtcttaaatttctggcctcaaggaatcctcccaccccagcatcccaaagcgttgggatgacaggcatgggccaccgcacttggcctctggtgatctttgagtacaggtctactagtaatatttttcctttttgtttttctatttgttcaaaaagtttttataatgaacctgtatactattaaaaaataaacgttatttttaaaaattataattaggccaggtggtgatggcttcttaaacagcctgcagaaccatgagccaaataaacctcttttctttctaagttacccagcctcaggtattcctttatactgacacaaaatggactaacacaagaaggacaagaaataactgacttagtagaatagagaaacctttcctacccaaaggatagggatgggagaggggcaacaaaaagcaaggtgatctgctccaataaaaggctccaggattagagatacagggaacctccacaaagtggaatgcgtctgaaccaagtttgttggttgcaaacttatataagaatcagacctttaagtcccctactcaaatccagcagaagatgggaagtttcagaggtttaatcaaaaggatctgagttccagaatatccaacaagctaagaggaggagggagcactgtaccaaatgtgattacgtgagagtcagtaatctcaacacaatacccccagccccattcctctgtgtatttcacacaaggctgccagtttcataccccaagcaggaatttagaagattcctctctgagggaactgataagcccaagggaaaaaccctacagacactgctttgagaattccccaatgaatggcttgatcctgcccactctcgcagagctccccagcagcttttcagtgctggatccttaaatatgaacagacagctgtagagtaccagacatttgaccacagtctctactatgaaagaggagaccaaaacaaacaaaaataaattggaggaaataagacagggagcaaaagaaaactttttaaagttgtatctttagataaaatattatatgaagtaagactattgagaggacaaaatatccccagaaaagaacaagagagtagataaaaaagtagtcaggaagtaaaagtagtcagggaggaaaactaaaaataggattacaaaaataaaaacaagaggattagaagataaatactaagagaatctctcaaagtataagaagaaggattaagagatggaaacgaaccatgcaatgaaatatttttatttttatttatttatttttgagacagagtctcgctctgatgccgaggctggagtacagtggcacaatcttggctcactgcaacctccgcctcctgggttcaagtgattctcctgcctcagcctcctgagtacgtgggattacaggtgcatgccaccacgcccggctaatttttgtatttttagtaaagacagggtttcaccatgttggtcaggctggtttcgaactcctgacctcgtgatctgcctgccttggcctcccaaagtgctgggattacaggtatgagccactgcacccggcagtattatttttatttatttatttattttgagatggagtctcacactgtcacctgggctggagtgcaatggtgcgatctcggctcactgcaacctctgcctcctgggttcaagcaattctcctgcctcagcctcccgagtagctgggattacaggtacccaccaccacacccggctaatgttttgtatattttgtagaggctgggtttcactatgttggccaagctggtctcgaactcctgacctcgtgatccgcccgcctcagcctcccaaagtgttaggattacaggcgtgagccaccacgcccagcctcaaagtattcttaaaagtcagacaatcaaatgtactaatgggatgtcatatttttaaaaggctggccaggtgcgggggctcatgcctgtaatcccagcactttgggagaccaaggcaggaggatcatttgaggtcaggagtttgagactaacctgatcaacatggcgaaaccccgtaaaaattagctgggtgtcgtggcgcacgcctataatcccagctacttgggaggctgaggcaggagaatcgcttgaacctgggagaaagaggttgcagtgagctggtctgcaccaccgcactccagcctgggcaacagagcaaggcaccatctcaataaataaataaataaataaataaataaataaataaataaataaataaataaataataaataaataaataagaggctgggcatggtggctcacacctgtaatcccagcacttggggaagccgcagcaggaggattacgtcagcccaggagtttgagaccaacctgggcaatgtggtgaggctttgtctctacaaaaatttaaaaaattagcggatggtggatgcctgtagtcacagctactcaggaggctgaggatgatcacttgagcctggaaagtcgaggcaacagtgaaccatgatcgtgtcactgcactccaatctgggagacacataaaacaaaaagagacgtctcaaaaaaaaaaaaaaaaaaaaaaaaaaaaaaaaaaaaaaaaaaagggcccggcgtggtggctcacgcctataatctcagcactttgggaggccgaggcaggcgatcacttgaggtcaggagttcgagaccagcctggccaacatggtaaaaccccatctctactaaaaatacaaaaattagctgggcgtggtcgtgggcttctgtagtcccagctactcaggaggctgaggcaggagaattgctggaacctgagaggcagaggttgcagtgagccgagatcacgccattgcactccagcccgggtaacaacagcaagactccgtctcaaaggaaaaaaaaaaaagagcaaacacagaaaacacaagagaagaaattatcaaagaaatactgtaataaagaatcttggtactaaagtatatgcacttccaaatcgagtgcccagcaaaatgaataaaaataatccacatcaagattcatcatcaagtttccaaacaagaataaacattccaggccaggcgaggtggctcatgtctgtaatcccagtactttgggaggctcaggagggcagatcacttgaggtcaggagtttgagaccagcctggccagtatgacgagaccctgtctctactaaaaatacaaaaattagtcaggcatggtggcaggcacctgaggttgcagtgagctgagattacgccactgcactccaacctgggtgacagagcaagactccatcacacacaaaaagaataaagattccaagccgctaaagaaggacaggatggggatagaaaaagagagacagaagaaaaaaacatacagagaattaagaatcacaatggcactgccaggtagtacagcacagtggaatccatttgatttctctgtatttctgcttaatataaaatttaaaggctgggtgtggtggctcacgcctataatcccagcactttgggaggctgaggcaggcggattgcttaagctcaggggtttaagaccagcctgggcaacatgggaaaaccccgtctctactaaaaacacaaaaattagccaggtgtggtggcatacacctgcagtcctggctacttggaaagctgaagcaggaggatcacttgaacccaggaggtcaaggctgcagtgagccaagatcacgccactgcactccagcctgggtgacgaagtgagaccctctttcaaaaaataaataaattaaattaaattaattaaattcagtatcccaccacttgacatataaggaaactatgacacagagcagtggaataacttgtccaagcacaaagctaattagaaatggcaggctggccatcgtggctcacacctgtaattccaacactttgtggggctgaggcaggaagattgcttgaaaccaggagttcaagaccagcctgggcaacacagtgagactctgtctttacaagacattttaaaaattagctaggtgttgtggtgcacacctgtggtctctgctactcaggaggctgaggtgggaagactgcttgagcccaggaggtcaaggctgcagtgagccgtgatcatatcactgcaatccagccagggcaacaagcaagaccgtgtcttcaaagaaaaaaaaaaaaagctgggcgcagtggctcatgcctgtaatccttgaactttggtaggtcaaggtgggtggatagcctgagcccaggagttcaagccccacctggacaacacagacagatcccatctctacaaattttttttttaaacattagctggttatggtggcacgcgcttgttgtcccagctacttaggaggttgagatgggaggattgcttgagcccaggaggtggtggctgcagcgagctgtgatcacaccactacactccagctcgtgcaacagagcaagactcggtctcaaaaaaagaaagagagaattgaaagacagaggaagaaagaaggaagagaagaggaaagaaagggcaaaactgggattcaaacccaggctgtctgagttccgtatctagtctgtgcctaaccagtcaacccccctgcaaatgacagctgtacactgaacaaaatacaaaaaaacagcttcctgagggttcagctgactgaaaaagggcaggcagattttggtggagtttgaaacttggaacagagaacagcatgcagttagtccctcccttcccccacaactttttctctctggtttgccctcaggatggcagccatagcccagggcggcagcagcaggccaggggtcaggggtcagggcgggcagccaacactctaatgggaagccaaccatccttctggcaggaagatgcaggctgccagaaactgaggacgaatccagaaacaggaaagtcaaagaagaaaaatcccaaattctgcatttaaactcagttcaagtttccacatacgtgctggggaaacaaagcaacttctaagcaagaactgagctctgagctgctgcatgagtgacagtttgtagcttgagtctgaccaagttgactgcctgctaaactgaaaacatcaaccccttttggggcaaaccaacagaatccataccgttctgttgtatgacacctccaccatcatatcacaatgtctaggacacaacacaacatcactcagcacaggaagactcatggagctgacatgccaactccaggacacacagatgtggaaattcccagacaagcaatttaaagcagacattataattccatacttaccacagcaaaatgaagaaaaatgcactcataaagaataaaaagatggaaaatctcagctgagaaacacaaaatataaaagagaaccaaacacaggcagtgcctactctccagctctcaactatagctgccttaccattgagcatgacagtcctcaatgaactctggttactattatcagccttattaacaatgacattggaagccagaagataatgaagcaatgcttacaaaattcagaaagactacagtttataccattgccaagttagaaatctctaaccaaataattaagtgtgagattagaacacagatacatgcaagatattaaaaatgtatctcccaggtacccttttttgggatctgttggagtacaatacttcatgaaaataagaaaaccaagaaaaaggaggacagggacttcaacgaaggagagaaatgaagtgaatttcatgctgaaaggaagcttcgggatgcctgctgtgtagcaagctgagagcaatctgtccagactgaagcaggagggcagagggctccagaaggggcaactcaaaacgcacgtgtgcacagagacaggttacctgaagggtttgactatgtttagagtaattttttatagctctgacagacaatttgggaaggaattcataagtacattcatgatatatccattaactccaggaaaatgaaactcatacaaaaaagtaaacatgatctcagcatatcatctggtatcactgtaaattatatttatatggtaatacatactactttgataaaaataaaatttttttaactaaaacagtatctcagcttggctatcattccatcatagtatatatgtgtctactataccttttgcttctttttttgagatggagtctcgccctgtcgcccaggctggagtgcagtggcgtgatctcggctcactgcaagctccgcctcctgggttcactccattctcctgcctcagcttcccgagtagctgggactacaggcgcccgccaccatgcccagctaattttttgtatttttagtagagacggggtgtcaccatgttagccaggatggtctcgatttcctgacctcatgatccgcttgccctggcctcccaaagtgctggaattacaggcgtgagccaccgcacctggcctgctttttttaaactatgaaatatttggagcatccaggaaagtacagcaaacaaaatatagaacatacacgtatctaagacctagcttagaattagccatatacacttcaggtctttgttgttgttaactattacagctgaagtctcctatgcagacttatctcatttcctttgctctcccctcagcgggaatcactatgctaaatttggtgtttatctttcgtatacatgtttttatattattaccacatgattcttctcagaaacaatacagaattctcttgcatgtttcaaattttaagtaaatgtgctaatctgtatggtttttttgtatttttttcttttcattctttcaactcaacatagagatttttccatattgatacatgtaactctagttcattcattttcactgctacattatattccgatgcaactataccacacttacccatctcgtgcttatgagcactgaatctgctttcagcttttggctcttataaacaagtcctgtgctcctctctcccattcgtgtgtgcaagggtttctgtgggagtggaattactgggtcctacgcaagggcacctttgacatactgtcaaattgctctaaaaactggttaaatcaattcaggctctcactaatattgtttaccaaagttttttatctttgccaatctaaaatataatataacattaaagaaagtttggaaaaaagaagacattttaagtatttaaaaaaatcattagataaccctaatggatctcctgtgatttttgtatttccttccaagtccctctgcattttctttatttttctgaagtagtgtcgtgaccgcctgctctccaagaggccaggagaaaccctggcttctctcaccttgctatccattcagcagtgccctcaaagaggtctggagtgatgatgttggtcagcgaggctacggaggcagcacagtatgcgcttctggaaagacagaaacgggaaacacattaagctctacggaagagctaatgaggctcagtgaactccgcgggcggactgctcgccttgcctagtaagctgtaatcacctcctgtcctcactcttggcacacggtcagtcctcctgggtctccaactgagaggtgtgacattctatttggatagagttgctcacggcatggcttcagtgaaagaacatgacattctattctccctacctccacatggtccaatctacatcagaggaaataacagccatatcaattcatgtcaaaagtggattcagctcttctttcaaagacctataatggttgccataaatctatggtatcattcaggtacttctgatatgctcattcatttggatgttagtactgtttcagagccaggatttctgtttacagccttgacacattaaagattaactatactttttctgcaacagataaactgcaaaacaggccaccaaattgtaatagatcaaacaaggataggaacaggtgagtccactccaatacagtccttaaacctctagagggagaaaagagccttgatttcaaacctctcaccagtacacacacacacacacacacacacacacacacacacacacgttaaatgaaaaaggcgcacgtctatattttttgttttgcttttgttttggtttttattgagacagggtctcactctgtcgcccaggctagagtgcagtggtatgatctcagctcactgcaacctccgcctcctgggttcaagcaattctcctgtatcagcctcccaagtagctgggattacaggcgcatgccaccatgcctggcttatttttctatttttagtggagatggggtttcgccatgttggctaggctggtttcaaactcctgacctcaagcaatccacctgccttggcctcccaaagtgctgggattacaggcataagccaccgcgcccgggctattttttaaaaaagcattattaggctgggcacagttgctcatgcctgtaatcccagcactttgggaggctgaggcaggtggatcacgaggccaggagttcaagaccaacctgaccaatattgcgaaaccccgtctccactaaaaacacaaaaattagctgggcatggtggcgtgtgcccgtagtcccaactacttgggaggctgaggcaggagaaccacttgaacccgggaggcgggggttgcagtgagccaagatcatgccactgcattccagcttgggcaacagagtgagactctgtctcaaaaaaaaaaacaaacacaaaaaattattatacttgatttaggatcattcttgctgttccatcctcccagccctaattcttctcggggcacattttatttcagcttctccctctgtcatggtatacacacacagactgcctttccttcccctctatggttttttcaaatacccggcacagggaagacaaaaatcattggtttgaattctgctcaaaaatccttctcctggccaggcatggtagctcatgcctgtaatcccagcactttgggaggctaaggcaggtggattatttgaggtcaggagttcgagactagcctggccaacatggtgagacctcgtctctactaaaaatacaaaaattagctgggcatggtggcacacgcctgtaatcccagctacttgggagaccgaggcaggagaatcgtttgaaccccagagacagaggttgcagtgagccaagatcccaccactgcgctcctgcctgggcaacagaaagaaactccatctcaaaacaaaacaaacaaaaagtatattcctaagggctcctaagaaacataaaagaagggcctagtttccatcttcttttttttttttaagataggatctcactttgttgcccaggctgcagtgcagtggcgctatcatggctcactgcaacctcaaactcctgggctcaaactgatcttgcctcagcctcctaagcagctgaggctacagatgcatgccaccacacctggctaattttttaaaaattttttgtagagacagggtcttgctgtgttacccaggttggtcttgaactcctggcctcaagtgattctctcatctcagtctctcaaagtgttgagattacagacatgagccactgccgctcggccctggtttccatcttactcagtatagatataacatgaagtcagacttactgaggtattccaaagaagtctctgcagaagctgcatgcattatgatcctaccagcatttttagcagccaaaggcacagtggaagtttagttccaccagcaggcattgggagcacacaagagtcacaagtgccaatgccaaatgtgatcatctaccagcagctaattttgaagatctgtctaatttccttgcaattgtaggcctcttaaagaggctcagatgcatttgctcttgaatcctattgtgacttgtgaggtaggaggcgacctataatacagtttgcctctcacaagtgtgaggactaagaagtgatgacagaagacaggagtcccaggtctcacgctgagatggggaggaaacgtaatacaaccttttcatgtatttctccccctttccctccacccagtcatcgcagctctcaaatttgaatttgtccactaactttccatccttgctgccatcacccaaatccaagccttcttcaacctggatcagtcttcctgctctctctccctccagccctgaaaccagagggcttttattggaacactacagtccatcactgcaattgggaaacttctaagaaaatacaaatcagatcacatcactaaactccagactccataggagatttcagggcctctgtagcctgttcccagcctgtccctccagctccactgctcccctgcccaccaggccatctacacttcaacactgaacttgtcctttcttgagcaacacatgctttctcaccaaacttctgcaaatgctagatccctgcctccaccttatcctcacagaatgatctagattatataacctagaaaggaggtctcctttcttaagaactgagaaaaaatagtgcttgctatgagttcactgtgatttgattttttacaatacactggaactacagacccttgagtaggctcatctctgaaactatcagcagtgtaacagagcagaaagatcatccagagactgctgtctatcccagaagggcagcgagctagtctccagatgtcaaactctcccatcactgctgcttttctccaagtcaaatccacccaaacaagcactcctgaggactggctgatgcttccaggcaaaggacaatgaaagaaatgccaagtgaaaaatgatggaatcggggtactagaaaccaggcaaagcaaggaaaatggatgcaatctgctagcttttctctatcattcatatctttaatcctttatgtaaatagaaagcacgggcacgaatggcagagcatcacccaaagagcaaaggtcagggaagaatatggctacagtgcttggcaggggaaccaagctgccttactggagaagtttcctagcatttatctagaacatataaataaagagcatagggaaaaaaaaagtgctggaatgaataagatagcaaataatcacagctgcaaaaggtatatgataaaataccaaaaggatcttgctatgatttgtttgcttttgcctaataatcttagtaggtttttaaaagctgcgtttcaagactgtgcatattttgggggaatagcaacagaacaggaacgaaaatgtagtgaacacgagggaaaaaaactcttttaacattttccttaagaagaatcaacacatactgatttacctcagtcgttctactggtttcactggtatacacagatcctaatctaatttttttggttggattagacaagttagagatagaagaacatcttgaactaaaggcctttgcagcctgattacctattatctgtaatgtattttatgctccacaatgttcgtggttttttcctcccctatactttcaaaccaatggttaaaccagatgcttaagccagactattaatcaacttgtgtagaagcaaacccatttacacataggcagtaagacagctttgctatagaaacctcacaaaatgtatttctcaactaaataataagaaaatggcataaaatctcaataagccactgtcttagagaaatggcttattcaatgaattccctgtatgcctcataagtaatctgccaggtgaggaagcaacttgcttggtacatcagacacttatggaagaaaataataatttcgagctaactggcaccaatcagttaatgcgattttattgcactgcactctcccggcccacaaggctctctgcacctcccagaaaaactctcatgtgcctcaggaggacctcagggattagacattctcatgatttcatcaaattcactcagaaggtatttactgaggccctgctggactttcccctcccttcctatctcagagaggtgaaggaatacattacaccatacagttatttatattgtggtatatcattttgtaccaaacaaatgtatttttaatttctaaaacaaaagcatttgtttcttatattttcacatttacataaaataagtcaagtgatcatgacacctgaggacatctgcatcacatctgaatgattctgacgtgtcactgacatgtcatcccatgtgtcattctgggacaaagcagcagcttccccatgatgttccttaggcttggcatctctaatggcagatgagctctagagtcaactgatgtggcagcctgtgcaaaaccccactcacctcacatccacctcacctccgacatgcatgagaaaggagccgtcaggttgcttcagggagtacaaatactgaagaagcttctctctgagaaacagggaaagaggtaggagaggcaacagtcagtgcgtgtcagcaggcggggaactcctctaggtttctgtcactgctggctttcactgtacctgttaatgatgtcataggcctcctcggtgccaatgatgcacaatgcattgactgctgcatatgtgggtgcaaggtgtggatactgaccgggtcctcctccaaagccaccttctgggctctgacacagctccaggaactgacacacactaggtacacagccaaagggcaaaaacaaagtcagagagcattcatgtcaaaacaccaaattcccactagattccaggcctttccaatgatcccccactccctcaaaagttgaggggaacctctcctcccacttgttgaatataacctctccccaaagggcttaattctctctccagctatcatcatttctgtctgccctcctctgagtttcgtacttaagcgcttgttggtcatgaagcagggaacacaaggctgggaagaaaccgactttcgtagctatggggtaagagtctcccgtgcttcccacacaaacctttcccagactttccactcaacttgctgccctggacctgtggtaccagcctcctcctccttgcctttgggaacctcccagcctttgaattttgccaaaacatggtgctcaactgcttctttccacactaaccatcctagtcaggatccatcacctaggcctatcatgaacatgtaaatagaggtcttctcactcccattgccacctaagcctctgtgggccactgatttctactccaccagtaagaagcaagttttgtttttttgtttttttttttgaggcggggttgccctcggtcgcccaggctgcagtgcagtggtgtgatctcagctcattgcagcatccgtctcccaggttcaagagattcttttgcctcacccttccaagtagctgggattacaggcgtgcaccatcacgcccagccaattttttgtattttcagtacagacaaggtttcaccatgctggccaggctggtcttgaactacctgacctcaagtgatccacccgccgcagcctctgcaagtgctgggattacaggtgtgagccactgcatccggctgaaaaacacatttttaatggagcctgcttccatggctgggagaacagaagagaggcaggctgctctcatgctcaccttaattgcggtaaacataagaggagctgcactgactcgccgtgagaatgcctcccagtctgcgggttcttggagaattctccacgttaattcaaacaggctcccattccctcactgaggggagctgttttctgagggtttgcctccaagcctggcatcaggctgcccagaggttacagtcttgctttaggtgaaatcaagagagccctatcatcagtccggggtcttccgaagtgcaccagaaagggtgccccaggaaagccctggttatcaagctgtttctccacagctcagcagggtcacagccttcccgccaggagaaacctccatttacaacaagcaaactgtctttgcagtgttcatggggccttctttcctgggcgctttcacctcattatttccttgctactgctgccagaaagactacatagcctactctccaagaagacacaagtttataactgtttgccaacatcacatttaattgctttcgatttcagagttcccattatccgggcagagaaagcaaaagcaaacgctgctgccttgctctgtgagttctgaaacgtcacaggttaaaacaacacatacttctttttgcacctacaattttactgtagaaaacacaaggattgaaactgaagttgaaaacaattatgtggcactatggtttttgtttttgattttgagagagggtcttactctgtcggccaggctgcaggacagcggcataatcacggctcactgcagcctcaacctccccagactcaagctatcctcccacctcagcctcccaagtagctagaattacaggcatgagccaccacgcctggctagtttttgtattttttataaagatggggtttcgccatgttgcccaggctagtcttgaactcctgggctcaagcaatcctcccacctcggactcccaaagtgctgaggtcacaggtgtgagccatcatgcccagcatgtgacacatttttaacagcaattaatttctgtagagaacttgaatttgttccttctttccaaatcgtcatcaattcttatgacatttcccagaaacaaatagttaataagctcatgccctaacaaaggctggctgcactagcataccaaaaggtttctgtaccacaaaaagttttagctgatacaaaacttaacagcacattttttaaaagaaagaaaaagagtcacctggttatccactccctttcccagctcctaagatagaatcgtgccgaacgcaacactactgaccctaaagcctcgaattagttaggatctgaatgtaccagacacaccttgataccatccctccatgccaacctccctcagctgacatgctgcatctgactgtctggggctgtgctagagaactggaggttgggcttctcttgatctcagacacttccgtattacagaacattctgatcccaaggctttccaacttgcaccttaaggaattggcaagttgactatgaactaccagctgtcattcacagacttcttagcaattctgaagaccaaaatgttaatgatacttctacatatttaaaaaaaacaaacaaacaaaaaaaaggagccaggcatagtggcttgtgcctgtaattccagtactttgggaggccaaggcaggaggattgcttgaagccagtagttcaagaccagcctgggcaacacagtgagaccccagctctacaaaaaaatatttttttttcccacaaatgtagggggagaaaaacttatcatagagacaagaagttcaccaataaataaaaaattacaagcaaaaaacattgtacaaacaccaagtggcacattttgtgaaaaacaagtattcacaaaatcattcctttagaatatgactgaaagctgcaatacatcaattttctttaacgtcagcaaggcatttcattctagcttacgtgccaattaccagcaaagtgggaaactatcttctatatcatggatcttcaaacccaaaatgtgtgcatcagaatctgtagaaagctaataaaagaatacagagacccagtcctgctgaggtggaaaagatcctgggcctttgtatttttaccaaattctcaggtgattcagatacatgcaaagcttgagccatcactagtccttgctgcacaactaaaattacttggggggtgttttaaaaaaatcccaacacccaagccacacctaattccaattaaaccggaatcactatgggtgggacccaggtggcagtattttttttaaactccccacgtgattccaatgttcagccaggtatcagtgcttctcaaacttgagttgcatagaaattacctgtggatcttgctaaactgcagctctaattcagtagaactagatgggtctgagagtcctctttttttttttttttaggagatggagtgtccctctgtcgcccaggctggagtgcagttgagcgatctcagctcactgcaagctctgcctcctgggttcaagtgattctcctccctcagcctcccgagtagctgggactacaggtgcatgccgccacgcccagctaatttttgtattttttagtagagtcagggtttcactgtgttgcccaggctggtctcgaactcccgagctcagacaatccgcccgccttggcctcccaaagtgctaggattacaggcgtgagccaccatgcccggctgagagtcctcatttctaataagttcccaggtgatagcaatgctcctggtctggggaccacattttgagtagcaatgagatacatctgtgctgtccaataggcagccactagccacatgaggcaatttaaattctcaattaattaaaatagaaaattcagctcttcagtcacacaagacacatttcaagtactccacaactaactgtggctagtggccaatatagaacacgtatagatgtttatagacacctatagacatttacagaatatagaacattttcattatcacagaaagttctgctggacaccaccacttttatcattccatcattaaagagtatgtaaatcttgtaagagggtcaagttcaaagcagggatatcagcgattgcctctcagccttataaggagtttacttgggactcttaggtgatggctgaggactgatctaaagtgattgattctggccaggcgtggtggctcatgcctgtaatcccagcactttggctgaggtgagggggatcacttgagctcaggagttcaaggccagcctgggcaacatggcaaaaccccatctctacaagaattataaaaattaaccaggcacgttggcacccacctctagccccagctactcaggaggctgaggtgggaggatcacttgagcttggggaagtccaggttgcagtgagctgtgattgtgccactgcattccagcccagacaatagagtgagaccctgtctcaatcaattaatcaatgttgattctaaacaccgtcatcagtttggatgaaggattcaaaggcatgtacagtaaataagcatataatacaaaatgagcagcaaaacaaatcagaaaccaataagaataaaacaaatgcaacaggtacaaatagcaagaattacgcttagagatggcaggggtgggggatgggtaaggcacatgaatatgggaaatgactaggaacatagcaggaaaagaccagtaataagggtccacgagttgtgaagaacaacaataaaaatgcttgttaaaagcatcataaatgcagtattagtcagaactgtatctggctctagcctccattttccacctcaaagggaattcacatgagagttgtaaaaatgactactttttttttttttaagtatttggctgggtgtggtggctcgtgcctgtaatccctagactttgggaggccaaggcaggaggatcacttaaggccaagagtttgagaccagcttaggcaatacagcgagaccttatctctatttttaaaataatataaaaagcttaatattacagacaatcacagtgagaaagctacccagcaaaatacctcaaatatacaaaggataattacataaacattctagtaggtaaaaactgagactaatttgtagcaagaagtatttaggttacataaaaaacttcagcactagactaggctatcatagacagacttaaggcctaggataagttataaaaattatagctatgttctgcacaattgggcaggtttaaaaaaaaaaaaacagaaaaaaagattacagctttggaaataggaacagtcatccatgggcagaacggcttaggaggggatgtaaatgcaagatgcatgagctggcatcacatcaagcttgttctcgtactaactaaaacagcttcagcttgatatagtgaagaggaaatctccttccctaggtagaatatgacaatggacaggtgaagacgggcagcatctcttgttgattccgggtggcctctgctgctcacagagtcagacgtgttatttgactcttcatcaagcaccggcaagtctctggatggctgctgttctggaagaatggtcaggtcgaaagttggctactataggccgggcgcagtggctcacgcctataatcctagcactttgggaggccgacgtgggcggatcacttaaggccaggagtttgagaccagcctggccaacatggtgaaaccccatctctactaaaaatacaaaaattagccaggcatagtggcatgcgcccgtagtcccagctgcttgggaggctgaagcacgagaatcgcttgaacccggaaggtggaagttgcagtgagctgagattgcaccagtgccctccagcctgggggacacagcaagactgcctcaaaggaaaaaaaagttggctactttagagcagagtttctcaactgttgacactggggctcagtaattctttggtgcagggaccgtcctgtagaggatatttagcagcacctctgacctgcacccaccaggtgccaacagcacctggccaggaaaaatgcccaggagacaaaggcctagatatggtgtcctcactgaaaggtaaggaaacatacaaactagacttaaaaattaaaaggaaaaatatttaaggggctattccggggataagctactaacaaccttttgaaagggaaaggataaaacactgaaatagcaaaatttgaatttatctttggaaaaatcttacaagctgaaatgtcctaaaatggtttttaagttaaaggcaatttttaaatcttacagaagctaaaaacataactttaacagtgcgatggtctccctgtgaattttattttgctctgtttcactgaagctgctttcagtaacaaagaatgggattctcattagaggatgcttccttcagtgccaaaaccattaagcaaagcaaatgtacttagtctagttccaaaatattaattcattttagataaacacatataaatgtgtgcatataacctcttaaaagagggaagctaggccgggtgcggtggctcacatctgtaatcccaacactttgggaagccaagacaggtgtatcacctgaggtcaggagttcaagaccagcctggccaacatgttgaaagcctgtctttacaaaatacaaaaattagctgggcgtggtggcacacccctgtaatcctagctacttgggaagctgaggcaggagaatcacttgaacccgggaggtggaggttgcagtgagctgagatcatgccactgcactacagcctggcaacaagagcaaaactccgtctcaaaaaaaaaaaaaaaaggccgggcgcggtggctcatgcctgtaatcccagcactttgggaggctgaggcaggtggatcacctgaggtcaggagttcgagaccaacttggccaacatggtaaaacccaatctctactaaaaatacaaaaattagccgggtgtggtggctcccgcctgtatgcctgtagtcccagctactcgggaggccgaggcaggagaattgcttgaacccaggaggtggaggttgcagtgagccaagatcgtgccactgcactccagtctgggcaacagagcgagactctcaaaaaaaaaagaggcaagctgaagtcctacctatggactgggcatggtggctcacgcctataatcccagtgttttgggaggctaaggcaggaggatcaattgagcccaggagattgagaccagcccaggcaacacagcaaggcactgtctctaccaaaaataaagaaaacattccaggctatgaatacattattcttgaaacctctgataccagcagtaacaacctcgccttgctggctttggtcagcggtcatagcagctgacaaaagtattttgtccactagagggaacccagcttatcatattgttccctaaacaaatagaagcacagcagtgaacaaaataggaaagagaaacctttgtgtaagtgtagggggcgtgtgtgttacatgcaggggaaaagaaggcaggaaaataataaaactgcagagctagactttttgactctaggtcaccttaatatatttgtatgaagaaagaaaactgaacgcatttcaaagcatttcatttccctgtgcaagataaataaaaaggcaatattctatttcagctagtctaaaaaaaatcttctatttatatagaagtccttaagatttatctgtatcttactaaaaataatctatttccttatgggtcagagccagtaggctttgttcataacaagtgttttctgcacctagaagtaaccacctcctaggcacaaagcaaaatacattattgggaagtctaagaaatgtttaaaagttcactaaatcaatgcgtagaagaaccacaggtaaagcttttaaggcatctgtgaagcagaaactctcattaactgtcaagtggtttttgaaataaggacaaatcagcttatttttaaaccattccttttttaattacaaaataataaaagatcattgtagaaacttcagaaaatgcaagtaagcttaaaaaaaatgttttgtttgtttgttttttgagacaacagtctccttctgttacccaggctggagtgcagtggtgtgatctcggctcactgcaacctctgcctcccggattcaagcaattctcctgcttcagtctcccgagtagctgggattacaggtgccagccaccacatctggctattttttgtatttttagtagagacagggtttcaccatgttggccagactggtctcgaactcctgacctcaagtaatccgcctgtctcagcctctcaaagtcctgggattacagccatgagccactacatccagccagaaagttcttctttttctttttctttttttgagatggagtttcactcttgttgcccaggctggagtgcagtggtgcaatcttggctcaccgcaacctccgcctcccgggttcaagcgagtctcctgcctcagcctcctgagtaggagccgggagtgcagtaacagaaggagactcttgtctcaaaaaacaaacaaacagcctcctgagtaggattacaggcatgcgccaccacgcttggctaattttgtatttttagtagagacggggtttctccatgttggccaggctggtctcaaactcccgacctcaggtgatccacccacttcgttctcccaaagtgctgggattacaggtgtgagccaccgcgcctggcctttttttttttttttttttaagacagagtctcactctgtcctccaggctggagtagagtggcatgatcttggctcgtcgcaacgtccacctcccagattcaagcaattctcctgccttagtctcccgagtagctgggattacaggcatacaccaccaagccaggctaatttttatatttttagtagagacaagatttccccatgttggccaggctggtctcgaactcttgatctcaggtgatctgccgaccttggcctccccaagccctgggattacaggtgtgagacaccgtgcccagcccagaaagtttataaaatcacttttaaccccatcgtccagaaataactactacatgtatctttctggttctatctatgcatatcatcatctatatttttaatgtatgtaaattaaatcttttaaactattttcatttcacatctctctatataaatacatatattttaacatacaaatatacacattcatatatttattgagacagggtcttgctctgttgcccaggctggaatgcagtggtgccatcatggctcactgcagcctcaaacccctgaactcctgtctcggcctcctgagcagctagaactagaagtgtgcaccaccacgcccagctatttttatttttatttttgaaatggagtctcactatgtcgcccagactggtcttgaattcctgggccccagtggtcctctgaccgtggcctcccaaagtgctggggttacaggtgtgatcatgcgtggccacatttatacattttttaatggttatatagtatttcacagaatgtactgcaccataaatgacttatgttttattttttaaatttatgtattttatttatttatttttttgagatggagtgtcactctgttgcccggactggagtgcaaaggcgcaatctcgactcactgcaacctccgcctcctaggttcaagcgattctcctgcctcagcctcccgagtagctgggatgacaggcatgcaccaccatgcccagctaatttttgtattttagtagagatggggtttcaccatgttggccaggctggtctcaaactcctgacctcaagtgatccacccacctcaacctcccaaagtgcttgggattacaggcgtgagccaccacacccagctttacatttaaaaaaaattttttttaaacattctctactgttgatatttaatttagattgcttccaatgaaaggccctttaaaggctcctctcttcctatgtgacattgccccagaagcggcgctgacacttcctcagaaaagccttcactataaaacaccaagtacacagcctagaaaaaaactcagtcgattttggctcgagttcttccacctcaggcaccccctgtgattctctcttccagtttttcatgggtctgcggcctcctccatccagcgttcagatccaggctcacagaaatccccattttttctttcttctctcacacccaactttcccattgtgcaagagtgaagggaaaactttccaaatatcctgattgtgtaggagtgaagggaaaacttcccaaacaatccccaggcccccgagctggtatttcaaaaacacacgaggctggatgtggtggctcacacctgttatcccagcactttgggaggccgaggcaggtagatcagctgaggtcaggagttcaagaccagcctggtcaatatggtgaaagcctacctctactaaaaatacaaaaattagccaggcacggtggtgggtgcctgtaatcccagctactcaggaggctgaggcaggagaatcgcttgaacccgggaagcagaggcagcagtgagctgagactgtgccactgcaccccagcctgggtgacagagtgaaactctgtctcaaaaaaaaaaaaaaaaaaaaccacgtgggcctttctttgacaattaaattcctgttactgcagaaactgtgtccaactctccttccagtgctggaagcagccaggcttgcagtggcatcccgatgatcaaaacaatgcacttgcctctccctcagaaagcatcctacgtaccacaagggttaatggcctaattctttattatcttccccatccacattcatcacaagacaccctgcccaggaaggcaagaatgagaggttattgttaagacagaatgaatgagacaatgtgcagttctgttcctctgacctgacaatgtgactgaggcaggggctctgtgaccagagaggggccccggctaggcctctgtgtgtcccagcacagctgcctccttgtgctgtggagaaacaaacctggctcagaagtctctcatcccagatgcttcgacctcaagagcaccagaggaagctgagaaattcgagatgctgcctagagcccatgctgcctctcagtggatctcttggatccaattcctggctgccctttcttattccaggtatccctaggactggagtcatgatcagtcttttcttctttaatatataaatggtgatgagtgtctgggaatgagatgccagatcacgaatgccatctgtacaaggatcttgggaagaagctcagttgcttagatctctaatcatcgatcaggtttaggaaaactgagagtcatggcatttgtatgccacaccagtaacacatccagtcccatcaagagctacatggtcgctccaagcaccgggagcggggaggtacttctatagaggtgcgtaggaaaggcaaaggcatttttgttcactggactggcacgtgcttccccacagaagctgttcaaatgcatactgtactttctggcaaaatcttgtctctcagagttgatgattaagacttttctcaaagaccagagtcaagagccaaaagaaaaggccacagaagaaaccagaatccttctcttggaagttcaaagtcttgttctacccaccagcttacattagttttctaaagtggaggagtttcaggaagttgccggaggtcatgagaagagcaaagatttctttgtggcactgtttttttccattccaaacaaacaaaacagaaacaaaacaaaatcccaaactcaaaatacaatttcagagaacaccccagatttcccaaagacagactcactctgtagccactatctgggggatgggttcatctagcagttccaagctgtgcaggatccaatagcagagccatgggcggctggcatccagacactgggagagagacaggagagaaaacatcccttattcacaatcactccaagacactgctgccaaggctgtatctgtctcactcccagcagcctggcaagggggaggagggcacccttgctcaaacaacaatcagtgaataaaggacactttgctttgtggccttagccaggagctgaaatgaccatctgttaaaaaaaaaaaaaaaaaaaaaaaagataacaaggctgggcgcggtggttcatgcctgtaatcccagcactttgggaggccaaggtgggtggatcatttaaggtcaggagttcaagaccagcctggccaacatggcgaaaccctgtctctattaaaattacaaaaattagctgggcatagtgatgtgcgcctgtaatcccagcgacttgggaggccgaagcaggagaatcacttgaacccgggaggcagaggttgcagtgagccgagatggcaccactgcactccagcctaggcgacagagcaagactccgtctcaaaaaaaaaaaagaaagaaaagaaaaaaaagacaacaggattaaaaaaaagatgaccctgaacccagtggatccctccctggcaggcatctaaggaaggctgagcagaggacttcctacaggccaggaggttaggggctgctattttctcggtatagaaccaaggagatatacattctctgaagagatttcctagcttaactcaatcactgattcaacaaatatttgatagtatctacttgtgccaagcactgtattagacactggggggatgataataaaatttggtttctaccgtttatttttttgagacagggtctcgctctgtcacccaggctagagtgcagtggtatgatctcagctcactgcagcctcaacctcccgggctcaagcaatcctcccacctcagcctcctaagtagctgggactacgggcacacaccactatgcctggctaattttttaagtttttatagagacagcatcccactatgttgcccaggctggtcttgaactcctgggctgaagcaattcacctgcctgagcctcccaaagtgctgagattacaggcattagccaccatgcctgaactggtttctgttcttgagatgcttgggatatagaatgtgtgtggttacctgtaggggaagagagcactggacagacatataagttacctcatgtctttctggaaccaacacgtgtacatatacctggagaaatgctgtaatggacgaaaacagagttttgagggagcacgtggaagagactgactaattctgcctggggagctaggaaaggcttccaaaggcaaaatgcagacggctcttgatcctaattaaaccataaatgattattgagcattcaaggctaggcagggtaggtaggagtactgccccagttttataaattaaaatatataaatgaggtccaaagattaacctttttcagattataaaaatagcaaatgtcagaggtgagacaagaacctaggtttttagagtcaatccagtgttctttccgttggcccaagctgctctcttcaaaactatgctgatatcccaagctgtggctaacccaccacctggaaggtaggctggtgagctactgaagacactgccagggatgcagcttaagtttgaatcccagctcctcatcttactcgctatgtgcctttgagcaaatgacttaattttactatgcccatttcattatctgcaaaaaacaagagattgatctacctcatgtagttacaagatttaaataagagaatgcaactgggcgcagtagctcacgcctgtaaccccagagcctcaggaggctgaggcaggtggatcacttgaggtcaggagctcgagaccagcctggccaatatggtgaaaccctgtctctactaaaaatacaaaaattagccaggcgtgatggtgcacacctgtaatcctggccactcagaaggctgaggcaagagaatcgcttgaacctgaggcggaggttgcagtgactcacgatcatgccactgcactccagcctgggaaatacagcgagactccatctcataaattatgagagaatgcatggtaagctttcagcacactgttcaataaattgttagctgatatggtaccaactgtaacataactattgaggacttgagtcaaggattgaaaattcatagcccacaggccaaatctagcccatggatgtgtattgtttaactggtagtagctgcaacatttgtcaggagagtcacatgaaaacgtgatttccggcttcatttggaggaagaaaaaaaaaaaaggaaacaaagatgatttggcaaccctgggtctgcattcccagatggcagtaatgggcaggaaagaagttaagggcacagggtctccagttagcctcagtctccatgcagcccacttcactgatttatgctgcctgcctgggccctacaggcatttgagttggcaaatcattgccacaaataatcaaatgtggaacccaaataaaaagcagattaaaaatagagatgctgctctgtgttaagcagggcagaaagactggagacttcctgttcacattcaccctttgcctgccgctcagtcccatccaacatctgtcccctccaccgtcacccagtcctgacgttgctctgggaaatattaaagatctactcttaaacagtaatgttaaattgcaaggaccactctctatactggtcctctagtcagtatagaaattagatcttattacaagaaagggttttttgtctctttaatgaagatatgaaaagtaatgtacttactagaaggagtggtgaagttggaaaatttgtaaccatcacgatacagacttaacaggtttggacaatagtcctcaataaatgagcgagaaattagatcagcttatagggcaaagggttaagggtgaacaggtaactggcatttagccagctgtcaaggaggtctagataaagcacgtgaaccccttagtcatcatctagtaacagaagaaagccccatcctatctagggtgctccactcactctggaagagactaggttctgccctttcagggctgagtcccagctctgtgacagcaccctacctcctgccagagccacagagaacaaagagtgactctgcaacaggtcagccccaacagtcttttacgtttaaatagaaaaaggaggaggatttggtggataatttgacagcaagagttcctgggtaatgtgtttacctcataggcatctgtcagttgtcgaaggcctcttttcagataatggaagtgcttctccctctgcaaaacaagcctggaaagacaaacagtttataagcccattctaatagcttatgcttccaccatacacacgtatgtgcacgtacacacacacgggtaaacactcagcttcaggacgtccccctgcaatcactgactggataaccagcaacttctctggttccaaagagcaactaaaccagagaaaagaagctcttgtctgaatgtctctaaagcatctgaaaaccatgccagctgacatttagagtgcgattgtctcctaaaggcagtgactttgggctaacggaaaagccgcaatgagcacacgcagccaggcaatgacagtccacccagaaacttcctccagcatctaagaacagatatctttgtgcctccccatcctataagcaatttaaatctgagcctcgccacttccctgcctcagccgctgtcatttcagtcaccccgtctgggatgacttctccaaggcccataatttactccctgcctgcctctcggttatccaactattattctctccctgaaattccacctcccacgtgtgacccacagccctggccagaggaccgtgttctgcagccagtcgctgtccttggctttcaagtcagcaatactggctttaagatggaatgtgccgcccatggccacctgcacaggccgggcaaagcacagaggctgcacttctttcttggtctggcagaagagcctgtgtgactagggaaggaaacaaaaagcacagattgtcaagatgttccccgtgcttgcagattacagaaacaaaggaaagagaaccattccctttgctaggtagtcaattccacaattgtttatcaaattcccactgtacttggctcagagtaagagccttcatgcagtctttttttttttttttttttttcctgagacggagtctcgctctgtcacccaggctggagtgcagtggtgtgatttcagcttactgcaacctccacctcttgggttcaagctattctcctgcctcagccacctgagtagctgggattacaggcacgtgccaccacacccagctaatttttgtatttttagtggagacgggggtttcaccatgttgcccaggctggtcttgaactcctgacctcaggtaatcccctgccttggcctcccaaaatgctgggattacaggcgtgagccaccgcacccagcccttcatgtagtctttacctcaaaaactcttccaattcagaaatgaggtaagtatatcaatggctacaaggaaagaatgggtaggttttgcaagggaaaaacatactactgaggctcaaaagggaggggatatctcatgaagaaaggaatgatcaggaaagtttgtgtgaaaaaggaggaatgtgcgatgagtggccctggcagaaggagaaaattttaattcaattttaattcaagtttaaatagctgcaggtggctaatggctactctactatgctgcacaggtatcaagtgtacaagaggagtgacaggtgggagaatctgacctcaatacagggatgaaagaggaatgggaggaaagcaggagtactgccccagtttaaaaacaaacaaacaaacaaaaaaacaaggatctgggatgctgactaaggcatttctactcaatttactaggcaaagggaagtcctgaaggtttttgagatgaggaaagaaatgatcagaactgtgctttggagaaacagtaggtagtcagtatgtgtttacaaactgaagtatctgaaaatatcgcagtgggcagacagatggggtggggagacagggttagaagctctgaggagctgacccagttggggctacttagggcccgaactagtgtgtgacccgtgatcagctgacttttggatgtgtgggtcttaggatgctgggactgcattcaggtgatgatgtcaatcaggctgctggacacacacgtgaggctcaggagagggattcaggttacacacacagactacgaagcatttgtctgcacacaagtgacaggtgaagccacagaaggtgagagggcagagagagaagtttggaaacaaaactgtgggaagacccatctctaagggtttggaggagccagtgaaggagagaaacaggagagtttacatatgctagggaagagcaaaggaagtgtcatgtcacaggccatcagggaggagagaatttcaggaaggtgtttaacagtggcagatgctgcagcaagactgaggggaaaagacaacaaaccacagaagggctagagacctccaagagcattcagagcagaggtgaaggcaaattgtaaacaagagaaggccagactcagtttctctttcaggaaagtccactcaggacgcagggagcacccatctgtgtgggcagagtgttgtccagcactggggtagaggctgctctgtaccctagagcgacagtccagaggtggacacacatgtgaaaatgacaagcagagccctgtccaataaacgctgtgatcagccacgggaagagatggagggtcagaaaactcttcccaaagggaagagcattgagtttaaggctggaaagacatgagttaagcaggcaaaatgaagaaaacaccatgacacatttgagttagtttagttcagctggatcaaaagtacaaggcagtaagcagagaaattccacattagaaatgcaaaagctcagaggaaatccatagggaaggtctgtaaagaggatggaggagggctgggatgagggtatagtaggagaggtgagcctggaataaggaaggatgctgcattctttgagcgagaaatgatgggtacgaagctagcgaaatataggtctctgatgtgggaagaaggaaacaggaaagtcaggtgggtcagcctcgattttctcaggaactaggagtcaagatggtgggagagctgtggagtggccacggtggtgggtgtgttagggaatctacatgagacgaataaaaggattataaggcagttagtgaagcgccagtgaaattaagaaatataacatgttggtgaagccagtcagcagcctcaggagaaaccaagcctgctgacaccttggtcttagacttctggcctccagaaatgtgaaaaaataaatctctgtggtttaatgcaccccatctgtgataccgtcttatggcagcccaagctgactaataccctcaccggtccttcattctcaactcacctctatccaaaaatcttttctgtgtaggaagttaagaaagaaaaggtagagctcttcctatttttacctgaacaattcagccccaaaaccattcaattacatggagcagaataagacaggtttcgtgcaggacttgagggggtgcagggtgggatgcaggctgtcagctcaagtggatgaggagggcccccgtctcactgtgcagagggtgacaggagagcaagtgggtaaatctattaaggctatgggaagtcaggtttccactgtctgagaaggaacttacacatctatgtgtactgggtaatgatttaaatagaatttcttatgaggggtgagcccactgggcttccagactcttcacaatgtgcctccacccacactactctccaacctcatctccgcccctgagctctggtcatgctgccttctttgagctccgctcctttcagtctcctggctttagcacatgctgttccctctgcctggaacactctccccatcctttaagttagccacccctattccacctacagattcagcttaaatgtcactttctgtaagaagccttccctaacttcccaatccaaattagattctcccagtgattctctctctcaaattatcccatcggtaactgtatatttgtgttcatttgtttaatgtccacctcccccactagaccaagagcccagcaggggcaggcccagggctagccttgctcactctggcttccctgagcccagcagagtgtcctgtcctttggagactctctagatactgctgctgaaagagaggatcacacaaaggcagcagaatggaatgagagcaaagccacttcctccccccaaacctgggccatcctggaaaacatgcatttgattgtgacagatgagaggacaggggattcagtccattgctggttcctggggactttctaaactcactaaagccaggggcctctctagtcaaaaaataagcacctggcatgtaagcaataaagcaatcgaggaaaggtgaacttatttgtgagaccttggaaagaacaacagtaagaagggaatacatcctctacctgctcaggatctgggaaattctaaaattgtatcacatacaggaatagtagaaaacacgggagctaagctggtgcctgtgagagacctgctttgaggactttaactcagagtattctggcttcagagccattgtcagcacttaacctccagggctctattagcacagggacattatcaatatttctcacttctgaggagcacccgtctccttgcccaggagaaaacaaatttaaaaactacatgtgagcgaggtatctgtgtagtttatgcatttcaggtttcttattaaagccaaggtgataaatgcaaaagggtacattcaaaagggtgtgaaaccgtgacaatacccacagggaagaaaaaatgaattttcatgggaaagcagacatgaataaacaaaaccatgaaaagcatggtcaaaaagctccttgggactgactacctcactccaggtagacagtcccaaccttagagaagaaaatcatttctgggaaggggattaagtatagaatgtactgacattcagctccaggcttgactttcagcccagtctgctattcagctttggccctggaacactgaataggcaaatgcctacttcagcatcatcacaggcatccctggacctgtgcgtggtctgtggtcctgggcatgtgtgtgagtctgtcccatttgatcagcatcatgacctcagacacacaaacaagccctgccatctagatttactgctaacagctaaccatgcacttcagctaacagtgaaggttacttcctgtattaaagtgtcagacttttaaattttgactattaatatgttaaatattgagactgtgataatgatttaaaattctgataaattttctaatttattcttatatcctcgcttattctatgatggtgatgtttgccttcagccttatattgatatgttgaattatatactcagccattcagccaaaatgtatagtatctccaatattaattagcatcctttaaaacactcaatttcataggcaacaatgataaaaacgggtaattgtgaaattcctgaaactaacccagagccctgatatattctatttccacaaggatccgagcccaggaggaacactttttttttcccacccatacttgacctaccagctatgaatcaggggatttcactcctttaatatcatctaccaccactctcaaaaaacaactgcttcctcccagactataacctcccattttccctcatatctcagtgtgaataaaagtctttcttcagctcatgagctaaggaaaaacaaattttaaaaaaggaatgaaagagaccaagggctctatcctgatggtaagtgaaaagggaatgtcaaataatcaaaggttcatgtgagaaacagaggctgtgtgtccccagagcccaggcagtggacagtgactcagcccgatcgggtgagtcatcgggggtacaaccacaacaacaaagcccctccaaaagcaatcacccacaccctcaccattatgaagtcttgtcccctctggggaggctaagcttgaaccagcttgtgcctaggggcagcgaactgccaaggataccattacatttaagagagctcgttctcccaagctatttaaataaatggcgtcatttgctaatctctagctgtatctcatgacaagaggaataattcattttattgaggtcagagcattgggttaatgcagagatttggtttagcagttaagggaaagactatactagtaagctgatatttttcctcctttccttccccag

SEQ ID NO: 735266 - DNA, 1884 bp, Homo sapiens
cggcgaggtcggtcattctgcctgtccggtagcaccacgaaacacctgccactgacacctccccaccagcccccgagggttcgcgcaggcatcccgagccgcgccccctggtccgccgcagccagattccctcccgggcgggttacgcccctaggcgcaaaacggaaccactccgtatgaagaagacaaagtataaccagtcacaccaaagagaggcagcattatttagacagccggctactcccccagagactccacccagtcccctgggcccggcgtccagcgcgcagacggtgcccggctccaggagttccagctccctccacgtgtcctgtcttcccagcagcctcctctgccgcctcgggaggaaaatctcctgacaactcgcggtctgcggactacgactcccaggaggcgccgcgccgcggctctccccgcccccccccgcccccccccccctccccgggacgcgcaggcgccttgggctccgtcaacaagccgggctggcgtcgcctggatgcggtttcttccgggatttgtagtttttctggagctacccgggccgtctgttagagggacaagaactacaagtctcggctgccccagcgctgcgagcctggtcacgtggcgggggccgaccgggcgtgcgtgccgccgttgatccggtgctgcagtgaggagcgtggttcttgcccgtgttgtgtgtgtgtgtgagtgagagagcgagtgagtgagtgagtgagtgtgtgtgtgggggggactcggcttgttgttgtcggtgacttccccctccccttcaccccttcccctccccgccgccgctgcagtggccgctccctgggccgtaggaaatgagcgataacgatgacatcgaggtggagagcgacgctgacaaacgggctcatcataatgcactggaacgaaaacgtagggaccacatcaaagacagctttcacagtttgcgggactcagtcccatcactccaaggagagaaggcatcccgggcccaaatcctagacaaagccacagaatatatccagtatatgcgaaggaaaaaccacacacaccagcaagatattgacgacctcaagcggcagaatgctcttctggagcagcaaggggaaagcgagagctgatcaagttctttgttcctggggaattcacttctcttcctccctcatggaagatgcaagtaaaaggaaatgcaagtaaccacctgggttagaaaacctcaaataaaataaaataaaataaattaaatgggttgaccttccaggctcaagctgagctgaaccaagggatgggcagtgggtggtgtcagtgggttggttactgggccaggcagcctgcatgtaggggctatttgaaaagcccaggtattttatgtgtattggtgacttgcttccaagtgtccagcttgtcattccaagtggatcttgtacacgagagctaagccaaaactgttctttggctgatacgtcttatgtcatcctttcctgctgttgtgtggcctcacaccttgtggagcctcatgctcctgggccagcttctcctctgttattgcactgctgaatcccacagggagctcacgctccagtctctccacggggcttccacggcaggacggtgacatcacaagccttctcttcagagttgggtgggattgcagagtgtctgctggctcccaggtccagctgggaaaggcgggagggaaatgaagtgtgtgagtgaacagccacccgaagggagctacttctgagcatcttgagcctcgggggccaacaagcaagcccttaggaagaacaggctggaccctgagtctgagactcggttactccccaagtctccagaaggcagtaacacactcccttggttgccttttag

SEQ ID NO: 735267 - DNA, 1630 bp, Homo sapiens
cggcgaggtcggtcattctgcctgtccggtagcaccacgaaacacctgccactgacacctccccaccagcccccgagggttcgcgcaggcatcccgagccgcgccccctggtccgccgcagccagattccctcccgggcgggttacgcccctaggcgcaaaacggaaccactccgtatgaagaagacaaagtataaccagtcacaccaaagagaggcagcattatttagacagccggctactcccccagagactccacccagtcccctgggcccggcgtccagcgcgcagacggtgcccggctccaggagttccagctccctccacgtgtcctgtcttcccagcagcctcctctgccgcctcgggaggaaaatctcctgacaactcgcggtctgcggactacgactcccaggaggcgccgcgccgcggctctccccgcccccccccgcccccccccccctccccgggacgcgcaggcgccttgggctccgtcaacaagccgggctggcgtcgcctggatgcggtttcttccgggatttgtagtttttctggagctacccgggccgtctgttagagggacaagaactacaagtctcggctgccccagcgctgcgagcctggtcacgtggcgggggccgaccgggcgtgcgtgccgccgttgatccggtgctgcagtgaggagcgtggttcttgcccgtgttgtgtgtgtgtgtgagtgagagagcgagtgagtgagtgagtgagtgtgtgtgtgggggggactcggcttgttgttgtcggtgacttccccctccccttcaccccttcccctccccgccgccgctgcagtggccgctccctgggccgtaggaaatgagcgataacgatgacatcgaggtggagagcgacgaagagcaaccgaggtttcaatctgcggctgacaaacgggctcatcataatgcactggaacgaaaacgtagggaccacatcaaagacagctttcacagtttgcgggactcagtcccatcactccaaggagagaaggcatcccgggcccaaatcctagacaaagccacagaatatatccagtatatgcgaaggaaaaaccacacacaccagcaagatattgacgacctcaagcggcagaatgctcttctggagcagcaaggtgagcacccgagctcgtggggcagctggccctgctgtgctccagccaggtcaggctttggcacctgggcctgcagagtcagagccagtcatggagtatgtgctcagtagcaggcttggtcctgcttcttggggcctgagtaactgagtgttagagccgtcctgaggaaggacctgaggcgccagtgaggagacagtggaagctaggaagttggacatctggagacttgtatcttttctggcctgacctctccccttcttggggctcaggtgctctgcctgcagtagggatcacacctggcatcaggtgtctgaaaagagctttgaggtccttggagtggaatgtgctgtgtaagtaccagagactccaggtgttcagggacagtgagccctccccattgtcaatggtagtccaatcagggcagcctatgggctaggcccatgctgttctcaatgctcacacccgccttttcctacaaccacag

SEQ ID NO: 735268 - DNA, 7257 bp, Homo sapiens
cggcgaggtcggtcattctgcctgtccggtagcaccacgaaacacctgccactgacacctccccaccagcccccgagggttcgcgcaggcatcccgagccgcgccccctggtccgccgcagccagattccctcccgggcgggttacgcccctaggcgcaaaacggaaccactccgtatgaagaagacaaagtataaccagtcacaccaaagagaggcagcattatttagacagccggctactcccccagagactccacccagtcccctgggcccggcgtccagcgcgcagacggtgcccggctccaggagttccagctccctccacgtgtcctgtcttcccagcagcctcctctgccgcctcgggaggaaaatctcctgacaactcgcggtctgcggactacgactcccaggaggcgccgcgccgcggctctccccgcccccccccgcccccccccccctccccgggacgcgcaggcgccttgggctccgtcaacaagccgggctggcgtcgcctggatgcggtttcttccgggatttgtagtttttctggagctacccgggccgtctgttagagggacaagaactacaagtctcggctgccccagcgctgcgagcctggtcacgtggcgggggccgaccgggcgtgcgtgccgccgttgatccggtgctgcagtgaggagcgtggttcttgcccgtgttgtgtgtgtgtgtgagtgagagagcgagtgagtgagtgagtgagtgtgtgtgtgggggggactcggcttgttgttgtcggtgacttccccctccccttcaccccttcccctccccgccgccgctgcagtggccgctccctgggccgtaggaaatgagcgataacgatgacatcgaggtggagagcgacgctgacaaacgggctcatcataatgcactggaacgaaaacgtagggaccacatcaaagacagctttcacagtttgcgggactcagtcccatcactccaaggagagaagctctatttcctcttttggaaattgtgtactcctgtccttcatcgtcaaagtttgatgcagaaatgccacaccttcatttcaagctaccaagtgcacaagaaaaaagaatgcaagatttaaaaaatgattgttttgaccccttacacaaatgtcttactcctggctttaattaagctgcttgagggctgatagctctgccttaccctggtaatcagcaaaatggtcctgtggctggggaggccctggcagcaggaagccttcaaggagccatgggtctgtgctgactctggccttacaaccttccagcctcctttgctggcattgatggggttccatttttgaatgaactagtttaatgtggatccaaatttattgtgcatattctttcgttttggttttcaaaagatggcttattcacatggaaatgtacaccagtttagccctgggccctccctttaccttcatatgtgtaaaagcttacacaggtttcagaaaataaatggtttcattttctctaaaataactagtacaaaataaaacagatgtcagttgttgaaaaagcagtacctcttttttcatccctccagatatggcattttggttcttaggggaacaagacagctgtaacatcagcccactggcatctgttttgggcactgaagaggaaaagtgttcagtagagttaagattattgtttctcacgtcagcattgggaccctagggaagggcagtggtgttcctaatgttaacaatctagcactactattcttttcctcacctctccccacccactttctaaaacaacttgaagttttacagaaatccaagttactgtgataaaatttataactccagaaatatttggaactcttgccttacattgaaaatttttgagaaccattgctttaaatgagatttaataaccttggacttcgtctgaagcatcagtgctaacaacttcaggagtcatttggggccttaaacggttctatttagaatccaagtcttttgggtctgaggccttttgtgacatatgtagtcagttcttgctgtgatgtgtggggtgggtggatgctgttcaaaagcagaggtctgacagtgggtgcctctgcttgagagggttggccttccctctgtctgcttactgccttgggagggaatgcaaatggacacgtagctgcagcataaacagtaggagggacaggaacctggcagaccctctgccacaccctgggtcccttctacattattcattttgcttttatccttctgggctgccaagaggtaatgaagccagcagtgtactgtgggaagctgacatcccccacctaaccttccacttctgccctccagaccagatggttaggtcagttctctcaagctcgcttgcatcttgaggcttttcctttcaatgtgtttctgctagaagcctgtttagttctcacctgtctttaaaatagaaagaaaaataaccttccttcaatgctgctatcctgctattacaaactaccatttttcacttttttttttttatacagggtctcactcttttttttcaggctggagtgtgttggcacaagcctgtctcactgcagcttcagccccatgggctcaagagatcctcccacctttgcctcccaagtagctgggaccacattcgtgtaccaccatgcccagctaatcttttgatttttttatagagcccaagtgtcttgctgtgttttctaggctggtccccaacacctgagccctagtgatcctcccacctcagcctcccagggtgctgggattacaggcatgagccactgcacctggcctacttcttacttttcaaccaaattctgaagactagtcttcatcattgcctcacttgcaactcaattcttatgcctgttaccggtgcagagacaatttaccattgggcttcggctgtcactcctccaagaaaaccaccttcactagggtcttccatttgacgtccttgtaggcaaatcaggtgactttcgtagtccttttcctcctccaactttcccctccatgacaacagtgtccctgcaattctattgatctttttaaattagttccatagcttcccctgtgttcccaaagtatgagtgtcctggaggcttggattcaaatcctgactcaacttcctattagtttacataacattgggtaaattacagctctgtgtctcggtttcctcatttataaaatagggaaaacatcagaaggttgtgtgaggatgcctgacacttagtaagtactcagtaagtgttagtgctgccattgttaccacccccatcatcattgtcacttgtgttgctatgtgcagccatggctttggagcaagatctcgcaaggctgcccagtatccctttgtgtggctcccagaggtgagagagaggcctgctgagccctttgcgtttgcttacatggctacatgggaggcctggctacctcttcagtcccttcagccaccatccaccctgtctcagggctccatccaagccatttaaagagccatttctgttcacaaagacagactcaaaattatgattctgctaattataaaaactatcaggaaaaaaattttcaggcttttactgagtacccaaggcagcacttgctctgtggacatgttgacttaccaagttctatctgatcagtcacactcacatgaagataggcagttgactcagctgacttagagcaattttcagaaaacagaaactgaaagtccagggttattccatagtccatgccataaatcccagggtttcttgctggtttcgtgtttgctggtcacatattataaactcataaagacaaggaaggccctgcccccaccttcatcctgtgtttggccacatgatcttgtatggagtggaaagatgggaggggaggattgcaggtgagtctagcatttttagcttcagccttttgctttttctttcctggactacatgcacatgcaaatttggggtatttctgtattttgtgctttaaatttttttcttgttgggccttaattcttgttgggtaccctgggaagagtaaaataaagttaactctgaaccattcttttggacttgctgagggatcagggcaccctaagtgaccaggggcacttctgctttcagcagaggatggaggaagggctgtgcttagcattctgaaggcctcgttctgagtttaaaccaatccagccttctttggactcctgttgttcccaagacactatgttctgaacatctatgaattttatcttcatccaaaaattaccctgaaatggaaactgccatccctcacagatctttttctctcttctggcttgttttgctgtgcttactgctcacttttcacttcttgatcctaattccctggtttcatgtataaatatttgaaggagaaactggtagcaaaaaggctgttactcagtctggtcattcattaaaagttatcactgaacatttgcaagtgctctctggtttcagagattgtgcattttttcccttgtcccggatgcacatgggtagttaagagctaatgttgccttctgggaactattagttgaaaaaatagcttttacataggcaaatttaaatagagggatgtaaattacatcagtgatggaaagggtagactttggagggctagatggggtcttagagaatttctagtcagatgaggaataggcaaggtgagaaatgtgtctgcagctacagaacccattaatgacaagcatgcagagcactcctctgtcctctaattcccaaattcttccttgccactctaccacctcttatcaatactaatcatttttcattccatctccagtatccagagaggaaggtattttaattagtcccttctaattatgtgctccttttttccaccccattttgtcacctaataaaccctaataaggtccctttgtagaaatgggaaacagtgtctgaagtatccattgctaggctaggaactctcattccttctgcataagctgactgactcaactaaagaaacgcatctcactttttccccatcccatcttgactgtgctattccaaacgccaccttggtctaacacagggctcaccatttcagataggagcgtgttgcatgcacacatgcagcaccaaggccaatgcgtagcacacagtaggtaatcaccccagccagaagccatctttcccgtggtgtctctagtctctgctagtcaggttacgcttgtcagcactgccctgtgatatttccatgtatagacatatttatctcctcaactagatagtaagtaagctttggggcaaagaagccatgactaatacattttgtttccccacagtatctgcctagtatcttgtacgtaatttgcacctgataaaaatggttgattatgaacaatttccttgaggaaattaccttaagggtgctaaagaggaaagcctggaaattctagtacttgtgaggacttatgaataagcacgggccttacaaacctttctgaaactcagcccaaactgaggcctataaattgagattgttaggatttaatatgagtagatctggttttgctagccacggtgtacatgttttctttgtctttctcccgctgttgtgttctggttgtttaggacccattgggcttgtaatacagaattgtcaagcactccctaccctgagtaagaagctttccggctgctcaggagtctctggctggaaggccatacttaagctactaggctaccccgccttgagcttcgcttggctttgtactattctaccagtttggctggctgcctggccataagtaactctgactatgtttgtagcctggagagaatctcccagacaagtttgatgtctaggggcacagtaacatgacatccatgttattgacttacgaacttactctagcaaggcagtacccaggcaacccacagccattgtagaggtgtggttgtttcctgaaatggcccaatctcatgctcttcctgtgttgacatcaagcaccgacagctttttatgaaagtctctttagccaggaaggctgaagtagtgacacagcagcattgttcagttcggaatagttaacagtggtttcagagtttggctggaatcttgggtcttgatgaaacacattgtacccattcctgtctcaagccaggccctagcagaattagtgacctaaagctttcatttaagtagtattttaatgtttccagacatagccaagctaaagactttaaagcaacctaaagaaccagaggagatgggaggagtacagttcaggagtcggatggctctgagtttaaagccaggccatgctactgtgcagctggtgattttgaataaagcggtgtacttctctgatccttgggttcttagtagagctacctctgagactaatcttgtgagttaagctctgtaaagcacttggcaccttgtatgtcacaaagaaggccttcacggatgcagtggctcacgcctgtaatcccagcagtttgggaggccgaggtaggtggatcacctgaggtgaggagtttgagaccagtctggccaacatggtgaaaccccatctttattaaaaatgtaaaaattagccaggcaacgtggcatgtacttgtaatcccagctactctggaggctgaggcagaagaatcacttgaacctgggaggtggaggttgcagtgagctgagatcacaccactctactccagcctgggcaacagagcgagactacgtctccaaaaaaaaaaaaacaacaacaacaacaacaacaacaggctgggcgcagtggctcacacctgtgacctataatcccagcattttgggaggccaaggtgggcagatcacctgaggccaggagtttgagaccagcctggctaacatggtgaaaccgcatttctactaaaaatacaaaaaaattagatgggcgtggtggcgcacacctataatcctagctactcaggaggctgaggcaggagaatcacttgaacccaggaggcggaggttgctgtcagccaagatcacgctgttgcactccagcttgggcaacaagagcgaaactctgtctcaaaaaaataaaaaaataaataaataaataaagcctacagtagccattattgtatttcttcagccttttcccaccttaccctctcgtttccagccacccaagcagttgctgcaggccaggttccctcactgcctggattgggtttttattttgtcccctgtgctttttctcatattgccacag

SEQ ID NO: 735269 - DNA, 1634 bp, Homo sapiens
cggcgaggtcggtcattctgcctgtccggtagcaccacgaaacacctgccactgacacctccccaccagcccccgagggttcgcgcaggcatcccgagccgcgccccctggtccgccgcagccagattccctcccgggcgggttacgcccctaggcgcaaaacggaaccactccgtatgaagaagacaaagtataaccagtcacaccaaagagaggcagcattatttagacagccggctactcccccagagactccacccagtcccctgggcccggcgtccagcgcgcagacggtgcccggctccaggagttccagctccctccacgtgtcctgtcttcccagcagcctcctctgccgcctcgggaggaaaatctcctgacaactcgcggtctgcggactacgactcccaggaggcgccgcgccgcggctctccccgcccccccccgcccccccccccctccccgggacgcgcaggcgccttgggctccgtcaacaagccgggctggcgtcgcctggatgcggtttcttccgggatttgtagtttttctggagctacccgggccgtctgttagagggacaagaactacaagtctcggctgccccagcgctgcgagcctggtcacgtggcgggggccgaccgggcgtgcgtgccgccgttgatccggtgctgcagtgaggagcgtggttcttgcccgtgttgtgtgtgtgtgtgagtgagagagcgagtgagtgagtgagtgagtgtgtgtgtgggggggactcggcttgttgttgtcggtgacttccccctccccttcaccccttcccctccccgccgccgctgcagtggccgctccctgggccgtaggaaatgagcgataacgatgacatcgaggtggagagcgacgaagagcaaccgaggtttcaatctgcggctgacaaacgggctcatcataatgcactggaacgaaaacgtagggaccacatcaaagacagctttcacagtttgcgggactcagtcccatcactccaaggagagaagggaacaaagatgaagttaaccctcccacctgtctttccttatgaacacttgccttttccaactgttttctgccatggctaatcagaaaaagtttcttaaggaaatggtggcaaaaaaaaaaaaaaaaagacacaaaggtaacaaacaaagctggacctatttataatgttccagtaagcagaagtacctagagactgacttgctaggatttagtctgttagaagatctcaagaagtcaagagacatgatgaaggaggaaaggctgaacttcagacctgcaacttcccagccagagtgaatcagccagtgacctaaccacactttgttcagagatgtcaaggaaaagtgttctctcggccaggtgccatggctcacagctgtaatctcagcactttgggaggactgcttgaggccaggagctcaagacaagcctgagcaacacagtgagacccccatctctacaaaaaataaaaacaaaaataaaataagctaggcatagtgatgtgttcccatagtcccagctactgcggaggctgcactgaaaggattcgcaggaattcaaggctgctgtgggctatgatcagggcactgcactccagcctgggcaacaga

SEQ ID NO: 735270 - DNA, 10430 bp, Homo sapiens
cggcgaggtcggtcattctgcctgtccggtagcaccacgaaacacctgccactgacacctccccaccagcccccgagggttcgcgcaggcatcccgagccgcgccccctggtccgccgcagccagattccctcccgggcgggttacgcccctaggcgcaaaacggaaccactccgtatgaagaagacaaagtataaccagtcacaccaaagagaggcagcattatttagacagccggctactcccccagagactccacccagtcccctgggcccggcgtccagcgcgcagacggtgcccggctccaggagttccagctccctccacgtgtcctgtcttcccagcagcctcctctgccgcctcgggaggaaaatctcctgacaactcgcggtctgcggactacgactcccaggaggcgccgcgccgcggctctccccgcccccccccgcccccccccccctccccgggacgcgcaggcgccttgggctccgtcaacaagccgggctggcgtcgcctggatgcggtttcttccgggatttgtagtttttctggagctacccgggccgtctgttagagggacaagaactacaagtctcggctgccccagcgctgcgagcctggtcacgtggcgggggccgaccgggcgtgcgtgccgccgttgatccggtgctgcagtgaggagcgtggttcttgcccgtgttgtgtgtgtgtgtgagtgagagagcgagtgagtgagtgagtgagtgtgtgtgtgggggggactcggcttgttgttgtcggtgacttccccctccccttcaccccttcccctccccgccgccgctgcagtggccgctccctgggccgtaggaaatgagcgataacgatgacatcgaggtggagagcgacgaagagcaaccgaggtttcaatctgcggctgacaaacgggctcatcataatgcactggaacgaaaacgtagggaccacatcaaagacagctttcacagtttgcgggactcagtcccatcactccaaggagagaaggtgagtttcctgagaaagctgagtagctggccactactagcttggaacttgttgcagagcttagcagagcactcacctattgggaaggaaatgtagtcagagatattcaggtagcatggttgccttatttttgactgtttggaggatcactgcacaccttacgtactccagtttatccttaacaaaatatgtcagatataatggagctatttgtgagataatggtaggagttatcttttaaaatttgtattatttgtaataaattcaagaaattataactatacactatagtataaagagtggccaagagttcgtttgggataacagtaaagattccagaggtcattaataccctagacctccatgagaattcctttcctatggttcaaagttaatactttattgtaaatgagcacttgcagaaatgtgtgtaatgtatgtgaaaaacaacctgggcaccattgattttccagccccaataattgttatttccaaggcgtataaagagcattttaagctgtgggacaaaagacttgagtgaagagacatgttcatgtgaaacagaaaaaaaataaccattcttccccactcccttctggaacctagtgttttccctggagggctaggcaccagctgtttctacatttgaaaaacaaaattagaagctttgagtaaaagcctatgggttagggtcactccctggaatttggagaaaacatctgcatggctagttccatccttgacagagagtgtagttgtctgtagcaattcattggaataactggcaagctgggaagaggacctgtgtttttgctttagtgatccagtgttttataaagaaggaactattctgttaagaacaatctttgcttttgggtgcactttgatttagttctgtggtgggggtcctggatttgtttggttatccaagatcaaatttggaacccttatgctttcattttttatattgtcactctggtaagttatggcctctatactttatctaaggtgtggctttccatgtggcgtaaacatggagaagttctgacctttataaagaacaaaacaggccatgtacatacctggtattgcaaaaccagaatttgccatgggttaagcctacttagtgtggacttgatttaatgaccttaaaccaaggtacttacctggaataacaaccttcctgggtacaacactaagtaccacggaaatctttatgactagagacagactcacccctttagtcaaagtaaacacatgccaaagattatctcttaggcttctttgacctgttgacagttggtgcttattcctgtaccatagtatcaattaaaattgctttggtaaactatatggaaaagagctgccttctcctaagtctcacctaaccaggagtggcactggggcagtgtttctcaaggggtgagttgcggaccacccacatacgattcactactgaatcagcctttctggatggaaacctgggaatctgtatttataacaagcagtcagatgattcttaggcattcttaagtttgaatacattgggagaggtgggtcataggatcacaactataccttttccttatccagcctattttacaatgccataacattcttccttaagtccttataattacattattctaaatcctattttctcctttctttcttcaaggaagttaaaggtttgaatttggtagtcttacaaatggaatagtctgtcatttgttgtggctcatttatttactcattcatgccattcaacacatacttactgagggtctgctacatgccaggcactatcctagatactgggagtacagcagtaaacaaaacagacaataacaggagctcttgctctgatgaggaaatgattaaaaaatgaagtaagaatttaaaatatatgtattatgtcaggtaagtaccatggagaaaaacagagaagaagagttgcaattttaattatggcagagaagaagagtgttgctggcaaggtgacattttagcaaagctttgaacaaagtgaagcaaagagtagtgcatctgtctggtaatgagcattccaggcagagggaatgcaagtgtggtagcactgagacaggaacctgtaagcattcctgggccaggcagggaaaacagaggccagagtgggtagagtggaatgagtgaagggatggtggcaggagatgctggcagaaaagtagcaggactaggagagaggagtggtccaggggaaccagattctagagccagtcaacaaaaccccaatttgagaatttactagataccattctaatttcagaatcctcctatcctgtgttataatccaaatatgtcctactgacagtgaatgaaggaaatgtctataagctctcaacctcttcctctttaaaaagcgagctgccagcgctgtttcataggtgccgtgagtcgaacagaatattttggtcccttagacttatcagttctcactaaacctggcgtttttttaagtgtggtatttgaactaaaggaaataggctcattcttagattgtggtaattaaggttatgacattatgtaaataatcatgaaatgattattttaccatgtgagttttgggaaacttagattcttaaagggaaagcctttgatttgggtctctctgtgttccagtctcctttgacttaagcatctttatgtttcagctgacttctcccttagcatttggattatctgtcatatgcgtcctaagccttttgttttttaaagagaaagcaatatgttaattgaattggatcctaaccaataataggggatacttgtgtaaaaaagaaagaaagctttaaatgtgggacccaaactctatttaccctttgttttctgtatttctactataaattaaacattttaaaaaatggttggctgggcatggtggctgatgcctgtaataccagcactttgggagacaggcaggtggatcgcttgaacccaggcgtttgagaccaacctaagcaacaaggcaaaactgcatctctacaaaaaatacaaaaattagttgggcgtggtgatgcttacctgtagtcctggctacttgggaggctgtggtgggaggatcacttgagtctgggaggtccaggctgcagtgagctgtgatggcaccgctccagcctggatgacagagtgagaccctgtctcaaaaaaataaaaaataagaattacctttttcttgaggaaaaaaatcagtaataattgacattgtattgcaatgtaaaattaaatccacacagcagttgtataaggtatggtactgttatttgacagttagttattactgctgttgctcctgtcagtgttgttaacaggctcaagatcactatcccatctgtaacaggacaggggctagaactcaggattgccagttgcaagttccatctttttcctataccatatgtgtaagcagtttaaggatattttaaagaaatcttgcttaaatacttgtatcttgtcattgtcctgggagcttcccctggataggcctattaatcttggcagtgtgtcataccacggctactacagaaatgctatcctctgaggtggcgtatgtaggtaacactgaaatgcagggtattaaggatcatttaaagcctataatttctttctgagttcacatagttgctctgagctcaagaaaatagaccattacagttggtggttcatttgggttttgccataggtcccagagttagcaagtagaccctcgaactctgttgtttgagtcttttgtgttccttgcagtttctcaactgtatgtggagttccactgttgttccactgggaacaataggatggaattagaatcatcagccagccaaccagagtaatggagtaagggcaagatcaactgtggccccctccccgctttttttttttttttttttttttttttttttttttttttttttttttacagagatgctacttttatagaaagtattatttaagtgtccttgcttgggtactagggagtgttacacaatggttcactggcactaagctcaccatacttatgttggggagcaagacctgatagccagcctttacatgggagtataattctgtcctccatctcataagccccagtacctgagccagaatgattataaccaaccacactgtctctttatcatggatggctttagcagtaggttattttcatcattgccatttgtagctctacagtggtttatagtaatttctcatcttttaagtctctccctcagtgcctgttgttatcaaactcattgctctctcaggcagttgagctctgcatttctcccttatggggagagctgtgttggagagagagaatataacttcaaatgaaaataaagaaaaacagaatttcttgattttgaggtgagaatttgagggcactgcctctgtcagttcctatcacagattctggcacatagtaggttctcagttagtaaattgtggtggagagagagagccagaggaaacagcaggcttgctcagccattaaagaaaacagcaacagtcaatattatgtgctcaactatataagtaagaccttgtgagtgctgtagaggttaaaagacataatagatggtgtctacccttgagggtcttgctctgttgttgggaaagaggattacatctaacaattaacaataatgagataacatgctgagcatcagataagagctttacattgagttaatctcagtttcatttccattaaaatctggttttcttaacaggtagatgttgaaaccaaatataatagttcccttatggcagggaacatgattcttaaggataaaggctctcatagcatttatacttttatgtacacacatttatatattatacttaatatatgaggttttatatatatttgtgtgattattaaatgactgtctgctggcactacactacaataagtaccgtgaaggcagggagaatgtctccttttggttatatttcttccctcagtgcctgcacatagtagggagcatagtgaatatttattaactgaggggaggaatcccccatcaacctggccacattattttgggagatggctcattcctgttgatgcgtttaaggctgacagttcattcggtaacctatgtctatagcatatctgagctgctagagggattgtcgtttaaatgaaatgtaaactatagccctatccacttctcctcattactcattaaggttatattagctagtcagactccaacttgggcaattatctttttaaagtttctacatcttaaattgttgcccatagttgcccaagtctcccttaggctccaggctcagcaattgtaaatgcatttaatttcttataaattatttgcatgctgctgaaaacctccaagggcttttcattgcccatttaggtaaggactggtattccatgttctgtaaataagatacccagcttacctacctgctttttcgcctccttcctgacattaaccttccagttactatacacccttgtattagtccgttttcgtgctgctgataaagacatacctgagactgggcaatttacaaaagaaggaggtttagtggacttacagttccacgtggctggaaggaagcctcacaatcatggcgaaggcaaggaggagcaagtcatgtcttacatggatggcagcaggcaaagagagagagcttgtgcagggaaactcctgtttttaaaaccatcagatcttgcaagacttattcactatcacgagaacagcatgggaaagacctgtccccgtgattcaattacctcccaccgagttcctgccacaacacatgggaattacaattcaagatgagatttgggtggagacacagccaaactatattattctgctcctggcccctcccaaatctcatgtcctcacatttcaaaaccaatcgtgccttgtcttaactcatttcagcattaactcagaagtccacagtgcaaagtctcatctgggacaagacaagtcctttctgcctatgagcctgtaaaatcaaaagcaagttagttacttcctagatagagtgggggtacaggcattggataaacacagccattccaaatgggagaaatcggtcaaaaaaaggggctacaggcctcatgcaagtccaaaatccagcagggcagtcaaatctaaaagccctgtaatgatctcctttgactccatgtctcacatagaggtcatgctgatacaaaaggtgggttcctttggtcttgcatagctctacccttgtggctttgcaaggtacagcctccttcctggctgctttcacaggctggcattgagtgtctgcagcttttccaggtgcacagtgcaagatgtcagtcagtggatctaccattctggggtctgcaggatggtggcactcttctcacagctccactagagagggccccagtagagactgtgtgggggctctgaccccacatttcctgtctgcactgccgtagcagaggtcctccatgagggccctgtcccttcagcaaacttctccctggacatacaggtgtttccatactccatcctctgaaatctaggcagaggttcccaaaccccaattcttgacttctgttcactcccaggctcaataccatgaggaagctgccaaggcttggggctggcaccctctgaagccgcaacctgagctctgcattgggccctttcagccacgactggagtggccgggatgcagggcaccaagtccctaggctgcatacaacctgtggaccctgggcccagcccacaagaccagtttttcctcctaggcctctgggtctgtgatgggaacagctgctgtgaagatctctgacatgccctggagacattttccccattgtcttggggattaacattcggcttctcattacttatgcaaatctctgcagctggcttgaatttcttctcagaaaatgggattttcttttctatcacattgtcaggctacaaattttctgaacttttatgctctgcttctcttataaaactgaatgccttttacagcacccaagtcacctcttgaatgctttgctgcttagaaatttcttcctccagataccctaaatcatctctgtgaagttcaaagttccacttatctctagcgtaggggcaaaatgctgccaatctctttgctgaaacgtaacaggagtcacctttgctctagttctcaacaagttcctcatctccatctgagaccacctcagcctggactttattgtccatatcattatcagcattttgggcaaagccattcaacaagtccttaggaagtttgaaactttcccacatttttctgtcttcttctgagcccttcaaattgttccaacctctgcctgttacctagttccaaagttgcttccacattttcaggtatcttttcagcagtgccctactctactggtaccaatttactgcatttagtccattttcatgctgctgataaagacatacctgagactgggcaatttacaaaagaaagaggtttaatgacttacagttacatatggctggggaggcctcacaatcatggtggaaggcaaggagaagcaagtcacgttttacatggatggcagcaggcgaagagaacttgtgcagggaaactgctgtttttaaaaccatcagctctcacgaaatttattccctatcacaagaacaacatgggaaagaccaacccccatgattcaattactgctcactaggttcctcccccgacacatgggaattgtgggagttaaattcaagatgagatttgggtagggacacagccaaaccatatcaacccctcttctgtttgcccaggaatttcattctcagcttatctgagtgctttgcttttctcaaggtccaaccccagccacactgcccaggtgacttgggggttccatattgatgagccctgctcacaaggcctacctgcagcctgtcctctatttcctgagttccccccttccctcagtctccagctccttgccttagaggccaatatcaaatactgcccctcccttagaactctcccttgaacctctgtggccttttgtgggacctctcctcagtctccctaatttctgtgattaacttatcacctaattaaatggtatgctcctgtagggcagaaatctaattattccttctgggagactgtcatacagaatgagagaggtctcactcccccaagagtactagagagctcttcacctaacatttttcgcatcttgagattcggaaggatagagattgattactaggccttgcctttagcatttttgttttctccaacaaaattgcaaaaactttagaaaaatgggaagaagaaaaaacatgaatccctccttcctctaacacaactacagccttccctttggctatgacaaatgctgcccaacagaaatttagcatgagtcacaattgcattttaaatataacttaaatacaattaaattttcgagtagaaccaattaaaaagttaaacaggtgaaaatttgaataatataatttatttagcctaatattcaaaagtaagtatgatctcaacatgtaatcaatatatttaaaattatttattcaccaagtctttaaattcaacttaacagcacatctcaattcagagtactcacatttcaagtgtttattagccacatgtggctagtgactatcagatcagatagtataatccaaaaatagactctccgtaccccccctgccccatttaatgtgactaaaattagacatcatcttaaagtggatgtgaaaagaaacctgcctcctttttttctccccaaaagctgctattgttcaatccatggatttattgatggagtctaacaagcaaggaaatatagtgttatcaatttgtgtattccttcctggtctcttcatctacatgctccccacagggaaagtactatttatagcttgctgcttttacataatatattttttcgctaggtcatacagtgtgctcatgtttagtcattaggcatgtttcttttgggcaattggggttgcattcaatttttaaaatttaaaatttataattataatatggacatctctgtatatgtagccatttccatagactccaagaagttggatttctgggttgaggggtgcgagcatctgacctttttccgtgtgttgccaaaatgctttccaagaggattgtttttatatcctctttcttccatttctttctttttttcaagcaaattctaaagagtagtcttttggtagtgttttgagagtaccagtttcattatcactggaatttttttttttggaagagggtaactaattcagtaaacaaaagttagtaattttgtattctatttattacttgtgaaattaattgcttttccacatgtttatttactag

SEQ ID NO: 735271 - DNA, 7284 bp, Homo sapiens
cggcgaggtcggtcattctgcctgtccggtagcaccacgaaacacctgccactgacacctccccaccagcccccgagggttcgcgcaggcatcccgagccgcgccccctggtccgccgcagccagattccctcccgggcgggttacgcccctaggcgcaaaacggaaccactccgtatgaagaagacaaagtataaccagtcacaccaaagagaggcagcattatttagacagccggctactcccccagagactccacccagtcccctgggcccggcgtccagcgcgcagacggtgcccggctccaggagttccagctccctccacgtgtcctgtcttcccagcagcctcctctgccgcctcgggaggaaaatctcctgacaactcgcggtctgcggactacgactcccaggaggcgccgcgccgcggctctccccgcccccccccgcccccccccccctccccgggacgcgcaggcgccttgggctccgtcaacaagccgggctggcgtcgcctggatgcggtttcttccgggatttgtagtttttctggagctacccgggccgtctgttagagggacaagaactacaagtctcggctgccccagcgctgcgagcctggtcacgtggcgggggccgaccgggcgtgcgtgccgccgttgatccggtgctgcagtgaggagcgtggttcttgcccgtgttgtgtgtgtgtgtgagtgagagagcgagtgagtgagtgagtgagtgtgtgtgtgggggggactcggcttgttgttgtcggtgacttccccctccccttcaccccttcccctccccgccgccgctgcagtggccgctccctgggccgtaggaaatgagcgataacgatgacatcgaggtggagagcgacgaagagcaaccgaggtttcaatctgcggctgacaaacgggctcatcataatgcactggaacgaaaacgtagggaccacatcaaagacagctttcacagtttgcgggactcagtcccatcactccaaggagagaagctctatttcctcttttggaaattgtgtactcctgtccttcatcgtcaaagtttgatgcagaaatgccacaccttcatttcaagctaccaagtgcacaagaaaaaagaatgcaagatttaaaaaatgattgttttgaccccttacacaaatgtcttactcctggctttaattaagctgcttgagggctgatagctctgccttaccctggtaatcagcaaaatggtcctgtggctggggaggccctggcagcaggaagccttcaaggagccatgggtctgtgctgactctggccttacaaccttccagcctcctttgctggcattgatggggttccatttttgaatgaactagtttaatgtggatccaaatttattgtgcatattctttcgttttggttttcaaaagatggcttattcacatggaaatgtacaccagtttagccctgggccctccctttaccttcatatgtgtaaaagcttacacaggtttcagaaaataaatggtttcattttctctaaaataactagtacaaaataaaacagatgtcagttgttgaaaaagcagtacctcttttttcatccctccagatatggcattttggttcttaggggaacaagacagctgtaacatcagcccactggcatctgttttgggcactgaagaggaaaagtgttcagtagagttaagattattgtttctcacgtcagcattgggaccctagggaagggcagtggtgttcctaatgttaacaatctagcactactattcttttcctcacctctccccacccactttctaaaacaacttgaagttttacagaaatccaagttactgtgataaaatttataactccagaaatatttggaactcttgccttacattgaaaatttttgagaaccattgctttaaatgagatttaataaccttggacttcgtctgaagcatcagtgctaacaacttcaggagtcatttggggccttaaacggttctatttagaatccaagtcttttgggtctgaggccttttgtgacatatgtagtcagttcttgctgtgatgtgtggggtgggtggatgctgttcaaaagcagaggtctgacagtgggtgcctctgcttgagagggttggccttccctctgtctgcttactgccttgggagggaatgcaaatggacacgtagctgcagcataaacagtaggagggacaggaacctggcagaccctctgccacaccctgggtcccttctacattattcattttgcttttatccttctgggctgccaagaggtaatgaagccagcagtgtactgtgggaagctgacatcccccacctaaccttccacttctgccctccagaccagatggttaggtcagttctctcaagctcgcttgcatcttgaggcttttcctttcaatgtgtttctgctagaagcctgtttagttctcacctgtctttaaaatagaaagaaaaataaccttccttcaatgctgctatcctgctattacaaactaccatttttcacttttttttttttatacagggtctcactcttttttttcaggctggagtgtgttggcacaagcctgtctcactgcagcttcagccccatgggctcaagagatcctcccacctttgcctcccaagtagctgggaccacattcgtgtaccaccatgcccagctaatcttttgatttttttatagagcccaagtgtcttgctgtgttttctaggctggtccccaacacctgagccctagtgatcctcccacctcagcctcccagggtgctgggattacaggcatgagccactgcacctggcctacttcttacttttcaaccaaattctgaagactagtcttcatcattgcctcacttgcaactcaattcttatgcctgttaccggtgcagagacaatttaccattgggcttcggctgtcactcctccaagaaaaccaccttcactagggtcttccatttgacgtccttgtaggcaaatcaggtgactttcgtagtccttttcctcctccaactttcccctccatgacaacagtgtccctgcaattctattgatctttttaaattagttccatagcttcccctgtgttcccaaagtatgagtgtcctggaggcttggattcaaatcctgactcaacttcctattagtttacataacattgggtaaattacagctctgtgtctcggtttcctcatttataaaatagggaaaacatcagaaggttgtgtgaggatgcctgacacttagtaagtactcagtaagtgttagtgctgccattgttaccacccccatcatcattgtcacttgtgttgctatgtgcagccatggctttggagcaagatctcgcaaggctgcccagtatccctttgtgtggctcccagaggtgagagagaggcctgctgagccctttgcgtttgcttacatggctacatgggaggcctggctacctcttcagtcccttcagccaccatccaccctgtctcagggctccatccaagccatttaaagagccatttctgttcacaaagacagactcaaaattatgattctgctaattataaaaactatcaggaaaaaaattttcaggcttttactgagtacccaaggcagcacttgctctgtggacatgttgacttaccaagttctatctgatcagtcacactcacatgaagataggcagttgactcagctgacttagagcaattttcagaaaacagaaactgaaagtccagggttattccatagtccatgccataaatcccagggtttcttgctggtttcgtgtttgctggtcacatattataaactcataaagacaaggaaggccctgcccccaccttcatcctgtgtttggccacatgatcttgtatggagtggaaagatgggaggggaggattgcaggtgagtctagcatttttagcttcagccttttgctttttctttcctggactacatgcacatgcaaatttggggtatttctgtattttgtgctttaaatttttttcttgttgggccttaattcttgttgggtaccctgggaagagtaaaataaagttaactctgaaccattcttttggacttgctgagggatcagggcaccctaagtgaccaggggcacttctgctttcagcagaggatggaggaagggctgtgcttagcattctgaaggcctcgttctgagtttaaaccaatccagccttctttggactcctgttgttcccaagacactatgttctgaacatctatgaattttatcttcatccaaaaattaccctgaaatggaaactgccatccctcacagatctttttctctcttctggcttgttttgctgtgcttactgctcacttttcacttcttgatcctaattccctggtttcatgtataaatatttgaaggagaaactggtagcaaaaaggctgttactcagtctggtcattcattaaaagttatcactgaacatttgcaagtgctctctggtttcagagattgtgcattttttcccttgtcccggatgcacatgggtagttaagagctaatgttgccttctgggaactattagttgaaaaaatagcttttacataggcaaatttaaatagagggatgtaaattacatcagtgatggaaagggtagactttggagggctagatggggtcttagagaatttctagtcagatgaggaataggcaaggtgagaaatgtgtctgcagctacagaacccattaatgacaagcatgcagagcactcctctgtcctctaattcccaaattcttccttgccactctaccacctcttatcaatactaatcatttttcattccatctccagtatccagagaggaaggtattttaattagtcccttctaattatgtgctccttttttccaccccattttgtcacctaataaaccctaataaggtccctttgtagaaatgggaaacagtgtctgaagtatccattgctaggctaggaactctcattccttctgcataagctgactgactcaactaaagaaacgcatctcactttttccccatcccatcttgactgtgctattccaaacgccaccttggtctaacacagggctcaccatttcagataggagcgtgttgcatgcacacatgcagcaccaaggccaatgcgtagcacacagtaggtaatcaccccagccagaagccatctttcccgtggtgtctctagtctctgctagtcaggttacgcttgtcagcactgccctgtgatatttccatgtatagacatatttatctcctcaactagatagtaagtaagctttggggcaaagaagccatgactaatacattttgtttccccacagtatctgcctagtatcttgtacgtaatttgcacctgataaaaatggttgattatgaacaatttccttgaggaaattaccttaagggtgctaaagaggaaagcctggaaattctagtacttgtgaggacttatgaataagcacgggccttacaaacctttctgaaactcagcccaaactgaggcctataaattgagattgttaggatttaatatgagtagatctggttttgctagccacggtgtacatgttttctttgtctttctcccgctgttgtgttctggttgtttaggacccattgggcttgtaatacagaattgtcaagcactccctaccctgagtaagaagctttccggctgctcaggagtctctggctggaaggccatacttaagctactaggctaccccgccttgagcttcgcttggctttgtactattctaccagtttggctggctgcctggccataagtaactctgactatgtttgtagcctggagagaatctcccagacaagtttgatgtctaggggcacagtaacatgacatccatgttattgacttacgaacttactctagcaaggcagtacccaggcaacccacagccattgtagaggtgtggttgtttcctgaaatggcccaatctcatgctcttcctgtgttgacatcaagcaccgacagctttttatgaaagtctctttagccaggaaggctgaagtagtgacacagcagcattgttcagttcggaatagttaacagtggtttcagagtttggctggaatcttgggtcttgatgaaacacattgtacccattcctgtctcaagccaggccctagcagaattagtgacctaaagctttcatttaagtagtattttaatgtttccagacatagccaagctaaagactttaaagcaacctaaagaaccagaggagatgggaggagtacagttcaggagtcggatggctctgagtttaaagccaggccatgctactgtgcagctggtgattttgaataaagcggtgtacttctctgatccttgggttcttagtagagctacctctgagactaatcttgtgagttaagctctgtaaagcacttggcaccttgtatgtcacaaagaaggccttcacggatgcagtggctcacgcctgtaatcccagcagtttgggaggccgaggtaggtggatcacctgaggtgaggagtttgagaccagtctggccaacatggtgaaaccccatctttattaaaaatgtaaaaattagccaggcaacgtggcatgtacttgtaatcccagctactctggaggctgaggcagaagaatcacttgaacctgggaggtggaggttgcagtgagctgagatcacaccactctactccagcctgggcaacagagcgagactacgtctccaaaaaaaaaaaaacaacaacaacaacaacaacaacaggctgggcgcagtggctcacacctgtgacctataatcccagcattttgggaggccaaggtgggcagatcacctgaggccaggagtttgagaccagcctggctaacatggtgaaaccgcatttctactaaaaatacaaaaaaattagatgggcgtggtggcgcacacctataatcctagctactcaggaggctgaggcaggagaatcacttgaacccaggaggcggaggttgctgtcagccaagatcacgctgttgcactccagcttgggcaacaagagcgaaactctgtctcaaaaaaataaaaaaataaataaataaataaagcctacagtagccattattgtatttcttcagccttttcccaccttaccctctcgtttccagccacccaagcagttgctgcaggccaggttccctcactgcctggattgggtttttattttgtcccctgtgctttttctcatattgccacag

SEQ ID NO: 735272 - DNA, 10403 bp, Homo sapiens
cggcgaggtcggtcattctgcctgtccggtagcaccacgaaacacctgccactgacacctccccaccagcccccgagggttcgcgcaggcatcccgagccgcgccccctggtccgccgcagccagattccctcccgggcgggttacgcccctaggcgcaaaacggaaccactccgtatgaagaagacaaagtataaccagtcacaccaaagagaggcagcattatttagacagccggctactcccccagagactccacccagtcccctgggcccggcgtccagcgcgcagacggtgcccggctccaggagttccagctccctccacgtgtcctgtcttcccagcagcctcctctgccgcctcgggaggaaaatctcctgacaactcgcggtctgcggactacgactcccaggaggcgccgcgccgcggctctccccgcccccccccgcccccccccccctccccgggacgcgcaggcgccttgggctccgtcaacaagccgggctggcgtcgcctggatgcggtttcttccgggatttgtagtttttctggagctacccgggccgtctgttagagggacaagaactacaagtctcggctgccccagcgctgcgagcctggtcacgtggcgggggccgaccgggcgtgcgtgccgccgttgatccggtgctgcagtgaggagcgtggttcttgcccgtgttgtgtgtgtgtgtgagtgagagagcgagtgagtgagtgagtgagtgtgtgtgtgggggggactcggcttgttgttgtcggtgacttccccctccccttcaccccttcccctccccgccgccgctgcagtggccgctccctgggccgtaggaaatgagcgataacgatgacatcgaggtggagagcgacgctgacaaacgggctcatcataatgcactggaacgaaaacgtagggaccacatcaaagacagctttcacagtttgcgggactcagtcccatcactccaaggagagaaggtgagtttcctgagaaagctgagtagctggccactactagcttggaacttgttgcagagcttagcagagcactcacctattgggaaggaaatgtagtcagagatattcaggtagcatggttgccttatttttgactgtttggaggatcactgcacaccttacgtactccagtttatccttaacaaaatatgtcagatataatggagctatttgtgagataatggtaggagttatcttttaaaatttgtattatttgtaataaattcaagaaattataactatacactatagtataaagagtggccaagagttcgtttgggataacagtaaagattccagaggtcattaataccctagacctccatgagaattcctttcctatggttcaaagttaatactttattgtaaatgagcacttgcagaaatgtgtgtaatgtatgtgaaaaacaacctgggcaccattgattttccagccccaataattgttatttccaaggcgtataaagagcattttaagctgtgggacaaaagacttgagtgaagagacatgttcatgtgaaacagaaaaaaaataaccattcttccccactcccttctggaacctagtgttttccctggagggctaggcaccagctgtttctacatttgaaaaacaaaattagaagctttgagtaaaagcctatgggttagggtcactccctggaatttggagaaaacatctgcatggctagttccatccttgacagagagtgtagttgtctgtagcaattcattggaataactggcaagctgggaagaggacctgtgtttttgctttagtgatccagtgttttataaagaaggaactattctgttaagaacaatctttgcttttgggtgcactttgatttagttctgtggtgggggtcctggatttgtttggttatccaagatcaaatttggaacccttatgctttcattttttatattgtcactctggtaagttatggcctctatactttatctaaggtgtggctttccatgtggcgtaaacatggagaagttctgacctttataaagaacaaaacaggccatgtacatacctggtattgcaaaaccagaatttgccatgggttaagcctacttagtgtggacttgatttaatgaccttaaaccaaggtacttacctggaataacaaccttcctgggtacaacactaagtaccacggaaatctttatgactagagacagactcacccctttagtcaaagtaaacacatgccaaagattatctcttaggcttctttgacctgttgacagttggtgcttattcctgtaccatagtatcaattaaaattgctttggtaaactatatggaaaagagctgccttctcctaagtctcacctaaccaggagtggcactggggcagtgtttctcaaggggtgagttgcggaccacccacatacgattcactactgaatcagcctttctggatggaaacctgggaatctgtatttataacaagcagtcagatgattcttaggcattcttaagtttgaatacattgggagaggtgggtcataggatcacaactataccttttccttatccagcctattttacaatgccataacattcttccttaagtccttataattacattattctaaatcctattttctcctttctttcttcaaggaagttaaaggtttgaatttggtagtcttacaaatggaatagtctgtcatttgttgtggctcatttatttactcattcatgccattcaacacatacttactgagggtctgctacatgccaggcactatcctagatactgggagtacagcagtaaacaaaacagacaataacaggagctcttgctctgatgaggaaatgattaaaaaatgaagtaagaatttaaaatatatgtattatgtcaggtaagtaccatggagaaaaacagagaagaagagttgcaattttaattatggcagagaagaagagtgttgctggcaaggtgacattttagcaaagctttgaacaaagtgaagcaaagagtagtgcatctgtctggtaatgagcattccaggcagagggaatgcaagtgtggtagcactgagacaggaacctgtaagcattcctgggccaggcagggaaaacagaggccagagtgggtagagtggaatgagtgaagggatggtggcaggagatgctggcagaaaagtagcaggactaggagagaggagtggtccaggggaaccagattctagagccagtcaacaaaaccccaatttgagaatttactagataccattctaatttcagaatcctcctatcctgtgttataatccaaatatgtcctactgacagtgaatgaaggaaatgtctataagctctcaacctcttcctctttaaaaagcgagctgccagcgctgtttcataggtgccgtgagtcgaacagaatattttggtcccttagacttatcagttctcactaaacctggcgtttttttaagtgtggtatttgaactaaaggaaataggctcattcttagattgtggtaattaaggttatgacattatgtaaataatcatgaaatgattattttaccatgtgagttttgggaaacttagattcttaaagggaaagcctttgatttgggtctctctgtgttccagtctcctttgacttaagcatctttatgtttcagctgacttctcccttagcatttggattatctgtcatatgcgtcctaagccttttgttttttaaagagaaagcaatatgttaattgaattggatcctaaccaataataggggatacttgtgtaaaaaagaaagaaagctttaaatgtgggacccaaactctatttaccctttgttttctgtatttctactataaattaaacattttaaaaaatggttggctgggcatggtggctgatgcctgtaataccagcactttgggagacaggcaggtggatcgcttgaacccaggcgtttgagaccaacctaagcaacaaggcaaaactgcatctctacaaaaaatacaaaaattagttgggcgtggtgatgcttacctgtagtcctggctacttgggaggctgtggtgggaggatcacttgagtctgggaggtccaggctgcagtgagctgtgatggcaccgctccagcctggatgacagagtgagaccctgtctcaaaaaaataaaaaataagaattacctttttcttgaggaaaaaaatcagtaataattgacattgtattgcaatgtaaaattaaatccacacagcagttgtataaggtatggtactgttatttgacagttagttattactgctgttgctcctgtcagtgttgttaacaggctcaagatcactatcccatctgtaacaggacaggggctagaactcaggattgccagttgcaagttccatctttttcctataccatatgtgtaagcagtttaaggatattttaaagaaatcttgcttaaatacttgtatcttgtcattgtcctgggagcttcccctggataggcctattaatcttggcagtgtgtcataccacggctactacagaaatgctatcctctgaggtggcgtatgtaggtaacactgaaatgcagggtattaaggatcatttaaagcctataatttctttctgagttcacatagttgctctgagctcaagaaaatagaccattacagttggtggttcatttgggttttgccataggtcccagagttagcaagtagaccctcgaactctgttgtttgagtcttttgtgttccttgcagtttctcaactgtatgtggagttccactgttgttccactgggaacaataggatggaattagaatcatcagccagccaaccagagtaatggagtaagggcaagatcaactgtggccccctccccgctttttttttttttttttttttttttttttttttttttttttttttttacagagatgctacttttatagaaagtattatttaagtgtccttgcttgggtactagggagtgttacacaatggttcactggcactaagctcaccatacttatgttggggagcaagacctgatagccagcctttacatgggagtataattctgtcctccatctcataagccccagtacctgagccagaatgattataaccaaccacactgtctctttatcatggatggctttagcagtaggttattttcatcattgccatttgtagctctacagtggtttatagtaatttctcatcttttaagtctctccctcagtgcctgttgttatcaaactcattgctctctcaggcagttgagctctgcatttctcccttatggggagagctgtgttggagagagagaatataacttcaaatgaaaataaagaaaaacagaatttcttgattttgaggtgagaatttgagggcactgcctctgtcagttcctatcacagattctggcacatagtaggttctcagttagtaaattgtggtggagagagagagccagaggaaacagcaggcttgctcagccattaaagaaaacagcaacagtcaatattatgtgctcaactatataagtaagaccttgtgagtgctgtagaggttaaaagacataatagatggtgtctacccttgagggtcttgctctgttgttgggaaagaggattacatctaacaattaacaataatgagataacatgctgagcatcagataagagctttacattgagttaatctcagtttcatttccattaaaatctggttttcttaacaggtagatgttgaaaccaaatataatagttcccttatggcagggaacatgattcttaaggataaaggctctcatagcatttatacttttatgtacacacatttatatattatacttaatatatgaggttttatatatatttgtgtgattattaaatgactgtctgctggcactacactacaataagtaccgtgaaggcagggagaatgtctccttttggttatatttcttccctcagtgcctgcacatagtagggagcatagtgaatatttattaactgaggggaggaatcccccatcaacctggccacattattttgggagatggctcattcctgttgatgcgtttaaggctgacagttcattcggtaacctatgtctatagcatatctgagctgctagagggattgtcgtttaaatgaaatgtaaactatagccctatccacttctcctcattactcattaaggttatattagctagtcagactccaacttgggcaattatctttttaaagtttctacatcttaaattgttgcccatagttgcccaagtctcccttaggctccaggctcagcaattgtaaatgcatttaatttcttataaattatttgcatgctgctgaaaacctccaagggcttttcattgcccatttaggtaaggactggtattccatgttctgtaaataagatacccagcttacctacctgctttttcgcctccttcctgacattaaccttccagttactatacacccttgtattagtccgttttcgtgctgctgataaagacatacctgagactgggcaatttacaaaagaaggaggtttagtggacttacagttccacgtggctggaaggaagcctcacaatcatggcgaaggcaaggaggagcaagtcatgtcttacatggatggcagcaggcaaagagagagagcttgtgcagggaaactcctgtttttaaaaccatcagatcttgcaagacttattcactatcacgagaacagcatgggaaagacctgtccccgtgattcaattacctcccaccgagttcctgccacaacacatgggaattacaattcaagatgagatttgggtggagacacagccaaactatattattctgctcctggcccctcccaaatctcatgtcctcacatttcaaaaccaatcgtgccttgtcttaactcatttcagcattaactcagaagtccacagtgcaaagtctcatctgggacaagacaagtcctttctgcctatgagcctgtaaaatcaaaagcaagttagttacttcctagatagagtgggggtacaggcattggataaacacagccattccaaatgggagaaatcggtcaaaaaaaggggctacaggcctcatgcaagtccaaaatccagcagggcagtcaaatctaaaagccctgtaatgatctcctttgactccatgtctcacatagaggtcatgctgatacaaaaggtgggttcctttggtcttgcatagctctacccttgtggctttgcaaggtacagcctccttcctggctgctttcacaggctggcattgagtgtctgcagcttttccaggtgcacagtgcaagatgtcagtcagtggatctaccattctggggtctgcaggatggtggcactcttctcacagctccactagagagggccccagtagagactgtgtgggggctctgaccccacatttcctgtctgcactgccgtagcagaggtcctccatgagggccctgtcccttcagcaaacttctccctggacatacaggtgtttccatactccatcctctgaaatctaggcagaggttcccaaaccccaattcttgacttctgttcactcccaggctcaataccatgaggaagctgccaaggcttggggctggcaccctctgaagccgcaacctgagctctgcattgggccctttcagccacgactggagtggccgggatgcagggcaccaagtccctaggctgcatacaacctgtggaccctgggcccagcccacaagaccagtttttcctcctaggcctctgggtctgtgatgggaacagctgctgtgaagatctctgacatgccctggagacattttccccattgtcttggggattaacattcggcttctcattacttatgcaaatctctgcagctggcttgaatttcttctcagaaaatgggattttcttttctatcacattgtcaggctacaaattttctgaacttttatgctctgcttctcttataaaactgaatgccttttacagcacccaagtcacctcttgaatgctttgctgcttagaaatttcttcctccagataccctaaatcatctctgtgaagttcaaagttccacttatctctagcgtaggggcaaaatgctgccaatctctttgctgaaacgtaacaggagtcacctttgctctagttctcaacaagttcctcatctccatctgagaccacctcagcctggactttattgtccatatcattatcagcattttgggcaaagccattcaacaagtccttaggaagtttgaaactttcccacatttttctgtcttcttctgagcccttcaaattgttccaacctctgcctgttacctagttccaaagttgcttccacattttcaggtatcttttcagcagtgccctactctactggtaccaatttactgcatttagtccattttcatgctgctgataaagacatacctgagactgggcaatttacaaaagaaagaggtttaatgacttacagttacatatggctggggaggcctcacaatcatggtggaaggcaaggagaagcaagtcacgttttacatggatggcagcaggcgaagagaacttgtgcagggaaactgctgtttttaaaaccatcagctctcacgaaatttattccctatcacaagaacaacatgggaaagaccaacccccatgattcaattactgctcactaggttcctcccccgacacatgggaattgtgggagttaaattcaagatgagatttgggtagggacacagccaaaccatatcaacccctcttctgtttgcccaggaatttcattctcagcttatctgagtgctttgcttttctcaaggtccaaccccagccacactgcccaggtgacttgggggttccatattgatgagccctgctcacaaggcctacctgcagcctgtcctctatttcctgagttccccccttccctcagtctccagctccttgccttagaggccaatatcaaatactgcccctcccttagaactctcccttgaacctctgtggccttttgtgggacctctcctcagtctccctaatttctgtgattaacttatcacctaattaaatggtatgctcctgtagggcagaaatctaattattccttctgggagactgtcatacagaatgagagaggtctcactcccccaagagtactagagagctcttcacctaacatttttcgcatcttgagattcggaaggatagagattgattactaggccttgcctttagcatttttgttttctccaacaaaattgcaaaaactttagaaaaatgggaagaagaaaaaacatgaatccctccttcctctaacacaactacagccttccctttggctatgacaaatgctgcccaacagaaatttagcatgagtcacaattgcattttaaatataacttaaatacaattaaattttcgagtagaaccaattaaaaagttaaacaggtgaaaatttgaataatataatttatttagcctaatattcaaaagtaagtatgatctcaacatgtaatcaatatatttaaaattatttattcaccaagtctttaaattcaacttaacagcacatctcaattcagagtactcacatttcaagtgtttattagccacatgtggctagtgactatcagatcagatagtataatccaaaaatagactctccgtaccccccctgccccatttaatgtgactaaaattagacatcatcttaaagtggatgtgaaaagaaacctgcctcctttttttctccccaaaagctgctattgttcaatccatggatttattgatggagtctaacaagcaaggaaatatagtgttatcaatttgtgtattccttcctggtctcttcatctacatgctccccacagggaaagtactatttatagcttgctgcttttacataatatattttttcgctaggtcatacagtgtgctcatgtttagtcattaggcatgtttcttttgggcaattggggttgcattcaatttttaaaatttaaaatttataattataatatggacatctctgtatatgtagccatttccatagactccaagaagttggatttctgggttgaggggtgcgagcatctgacctttttccgtgtgttgccaaaatgctttccaagaggattgtttttatatcctctttcttccatttctttctttttttcaagcaaattctaaagagtagtcttttggtagtgttttgagagtaccagtttcattatcactggaatttttttttttggaagagggtaactaattcagtaaacaaaagttagtaattttgtattctatttattacttgtgaaattaattgcttttccacatgtttatttactag

SEQ ID NO: 735273 - DNA, 1603 bp, Homo sapiens
cggcgaggtcggtcattctgcctgtccggtagcaccacgaaacacctgccactgacacctccccaccagcccccgagggttcgcgcaggcatcccgagccgcgccccctggtccgccgcagccagattccctcccgggcgggttacgcccctaggcgcaaaacggaaccactccgtatgaagaagacaaagtataaccagtcacaccaaagagaggcagcattatttagacagccggctactcccccagagactccacccagtcccctgggcccggcgtccagcgcgcagacggtgcccggctccaggagttccagctccctccacgtgtcctgtcttcccagcagcctcctctgccgcctcgggaggaaaatctcctgacaactcgcggtctgcggactacgactcccaggaggcgccgcgccgcggctctccccgcccccccccgcccccccccccctccccgggacgcgcaggcgccttgggctccgtcaacaagccgggctggcgtcgcctggatgcggtttcttccgggatttgtagtttttctggagctacccgggccgtctgttagagggacaagaactacaagtctcggctgccccagcgctgcgagcctggtcacgtggcgggggccgaccgggcgtgcgtgccgccgttgatccggtgctgcagtgaggagcgtggttcttgcccgtgttgtgtgtgtgtgtgagtgagagagcgagtgagtgagtgagtgagtgtgtgtgtgggggggactcggcttgttgttgtcggtgacttccccctccccttcaccccttcccctccccgccgccgctgcagtggccgctccctgggccgtaggaaatgagcgataacgatgacatcgaggtggagagcgacgctgacaaacgggctcatcataatgcactggaacgaaaacgtagggaccacatcaaagacagctttcacagtttgcgggactcagtcccatcactccaaggagagaaggcatcccgggcccaaatcctagacaaagccacagaatatatccagtatatgcgaaggaaaaaccacacacaccagcaagatattgacgacctcaagcggcagaatgctcttctggagcagcaaggtgagcacccgagctcgtggggcagctggccctgctgtgctccagccaggtcaggctttggcacctgggcctgcagagtcagagccagtcatggagtatgtgctcagtagcaggcttggtcctgcttcttggggcctgagtaactgagtgttagagccgtcctgaggaaggacctgaggcgccagtgaggagacagtggaagctaggaagttggacatctggagacttgtatcttttctggcctgacctctccccttcttggggctcaggtgctctgcctgcagtagggatcacacctggcatcaggtgtctgaaaagagctttgaggtccttggagtggaatgtgctgtgtaagtaccagagactccaggtgttcagggacagtgagccctccccattgtcaatggtagtccaatcagggcagcctatgggctaggcccatgctgttctcaatgctcacacccgccttttcctacaaccacag

SEQ ID NO: 735274 - DNA, 71445 bp, Homo sapiens
cggcgaggtcggtcattctgcctgtccggtagcaccacgaaacacctgccactgacacctccccaccagcccccgagggttcgcgcaggcatcccgagccgcgccccctggtccgccgcagccagattccctcccgggcgggttacgcccctaggcgcaaaacggaaccactccgtatgaagaagacaaagtataaccagtcacaccaaagagaggcagcattatttagacagccggctactcccccagagactccacccagtcccctgggcccggcgtccagcgcgcagacggtgcccggctccaggagttccagctccctccacgtgtcctgtcttcccagcagcctcctctgccgcctcgggaggaaaatctcctgacaactcgcggtctgcggactacgactcccaggaggcgccgcgccgcggctctccccgcccccccccgcccccccccccctccccgggacgcgcaggcgccttgggctccgtcaacaagccgggctggcgtcgcctggatgcggtttcttccgggatttgtagtttttctggagctacccgggccgtctgttagagggacaagaactacaagtctcggctgccccagcgctgcgagcctggtcacgtggcgggggccgaccgggcgtgcgtgccgccgttgatccggtgctgcagtgaggagcgtggttcttgcccgtgttgtgtgtgtgtgtgagtgagagagcgagtgagtgagtgagtgagtgtgtgtgtgggggggactcggcttgttgttgtcggtgacttccccctccccttcaccccttcccctccccgccgccgctgcagtggccgctccctgggccgtaggaaatgagcgataacgatgacatcgaggtggagagcgacgctgacaaacgggctcatcataatgcactggaacgaaaacgtagggaccacatcaaagacagctttcacagtttgcgggactcagtcccatcactccaaggagagaaggcatcccgggcccaaatcctagacaaagccacagaatatatccagtatatgcgaaggaaaaaccacacacaccagcaagatattgacgacctcaagcggcagaatgctcttctggagcagcaagtccgtgcactggagaaggcgaggtcaagtgcccaactgcagaccaactacccctcctcagacaacagcctctacaccaacgccaagggcagcaccatctctgccttcgatgggggctcggactccagctcggagtctgagcctgaagagccccaaagcaggaagaagctccggatggaggccagctaagccactcggggcaggccagcaataaaaactgtctgtctccatcgtctcatcctcctttcagttcgttggtagagccctcagaaccatttaagagactctttatttttctctttctcccttttttttttaaatttttatttttacgtagaagctcttggacaacagctctcgttctccttccccatttccactgtatattttttaatgtattcccttcagggattccctgtccccaacaggaatttttaaaccaaaacaccccaacttggcagctttttctgtggaggacagacggccggccggacctctgagcacatagtgtcctgcccaccctaccagctcctccagccctgccgggcacatgcccgggggacgcctgccctgcccaggtggcctcctggcccgccctcacctctgatagactttgtgaatctgaactgctctactttgagaagatgaccggtttggagtaatcagaatgaaccctcctcctttttaagggttttttttttttcctttttctaaaaagctatgtatcgctcctattgaaagaccagatccttagagaagtttgtggtatagcttctctcagccagctgtttaagcctgcggcgccagcctcacggagggccgtgtgacactctcgtggtatgtatgggagatggcagcagtgaagcagcagccaccagggagtggccatttggggttgggacagggagggtgttttgggtggcatagaggttttgtattgagggccagtgatgatgttttgatatttatttcctgctacttaaatttgaatctgagtgaattgtacctatttctgatgatgtcggtcttgcaaagcgacagattcataaagtaatgatgaaatctttctttcttcccgtgtgtatttctaagaaatagagccaactgattttgtatgtaaataccaagagcaatttacctggtactaaacccgcaccccagtgcggacccttcccagccctcatcccacttcctttcctactgtcctggaacctgtctccattgtgtgatccagccctggttctggctgtggtcagcagatcccagtgaagggttttgtgtgtttaggcctcatttctttgtctttttcctactccgttcctggcatttgctgatttctagtgtatactctgtagtctcagttcgtgtttgattccattccatggaaataaaaagtatgttgtacatactgccgaagaattgtcttgcaagttaaggcttccccctttactataagactataaataaaaacttattttatcctttcttggtggtggtgtcttcttacccttgttaaggccaaggtggttgatgagagacccctctggaagctgttagggcctcaatgtaagtctgagtgagaagtggaggtggcttacccggtcttgcagaaccaggagcagccataagccagagttgcttcccctttctcagctcagcctgagagagtaaatgggtggtgatggctttgttcattggatgaggcttttgaggttcaacagggatgtagccttagctgtggcaacatttctagatctagtttctgctaagcaagtgacctttgggggaattggtagcccagagctgtggttcaggttctcctggtaatgagtgcccagttcagaggtggctgttctccaggacctttcagtttctagatagttccagtttattaagaggaggcagcagagctgccaaggactggaagtcaagaaggctccaactgcaccgagttagctctactcagactgggacccaacaccagcctgaacttgtttgaccttggaagaaaaaggaattatggccagaacgcagctcagtgttggttttcctgtctggctgacaggaaatactgctgttcctagacccagagaggaagtcaagtcaaatcagttcttggatttgtcaccatctttagagtggtggagagcactgtggctcctatcaattgtatgtcaaatccgtaatatctttttttgtttaatgggagctggggcagatgggtcttgtcaatttgaaacatgatcaagcctccaaaggccatgattacattaaggaaaagaaaaatgctgggaaagcaagatcccatttataaaggcacttcttttcaagatagaggaaagaaactgcagtaaggaagaaatggaaatgagaatcagcttattgcctaaagccctcaaggttaacatgctttcctctttttcattgcccttaactatatctctttgtatatctgggcttaagtatacagttggtttgcttagtattggtgttagaagtgagctgtgggtgaagccatgttgatgcagagatggaaggcatgtgaagctggcacccagtagggagatagcaaacaggaaggggcagtcaagccagcatgaggacaggtggtgtccctgagagccagtccctggctccagtgtattggctggacaaaggattgagtttaggcttctctagatttcagtaaaccagttcagacaaggggcacagtggctaggtggctggttcacctaggaaaatccaaaccacctgattgacatggtgagcggactttggcacagggtggaggtaccactggaagcagcttcctgggcaggaacacagggcaggggagctccgcctggaaactgctcagctgaaaaggccaagtcaaagtcacagccaagcaagccccttctggtatgtgtgtctaggaagcgagtgtgagtattccctcaggataccaaagtcggaccatagcttactctctcacagtaatggtaatctctggtttattttttatattactctggacactcacttacacaaaaccagataagctgtagatttgcttggtcactgtggcaggtggcttcactgaggagtctgttaagcgtgctatttccctacctttacagttgccccaagtgcaagggtatttaaaatggcccagtttttaaagttcttgatacgctaaccccattgtaaaacatcaacaacttcttaggtaaagaatctaagctcacagagctgtcatcttagctgagacaggtttaaaaaacaagactgagtagacaataggagccagagccctgaactgggactgaagtaagcagaattctgtttctgatagtatcatgtgtgttttatgcttggcctctgaaagcagactggctgggttcacagtcctgtctctgccactcggtggctgtgttacttctcccagcctcagcatctttatctataaaatgaggataataatagcactagcctcatgagatggttatgaggcttaaatgagataatgcttataatgtgcttgacctcaggaccaagcaagcactgaggtgcctctgctgtcattatctacacaaagcatgtaaccagggctgactcagcaaggtggaaaaagccagctcccagacacctttcctaaagtgagtaagggttgacttcttggtatatcacaaatgcttcccactcctcagagatgtgccccatccttaccaggcacagtgactaaagagagcaaggtgacaccaggactggactgacaaactcttcgagactaaagcagcccctgtgggtacattaattagatctggtgtcaactcgagtgaggctctgcccattccctcccaccacgattcagtggcatctctcaggtttggacacttttggaggcccaggcagaactgctcagaagccccatgtggtgttactcaaagtgggatccttggatcatgcccagggctgcttgttaaaaggattcctgggctctaacccctctaatctaaagtgtgccgtggctcaccagtcagtttaacaagctctttcaggtggtcctcaagtcactcaggtttgactcccaacagtaatataacccggggaaccaaaaggacgctgttggggaagttaggcacagctgagctgaattagcgaagtggttctgaggtcaggatgaaggtgggggaggcgggcttgttaaatagttcaacccttagagctgccttgatgagtctacgtgctcccagcatgcctccaatgctctagggggctggctgagctacccagtttttaaacttgagaaggaagaaagctgagggctgcctacactagcccctttagaagccccaagcaggggtaatgacatggggcagcactcatttctgtagcatgcctaggctggcctctggtccccaggcaggttttataatccagccagagcaagggtctctctcaggcctggtcaccaggatgcattctcaaaagcctctgggaacatgaaactagagcattcctttcttcaaaactgtttctctagcctgaagaggaaacccaggtaggaaaaaagagtttgtcaatgtctacactgctagatagcgaatagagaatttccttcagtgtctagggtttactagggcagcggctaactcatacatccccaaagttcccttgggaagggaataaaaaatagtttctagttaacttcctcagggagaaaaccaatttggctaagccaggcttaactataggtaggactgggtgactgcaccaggcaggcctgtgcatgggttttggaggctctcctggcaaacccttatcaccctgctggtaagtgttgtccttgcttggtgtttcattggggtcggtgttgggaaggagcccagggagcttcagaatgactgccagagcgggtagggctaggggctctgagcccgcctgtctggactgccatgccagctacaacccttacctttggggtgacattgctctggcttcctgtgccattatgtgaggacaataatagcaccaagtgccattgtgaggcttaaaggagtgtgagaagcccatgaattgttcctggcatttaatactcaataaatactgtcaaatcttagatgtgtctgccatcagatgtcctgggtagtgcagccattttttagttttgttaaaatgtggaatgaagctgggcgcagaggctcacacctgtaatatcagcactttgggaagccaaggtgggcggatcacttgaggtcaggagtttgagaccagcctggtcaatgtggtgaaaccccgtctctactaaaaatacaaaaaaattagccgagcatagtgttgcatgcctgtggtcccagctactcgggagactgaggcaggagaatcgcttgaacccaggaggcagaggttgcagtgagccaagatcacgccactgcactccagcctgggtgacacagcaagactccttctcagaaaaaaaaaaatgtggagtgaataaactctccttttcgctgatgtaataagagtttagtatattaaaatccttgaaaggggaggtaaatgtatgttgaatgctaaaaggcagtaaaaatttgcatgttttctgaaagaacttgagcaagaccacaaatctgttaccttttggagaaaaaaaaggagttgaggaatgaaatatacccttgcaggctggctcagagccattaaccattaacatactggcgactttgccctgttcttcattccagtttcagtttgcatttctgcagtgccgggtggcaggcactgtgccaggtgcagatactgcaagtgcatctggtgtctgccccgtgtttcttgcccagggctggttatgacagtggtcagccatcgtttttcagccttccccttcagggaccccttgagcagaatctgcctggtgggtgaggtggagcagatgagcctcatgactgggccgaggggcccgcatgctctagctcactctggatcccatgtgcacgctcgcacacacaacacacccagcaggatgggcgtgtctagaagaatgccgagcaggtggccttggacaattcacaaccagccgagcaggtcccctcctgcgccctgtgctagatgccagctgccccagcaggcctgttgtgactgccaggccccatttaggattgttttcctttgctgtcctttgcagggtggggctcttgtatacccacagcctgctctgggcaaaattatgtagcacggtctctgctattaattttttccagtaaattaaaggctagagaagaagaagaagaaaaatcaaggatccaatattaagaaatctgagcccaaaccttctactccagtgctgaacatggtgaaggattaagcctcctatcaagaaaaacaagcctgacagcctgtagactgatagagggaggtgtgccttctctccagaaagcctacttctgcaggaacccaggagtatggaatgagccatgcaaagtctgattcaaaaaataacccaatgggcatgcacccccagtcactcatccggaatccggctggcagcctggcagcccggcagcccatggctcccatgcacagtgcttgagagcttcattgtttcctgtctgctggtgccatcaacagctctggggtggcaggggcagatcttgggctaaaggacagtggccaacagctttgggccaaaaggccacaacaagaccagccagctaagaggaggaatgtcatgtccacagcgaatacctactgcagcaaggctgtaggagactttggagaggaaggaccctgtttccaacaacttgaccatgtttcccatccagggacctctgtgcagagagtggtggtgagcaagtatttccaactgggagcccccacagagtcagtggctggtctgtgcacttgttactggactcctagcactgtgcttggcttgtggtgggtactctacaaatgctgcatgcatatgtgcgtgtgccagtggactccagccttgtgatgtaccttcatctctgtgcccttgatagggcggttccagggttgcctctgcgtgagttcaaccctcgggtatttgagcagcacgtagcctcagcccagcattgtgctggctactggggcaatctaggcagcttataaaggctgggccttgccttgaagaagcttagagatgaggttaggcatttagcacaaatgcacgtctgggctctgaatgccagaggagttcaggagatgggccctcagtgagagcggtttggcactatgggaggggcagggccaccaggtcatcgcttctcaagctcttgatgggctctccttctgtcctgcccacaagagcccagccttgggctccccatctagctgtccagacaggctgggggtggggggctgttggtgaagggagggtgggccagagccatctgctctgcacaggttgggtcacgattctattccaccactttcactggtcccttggtatccaggcacatggcagccactgctccagagagtgaggagaggggctggggggatggagcctcgcaaggagcatggacacctagcacttacgtcatcaccatcggcatctgccttacctggctacctctctgttcagcacacctgggagcagcacccttgcagcccttctcccttgacagagctgtgacattgaaccctgccctggtctggtagctgagggcccagcctccccttgcctcctttgtcccatcagcccaggccatcatgggtacagaaggtagcaatgaagtctcacactcggggtaaccaacatgcaatacttatggaaagactgtgtgatcaagggttgagagaatagtatactgaacccaaatgtacccattacatagtgtgaacaattatcaacatgcagtactcgttgaaagaaaagggatgataaaaatgcactattattgaaagtaagaaagtgtggggtctgttaaacagacaaaggagcccactgagaaagctcccaaaggccaaaactgcaacaatttgagcaacaaaataaataatgtagcattggaacataatatgaagtataaaataaacgagtccatagtgaaagaaatggttgaataaattgagaataaacatctcccatgtagaattccgggtagtttatgcaggtgctctgccttcaaacatatggagcataactccccacttctgtttgttgttttgagacagagtctcacgctgtcgcccaggttggagtgcagtggcacaatctcagctcactgcaacctctgcctcccaggttcaagcgattctcctgcctcagcttctcgagtagctgagattacaggtgtatgccaccacaccaggctaatttttgtgtttttagttgctatggggtttcatcatgttggccaggctggtctcgaactcctgacctcaagtgatccacctgcctcagcctgccaaagtgctgggattacaggcgtgagccacctccccacttcttaagcgtggactgcatatagtagctaccttctaaaggacacattcaagaaagggacaaaaagtaaccttatggaggaacctgacaaactacctcagccaggcgatgaagggtaacatcagcataaacatgatgaagcaggttgatagtatgtatccttgatgtgtgatgagaatggtactttacctctgtggccttcctccaaaaaactgttacgcatggtctgggcacggtggctcatgcctgtaatcatagcactttgggaggccaagggaggatgattgcttaagtctagcagttcaagaccagcctgggcaacatagcaagagcctgcctctaccaaaaaaaaaaaaaaaaaaatgtaattagctgcacatggtggtgtgtgcctgtggtcccacctactcaggaagctgaccaggaggattgcttgagcccaggaggttgaggctgcagtgagccatgatccactgtactctagcctgggcgacagagcaagacactgtctcttggaaaaaaaaaaaaaaacataaacccatctagtcataaggataacatcaaacaaatcccacctgagggatgttctacaaaatacctggccatacttttcaaaactgtcaaagtcatcaaaaacaaggaaagaatgagaaaccgtcaaaaccaagaggagtctaaggagacatgagacatgacagctcagtgtaatgtagtgtcctgggtgggatcttgggacagaaaaaggccattaggtaaaaactaggggaattcaaataaggtatggactttctttagtaatgtatcaaaattggttcattcattatggcaaatgccacctattagtggaagatgttaatagggaaaactgactaatgggtctgtgggaactctgtgtactatctttgcaatttttctgtcaatctcaaactattccaaaatgtttattttttaaaatgctttttttttttttttaagacagggtcttgctgtgtcatccaggctggagtacagtggcataatcatggcttactgcagcctttacttctcaggctcaagtgaccccccatcttagcctcccaagtagctgtgagcacaggtgtgtgccaccgcatccgactaatttttttttttttttttaatttttgtagagacagagtgtggctatgtcgctcaggctggtctcaaactcctgagttcaagtgatcttccagccttggcctcccaaagtgttgggattacagtcatgagccatcacacccgaactaaaaaatacattgtttttttttttttttttgagatggaatttcactcttgttgccaaggctggagtgcaagggtgcaatctcagctcaccacaacctctgcctcctgggttcaagcgattctcctacctaagcctctaagcctcccgagtagctaggattacaggtatgcaccaccatgcgcggctaattttgtatttttagtagagacggggtttctccatgttggtcaggctggtcatgaactcccaaccttaggtgatctgcctgtcttggcctcccaaagtgttgggattacaggcgtgagccaccacacccggccatgcatttttcttattgttattttgtaagcgctgtatttcctcagggggagcagagggcaagggaaagtttccattaagctgggctaatgatgagcgccctgtccctgccctgcctggttttgttcttggatgtgccagagaagcgggagggaggaacgtgaggccacctggccccagttccccagctggtggaaaacagaggcaaggagggttactgcaggaaagtgtgaggatgtgcaggaacctgttagatgtgcctgggccaggttggagaaagctggctgctgtcaggtcagctcctgggaagacggactcatcacggcctcactgagccacacggcatcacactgcactggtgtggccacacacttggtggcaagtggagacctcattagaagggtgaggggcctgccctatttgctgtcaccatccctgacctagtgacagatggcagctggtattcagggcctcagccatccagcctagaggtaaaccaagcatgtttcaccagtgccccctattccccgagacctctcaccttccttcagaggcctgcggtggtggaagggcatgggctttggaggcagcagatacgggctcgggctcaggcaccaccacttgacagctgggaaaccttgggtgatttacgtaagctctccaacctgtttctccagttgtaaaaggcaggtaatacgcctgcttcacccaccttacaaggtgagtcaaggatcaaatgagaggcggtagaacaggagggactgtcttaggggttattgtttgggcagatgaggcaagagtggtcagcactttttaagcagcaggtaaagccttggtcttggggctaattggtggtagagttttgtatatagtcacgccacatcatgttttggttaacaacagaatgcatgtacgacagtggtcccgtgagatcataatactgtatttttactgtaccttttccatgtttagattcacaaatacttaccactgtgttccagttgcctacagtatccagtacggtgacaagctgcacaggtttgtagcctaggagcaacaggctaccccatctagcctaggtgtgcggtagggtaggccatctaggtctgtgtaagtgcactccatgatgttcacacaacgacgagatcacctgactgcttttctcagggtgtatcctcgtcattaagtgacatgactgtattaggttgctttcagttgcaggtaatagtaagtccaactcacattgtctcatataactgaaaatccagaggccacgtgggcctcgggagccatgtgatcagggccatgtttctcagtctcagagcatatgtgtgtgctggcttctcacgctggtttccttctaggtagaaaaatggttataggaggcccaggccacacattctaccatcccctaataggaaagagctgcttttccccgtcatacagtgtccacgacgtctctctctttagactattttaggtcacatgcttgtgctctgaattgatcactggggcaaggacaaatcatgctgactgacttaagcctgagttactcccaacctgaacaaattactggggcaaagagagataaatgaaaattattggcttagccagtcagggcctgggcctggaggtaggagggcatcaagccctggcaaaccttttggctgccacaggtggggaggagtggcatggatgccaacagtgtccctacaggcttctatcccagtaatcactgtttgagagcaatggccatttgcctctctagcatccatttacccctttggcaacaatcctaatttgcatttggagctttgttccttccccgttcccaaaaactacgtgcttctaatgaagcctcatttccctctcaagggagaggcatgtgaccaagactttggccaattggtgcactgtattctccaagccattggactgcttcttggaaaggcacttggtttgattaaagccagtgaaacacaatgatactcgctggaaggaaggctggggtggaaccaagtgtgcctgtctgctgaacctgaccccaacaggatgtagggtctggagctattggtgctgccattttacaaccccatggagagcctgagattgaggctaatgtagaaagatggagggagggtgaggaacctaataggaccagcctaattcctggactctgcagtttgagtcaacagattgcctcttttgcttcaaaagccagtttgggtcaagttttctaccagttgcaatggtgtcttaaatcatattatactttccttcctattcaaaggcagtaaatgccaccaagcagtgcatgtgggcaactagaatgcttggtccaatccttactatttgtcacttgacactaatattacatgaaaagcatcccagtcatgaaaggtatggaagaatgctcaataataccaagaagggagagcagtgtggaactattgtttactggtattattatctcaggggtgtttcccctgattatccatgaggttctctttatgctccgctccctgtagggtctggcaggcttcccaacttatctggtgttcaaggtgggcctaagggtgaaactggagcccacctggatacagagatctgtattagttttgtgtttattgatgggagaaagtatttggggtcatccaccttgaatgctacataaatgtcttctactcaaggagtcacataataaatctctccaaaggtgcggtggctcacacccgtaatctcagcactttgggaggctgaggcaggaagattgcttgagcccaggagctcgagaccagcttgggcaacgtggtgaaaccccatttctataaaaaatacaaaaattagctagctgtggtggtgtgcacctgtggtcctagctacttgggaggctaaggcaggaagatcttctgagcccaggaggtcgaggctgcagtgagccatgattgtgccactgcactccagcctgggtgcatttgagcaagatcctatctcaaatgagtgaatagacaaatctctaggactcaccttgagggctgtcaggaaaccctctggaaaaggatgtctcatggatatgccagtgtaaactctcctgaaataaccctttctcttctctacccagactaactttacctaccctttggggcccaactcagatccctccttcttggtaaaaagccagttcagactgaagcaatcccttctattaaccacattaattattactgcaattaatctcacaataccttgaggctccgagtgctgagaggattttgccttttgttatagtgatggaaaggatgcatttcaatatgttgccttgcagtgcaaacctttgttaacagggcaaaaatagcacagggggcaggaattacattcctggatgtgcatttggcttatttacatggatttgggtgccctctaaggacaccatcttctctcccctccaagagggtcaggccacaggacatccatgttcttggcctcccatgggagagggtctctcgccagaggaagggaaagccaagtggccacagagttccagcctgtccctgtgacagcccctgcctctggccagacatccacccacccttgctaagtcagcctgctctggggctactaggcccagtccttgctgtctgtcggagacagaccatgaagtgcagtgtgtggagggctgggacatagcataccgaattaccccagggagcttggaaaacatctcttcccactctctgttaggcccacggcttcctctactggaggagacggcatgtgaggatggaactcggtcattcctctgtcaccaccgatgtgaacagtctggaatcctgcacacaggagactgacgatccctgagcaacctttagtagctcctaccattgggcattttcttggtacagatcacaaataagagacatcatagaaaatgttattcttttattatttcaaggaggtaatacatagcccaatatggcaaagcaaaagggaattagaggcagcaaatggccaggtttttctaagcgcctcatgctgcatctctgagctcctgtctgcccgcagcccacagctgcttacatgaaggccaggtcagtagacagatggcccaacttgatactccactgactgagaaagggctcaatgtgcagcacagcagaggcactgccaggacccagcacgctgggcggcaccccacgctgccaccaccagctacagaggctagtgccttagtagcagccagtgtgtctagcacttgattttattcctgtgagcctagagtgggcaggacgtgaataaatcctgagtcataagttaaggtgaaagacttagtagtgttaatactcttggtgagaaaagacaacacagtcttggaggagagtgggcttggagtctggtggaagaaagatagaaacccccagaagggcctcggcctgcaggcactgccttgaggccatcagagggggttttcacggtacatgatagggaggagtgaggcaggtgggcactggagggctgtttcctctggcacagttgaactagagggtcactttccactcataattggtttcctaggtctaagtcaccacacctggggctgaagcaagtcttgcctgtgcaccaagcgtggccttggaccctggagagatgcaaggctcagttctccagtgttgaagtggaaggactcccaactgaaggagatctttctctccccacctccagctcttttcccttacaaatgaccagggtgcaagtcgagaggcagaggcacctcctggtgcaactccaccacagtcttacagagaactcatcttggtgggacccaaagcccagccttggcatgaagcagacttattccacccatcggagggcacccagtctggtgactgaatggtggcgtgcaagtgggagtcagcagtggctctggatgccgtaatactcagatgccattcatctctgtgtgatcgtcctggctggagagctggtgaggagggactgcttcctcctggcatgcactgttcaccaaccacaccacgtgggctgatagatttttggtttgacaggtgtggaaagaatttttaaaaccagccactgtgttctccaaacccagagccattggttttgtttgacaagaaagtaccaagagaaccacagctccactgaggctaaggcttgtgtagcacagaatgcagtatgtattgaaacgtataaaccttgtctgactggggagatgggtgagcaaagagctgccgggacccaggtcctctagtcggttgcaggctctgccgatgtctcatccttaagctcctcaaaacctgggactggcttctgtagaaagtatgtagtggcctggatcaccttgtctggtccaatgttgtacactgggtgagtgggctgctgcaaagagaagaaaaggtgccagttaatcaccccggtggtccttgaaaacataacacatcctttgctccatgaaaggcacttctaagaatttagtataaggaatcagagatacacacaaagcccaaaggttcaaaaatggtgtatttgctaaaactatctagtacatgggacacaggttaatatacagccattataaacacgcatttaaatatttaacgatacaggcaaatacttacaacatattatgtgagaaaacagtatgtacaatactatctcaaactgtttttttttttttttttttttttttgagagagtcttgctctgttgcccaggctggagtgcattgacacgatcttagctcactgcaacctctgcctcctgtgttcaagcaattctcctgcctcagcctcctgagtagctgggattacaggtgtgagccaccacgcctgggtaatttttgtattttttttttttttttttgagacggagtctctcgctctgtcgcccaggctggagtgcagtggcgggatctcggctcactgcaagctccgcctcccgggttcacgccattctcctgcctcagcctcccaagtagctgggactacaggcgcccgccactacgcccggctaattttttgtatttttagtagagacggggtttcaccgttttagccgggatggtctcgatctcctgacctcgtgatccgcccgcctcggcctcccaaagtgctgggattatttttgtatttttagtagagacagggtttcaccatgttggtccggctggtctcgaactcctgacctcaggtgatccacccgcctcggcctcccaaagtgctggggttacaggtgtgagccaccacacctggtctcaaactttttaaaaagtgtatttgtacctgtgatgtatataaatagcaaaaattgtacccataccaaaatattaatagtgatatgattgtttttcattttcttttttatattttatgtatcccaattattaaaacaataaacatgtatttacatttataatcaagaaaaagggggccggacgcggtggctcatgcctgtaatcccagcattttgggaggccgaggtggatggatcacccgaggtcaggagttcaagaccagcctggccaagatggtgaaaccccgtctctacaaaaatacaaaaattagccgagcatgatggtgagtgtctgtaatcccagctagttgggaggctgaagcaggagaattgcttgaacccgggaggcggaggttgcagtgagccaagattgtgccactgcactctaacctgggcaacagcgagactctgtctcaaaaaaaaaaaaaaaagaaaaaaggaccacaaccctaatatgtagtaaggctgtcagatcatatttaaatatataaacaaaatttaaatatgaaatttaaattaaatagatgttattctagtacatcacagaaacccaaaagaaactttagatttgacacggcataatcctaggccaatattcaggattctcccactgtgggataatgaagaaggggacacaactgcaggagagattttaaaaattttgagagaatactaggagcaacctcatgctgaaacatacaaaaattcagataaaacaataatttttaaaaaccaggaaaactgccaaaattgacttaaggaatttttaaaggcctacatgaagaaattagtaacaacaattgcttattctgccacccccacataccttaaaagatactagacctagatggtttctcaggcaagtagtatcaaacctacaaagaaacagataatctctgatctatacaaaccttttaaggactgaaaaaaaaaaaggggctagtgcgggggccaggtacaatggctcacacctataatcccagcactttgggtggctgaggtaggatagcttgaggccaagagttcaagaccagactaggcaacatagcaaaaccctgtctctacaaaaaatttaaaaattagcaggttctggtggtgtgcacctgtagtccctgctacttgggaggctaaggcaggaggatagcttgagcccaggagttccaggctgcagtgagctatgatcacagcactgtactccagcatgagtgacagagtgagatcatgtctctgaaaaagaaaagaaaaagaaaaaaggtaagaggtgcaggaagctacccatttaattttatgaggctatgatattatcctgaaacactggaaaaggacaatacaataaaattttagatcaatctttcttatgaatgtacatgcaaaaaaatcctaaataaaagtactaggcaaacatactggcaaactgaatccagcagtatactgaacaaaacacacagacacagacacactgcctctactatgaccaagaagggcttatcctgggaatataaggcttaacatcagaatattaatgaaacatatcatattaaagaagaaaaatcagatgcggagaaagcattcaataaaatttaacactaccttatgactgaaactaacaaaaacaacctagcaaatcaggaataaaagtgaatatcactaacttgatataatgtaactatcacaaccttacagtaaacatcatgcttaatgatcaggttataaaaagccttcccattataatcaggagcaagagacgaatgccctctactacctttagtcagcactatgtggggatcttacccaacaatacaaggcaagaaaaataaaatggaaactaacttagacaaacttaaaactattaaagagttcaacaaggtggctggacacaagatttataaatattattagcatttctatacactagtaacaaacagttacaaaactgaaaataagaaaagattccagtcacaagagacatgaaaactgtaaattagacataactctaaccgaaaaaaaaaaaatgctagtcctttatggaaaaaattataaaaaaaacactgaaagacattaaagaaaagaaaaattatgttcataaatggaagcctaaatattgaaaagaagtcagttctctttgtactcctgggaagacaggaagaaaaaaaaaaaagttggttctctcctattaatctaaaatgtagtgcaattccaataaaaatcccattagaacttgacaggctgatcctacaattcacaggaaaaagcaaaaggcaaagaatagccaaggcaattttgaagaaaaacaacaaggcagacaggacttgcctacctgttttcagacttgcttaaaagagtgcagataggcaaacagaccaaaggaacaaaataagagagtccagaaacagggccccttcatgtatggaaacttgagggtgtggtacacatgagatacacatcagcaggaaaggttgtagacttcagtaaatggtgctggtcaattggttatccatatggaaaaaagataacattatatccaagcctcaccatacacagaaaccaaatccaagagaattaaaaatctagattaaaaaagcaagctttagactatttagaagaagttacacttaatgacttgctgcattgccttgttcattcccttcatagcacgcatcacaatttgtgatgtatttgtttaatgtgtgcctccttttgtctgcttccctcaaaaaatggtagagattccttaagttaatcctcacctaccctcccccaaaaacaaacccctgaatgacagaaaagacaaatagatttgaccacttcaaaattaaaatattaaaatatttttgtggggaaggggtgctgggggcagggtctcactctatctcccagactggagcaaacagagctcactgcagccttgactacctgggctcaagcgattctcccacctcagcctcccaaagtgctaggtttacaggtgcgaaccaccatatctggcctaaaatcttctatttaacaaaaaaacaccaaaaacaaaatgctatggtttggatgtggtttatttgtccccacaaaaattaatgttgaaatctgatccccaagatggctatgttgagaggtggggtttgtggaatgtgtttgggtttgaggggtggatccctcaggagtgccttggtgctgttcttgcagtagtgcgtgagctctcactcttgctctggggagtctggattagtccttgagggaatggattagttcctgcaagggtaggctgttataaagccaggatgctctcaggctctcctctgtttgcatgggttggcttcccctttgatttccacatgttataatgcagcacaacccttgccagaagccagagccatgcccttgaatttctcagtctatagaaccatgagctaaataaacctcttgtctttatacattacctagtctcaggtattctcttatagcaatgcaaatcagagtcacaaaatgaaaagacaagtcacaagctggaagatattcactacacacatgtaactgatagaagattagtattaaaaatatacagagaactacaaatacttaagggaaaacaactgaagttacccatcagtaagaaaatgagcacagaatatgaactggcagacaattcgcagaagacaacacaaatggccaacaaacatttgaaaatattctcaacctcaccagtaatcaggaaaacacaaaatcaaacaaataccacttcacacccatcaaattggcaaaaaggaaaaggtctgactatggatcgattcatcttacacaaccacactggggagcagttacagaggtatctatcaaagatgacaatatgtgtccccttcaacccagcaggtcccctcctggagacattctaacatgtgaacccaatgagacagataccacaacgttcactgcaacactgtaatagcaaaaaattgataactagcaggagaacagagaaacacactggggtacatttatataagggagtatcatataatagttaaaatgaataaactggagcaacacatgtgaacacagataaacctcaaaaatacaatggcaagtggaaaaagcaatgcagaatgactggtacagtaggtaccattacaaaaagtttgaaaacatgcaagcaactgttatattgcttataaaaaactatatattgcttatagatacatatgtatgtagcaatagcacaaaaacatccacaggcatgatacatgtcaaatttgggacagggttacctctggagaaggagggaggaaaaaaaactggaagagggctacataagaggcaaatagggggaaataattagggcctggaaaagctgggtggtggtttttctgattaagaatgaggttgagcatcttttcaactatctattggccatttgtgtttcttccatttgaaatgtttcccaattaaaagaaacaaagatggggccaggcgtggtggctcacacatgtaatcctggcaccttgggaggctgaggcaggcatatcacttgaggccaggagtttgagaccagcctggccaacatggggaaaccctgtctctactaaaaatacaaaaattagctgggtgtggtggtgcatgcctgtaatcccagctactcaggaggctgaggcacgagaattgcttgaacctgggaggtggaggttgcagtgagccaatatcatgccactgtactccagcctgggtgacagagtgagactttgtctcacaaaaaaaaattaaaaattaaaaaaaaaatttttttaaacaaaaaaggaaggttacaatgacacagatgagaaaataaggcagtgacctagatggtagcagcaggccatgtttacactggtggaagtagggcttagtaagagtagggaactgcacacaaaaattcatgacagtctgcatgggccctgtgatttgatcactggggacagtctccattggattcatgtccaggctcacgtctaggctcagagcacctccaggttgtcctcagctggctgcagcagtgagcatcctgccctcatagggctattgttttttcaggaaagcagacaaacacacattaaacaacacaccaccaactgagtaaagtactacaaagaatatgaacaaggcactgaggcagagcattctggggatctcattctctgaagagatggcatctaagctgagcctctgggagagacgcggcaggctgtacagccagtgccgcatggctgcagtgctatcacgagcctgctgggactcacagcctcagagtgacacgtaactgtggcctcctctaggggaagctaataccagcagtgggctaggtcctcagccctgggataaaggcacaacagctctttgacagatcagaccgcccatctggaaccctgagcttgcccagaggtgcgtctcctctgtggtcacatcctcactaacggctgcacagctcgaagggcagagggaccacaagcttccgcctgtccacacaggaaatgcagagccagttctgcttacttggaaagccttctgtccgcgaggtccctgtggagaaggggtgtgaagccctgcacccgtcttaccagagcgttttcgggcacacccaggaccacatcatgcaacatggctccgctgccgaagtgctgggctatggacaggccgctcaggcagtagcaggtgtggtagaaatcacgcgacctgtaaggacaggcagctctgagcaggcgctcctctgctccgcacacatctacaaatgtagccacaccaattcagagaccactggtgcaatcacacgtccccccccatcctccatgtggctagaggaggcatggttttcccagcagtgttatttaaagccccactggctgagcacagtggctcacacccataatcccagcaagcaggaggctgaggcaagagaacggtttgaggccaggagttcaaaaccaacttgggcaacatgggagaccccgtctctacaaaaaattaaaaattagctaggtgtggtggccgatgcctgtaattccagttacttgggaggctgaagcaggaggatcactcgagcccaagaggtgaaggctgcagtgagtcatgattgtgacactgcactccagcctgggtgacagagtgagaccctgtctcaaaaaagtaaaatacaataaaataaaagccccatcctccagccctgcccagcagtgggaactgtattttttttcttttctttctttttttaccttaaactattaaaggaaactgtaattttaaagtcagtctctccagctgtcttctggaaagggctctccaggggcagtactaatgataaattgatacacttctctagaaaaatacctaaatatctagaaatgggccacatccttcctgatacattgtgggaccaggccttcccctggatgccaagagcagcaggacgtgtgctgggatgggggaagacagagggtgggtaacaaaggtgagaggacttattttatttccctttttctaacacataagccatctcagatttgagcttaatcatttaatccactctataatagttgtcatgattacagtctctgtttacaacactgaggggttttaaaatcctgtatcctattctatttagatcagtttttttttgttttttttaaaaaaaagaagagttatctacccagcaatctgtttccctgtctgggggagggggttgcatgcaggctgggggacaagacgggcagctggaggtgccaagatcaatggcctcaaggggtgctcccaactgggtgctttttcccatacaacctagcgctatgcaggtgctgaaggtgacacctctgctcttgagatctggctctgagtaggcctgaggtgcacgcccctctgctctctcctcccctctcccttccctccccagagagaaaacactcacttgccaggtttatccagaagcccccccgcagggcactggcagcacatcaggatgtactcctgcagggcctgctgatggaacatccagtggctcatgctaagggcagggtcacctgttgaagggcaaagggtcagtaagggcccggcagatccagccaagtatcaatgacctaattccactttctcacctgggggaatagtcaaggtttcctgctccccttcctcttccattcattcttggtacaactgctatcttccccatgtcctacgcacagcatgtcccttctcctgaactttgacatgtgtcaaagagcagcaattcaaagtggcactttcactttcttgaaatgcaccctgttaacgtggatggtgatcctcaaccacatctctggcaggcagtgaaccagcctagctgtttagcttaccttcccagactgacctcggtagctgctcccaacttggtccataactctaccctggacttcaagagacattccctctagcatatctctataacttgttaaccagactgattagctcagagaactcttaatgggtaataaagtctgtttcttctacttttctaagcctaaatttaattgatctccaaagggaattctctaacttgtctctcagctcaaagaatttacctaagaaacattactagtaactgccctcctgcatcatatgataccctagcaaaaactgggtattctggtaatactactaaggtactgacaagcaactggacttcttcactctgaagtccaatcactatggtcaaagaattctgtgggccacacagttatcaagtgggaaggagggacaaatcacggacaggtgtgcagaaacatctgcatagaaatcgattaaaaatatatatacatataggatgtacactaagtccttggtcaattttatattttgatacctgggctaaaagatgcctgacaataaatcatttttaaaaaaaagatgcccaacaattggtaaatggcacctgaaagctaattgttctttcttccagtctttttggttctatgcgtttttctacctagttattataactgtgtagcttatgtttttcacttataccactataggcataaattttctattctattacataatctgcatagccatcactgtgaatagccatatagtatttcattaagtggacatataaggtaactgtatcataaaaagaactgagctaaaaatcttatatatatgtcagtatataaattcctatggtgggccaggcacgatggcttatgcctgtaatcccagcactttgggaggctgaggggggttgatcacgaggtcaggagatcgagaccatcccggctaacacggtgaaaccctgtctctactaaaaatacaaaaaaattagccggacatggtggtgggcgcctgtagtcccagctactcaggaggctgaggcaggagaatggcgtgaacccaggaggcggagtttgcagtgagctgagatcacaccactgcactccagcctgggcgacacagcgagactccatctcaaaaaaaaaaaaaaattcctatggtgaaaattataaaagtttatggtatcaataacctttcccattttggagaaaatagcaaaaaagaaaaacgggggaaaagatttctaaaaataaaaatgaaaagtttatgatacagtctataaagagattgaagcaaaatattaaactgttgaatatttcctttttttttttcttttttgagacagagtctcactctgttgcccaggttggagggcaatggcacgatctcggctcactgcaacctccgcctcccgggttcaagcgattgtcctgcctcagcctcccgagtagctgggattacaggcatgcaccaccatgcctggctaattcttgtatttttagtagagacatggtttcactatgttggtcaggctgctctctaactcctgacctcaggtgacccaccctcttttggcctcccaaagtactgggattacaggcatgggccaccgcacccagcctaaattgttgaatatttcaaacagacaataagaatttattaaatttctttaaaaagagacacagaggaaaagggtttccaaggttgagcactaggtgagggacagtggccaggtgacatttagaggccagggacaaaagcttctcgtcttcaaccctgagtcgcactcagccctgaaacacccattaagagacacaggaaactaagtccgacctaaggagaagcatccaatctcccatctcaggctggctgcaggccacatgctttgatacacttgcactattttaattcccttcctttcttttcctcacctgtaagcacagtgaactttgttgtagaagatacatacatatatgatgggacttcactctatcttcttttacttatttccaaggttgtttccagttccttgccattatgaggaatgctggactaaatctttgtcaatattatgtatgcttaagattattttcttcaaatagactgaccacggtggaattattcggttaaagggaataaacattgttaaggcttttaatagatactgataaactgctttaagaatttatagactactctcagcacaatccctgtggagtagccctgctctgcaggagctgtcaaaaataaatatataaataaactaaaaataaaaacaaagactttatatagctaccagcaaaatttaaaattttgctataccacctccagcattagcacctttttgttgttgttgttgagatgctatcttgctctgtcgcccaggctggagtgcagtggtgtgatctcagctcactgcaacctctgcctcccaggttcaagtcattctcctgtctcagcctcctgagtaccttggattacaggtacaagcccccacgcctggctaatttttgcatttttagtagagacagggtttcactatgttgatcaagccagtctcgaactcctaaaatgatctgcccaactcggcttcccaaagtgctaggattacaggcgtgagccaccacgcccggccagctttagttactttttaaaagttatcagcaattaaaatggtaaaaagaaatagtacctgatagtttattttgatttgcatgcctctgattactaattagggtgaaatttttccataacttgtgtttaatatttgcatttccttatgatggtgtctgtttggcctaatcttctgagatccaatagccaattttattaatctagctttttcttatacttgccccttgtctacatcatatgctgcatctattttctcctttttgctcctctgttttggttatgtgagtttaaaactttttaaaatttttaaaatttaattaatgtaaaacatatatatgttttatacttaatattgtaatcatactattgatttttccttcacgatttcctttttaagaaaatatttaatgtgtatggggatttttggggggatgagtgatgaaaatgttctaaaattgtcatgatggttcgcaactgaataggtaagttgtgtggtatgggaattatatctcaacaaagctattatttaaaaaagcatatttattaaactttaggaaactgcattacacatctgtacaaaatgtacatatatttcatatcctataacaaataaaagactattattataaggtaaatgataacctgtggctaaaattagagtctgaaaagaaaacgctatgtttattatataaaaaactatagactgtttcagtgacttcctatattattaaagcatagaagctcaaagttcaaaagctctacaaggagcttccagatatcctgaatttggacaccagcacacataatcacaacaagatgaaagcagatacgattatagggtgataactgcacactggaatccaccttttaaatcctttctacctcttcctgaaattataggtcgccattctaatctcattttgcatttcaaaggttccttttatctaaaaaaatcaaaagtctttccacaccataactgataggtgcagccatctgtagctcaatttcacaggtaggcaagaaaattccagggtatgtccaaaagaacatataagaaaccagtaactaccaagccaagtggaaactcacaggcctgctgctttcttattgctccacaaaacaaaaaaacaaagtaactcactgatttagtcagcacttgagatttcttaagccttttttttttttttttagacggagtcctgccctgttacccaggctggagtgcaacggcgcgatctcagctcactgcaacctccgcctccggggttcaagggattctcctgcctcagcctcctgagtagctgggattacaggcaacgtggcaccatgcctggctaattttttgtatctttagtagagatggggtttcaccatgttggccaggctggtcttgaactcctgagctcatgatccacccacctcggcctcccaaaatgctgggattacaggcttttgtgtttttttgagacaaagtcttgctctgtcgctcaggctggagttgcagtggcactctctgcctgcaacctctgcctcccagactcaagtgatccttctacctcagcctcctgagtagctaggactacaggcatgtgccaccatgtctggttaactgtttttaattttttgtagagacaagctctcactatattgcccaggctggtcttgaactcctgagctcaagaggtcctcctgctttggcctcccaaagtgctgggattatggtcatgaaccaccatgtccagcattttaaggtactaatagtaattccttcttctactcaaatactgtcatttacacatagaaggtagtcaatggcatggagccactgatggtcacttgctgggtcagggcatggcctagacccacgtgctgcactatgtagagcattctttttgctttttagttagcaatatgatcaatgccttttaaaaaatgtatttgtacatttaccaaaataaaattagtaatgcacatggtttttttttttttaaaggcacagtataatacagaaggatagaaaatctaaaaagttggccaggtatggtggctcacgcctgtaatctcagcactttgtgtggccaaggaaggtggatcacttgaggccaggagtttgagaccagccaggccaacatagtcatatcctgtctctactaaaaatagaaaacattggctgggtgtggtggtacacgcctgtaatcccagctacacaggaggctgaggcaagaaaatcaattgaaccgaggaggctacagtgagccgagattgcaccactgcactccagcctcagcaacagagtgagactctgtctcaaaaaaaaaaaaaaaaaaaaaaaaaaatctaaaaagtctccctccttctgtcttctgtctgcttctcttctcccaaaggtacccattgttcaaggggttttgtgtagggttccaggaaaagctgtgtacatctcgggctgtgtgcccaggcactgctccaggccccgcccccttacacttcatgttgtatcttgcagagctttctatatcagcccatggtatgcagctactgtttggagagatttttattatttaacccttaaccttttgataggcacttaggctgctattgaaactccacttcaatatacatcctttgctaatatccctgcaggtaaattcctgacagtgcacttgctgtgttcaaagggtaagtgcccttataatttaaatggatgtctccaaactgccctccaaaaaatgacttaacctatttacatccccactatcaaattacctgttttctcacactctccccaacatagggtatcaagttttttaatctctgccaatccaataataaaaacaaatagtgccactcttttgattagcatttcttttactacaagtgagctaaacaatttttcgttggattaatggccacctactgtggttatgagcagggcagggttcagatgccagctagtctggattcacacaaccacatactaacccttgtgagtgccaatcaggtattataaagcaatcacttaacctcactgtagtttgtttcctcatctgtaaacaatggtacctatttcatagggttgttttgagaattaaatgagaaaacatatgtgaaatgctcagtacagcccctggcatacagtgagggcttgggaagactccgctaccagtagtagtggcagttgtagtagaaaaagtaagaaggacagttctttcactgggacctctttcttcagatcctttgcctgtttttcagttgggttgtccatccatttcttactggtttgtatgattttttttcaaattaaagaaattagccattcatcacttgttataaatatttttcgcacctttttgcttgttttgtttgtagaatttccctgtttctgtaaaataacttttgttgtctttttttatgcaagaaatacctattaactatagaaagattagaaaatacaaacagaagcaaacatcacctgtaacttcacatcctagatactttctatgaattttttgtagtcaactcttcactaaaaatgggattccacacatattgctttgatatgatcacaatatattgtgactatctttctacactgcatccccttttgactcccaaagtcagtattttgccctcctttcaacacacttcccttctttacagactcctgtctgttccaagttcaagagatgccctgtgtctgagaagacaacacaggccttctcccagccaatgaaaaaagctggaagcaccaagattcataggcacccttttccatagacaaagctttgaatgccactaagccccctagaacatgtgctacaagaaacaattaaccagcagcccccctggaagactttgacaggtggtgctcctgttatagctcattccacatttccctgggattgcagaattactgagtcttatccatgccagggacaggtttgtaaaagactgaccattttaccaggggcttgacctcaccagttccaaataaagagatcaccatgaccccaagtttttttctatcttagaaatgttgggccaggcacggtggctcacgcctgtaatcccagcactttgggaggccaaggcggacagatcacctgaggtcaggagttcgagaccagcctgaccaacatggagaaaccctgtctctactaaaaatacaaaattggctgggcgtggtggtgcatgcctataatcccagctatttaggaggctaaggcaggagaattacttgaacccagggggcagaggttgcagtgatccattgcactccggcctgggcaacaagagtgaaactccgtctcaaaaaaaaataatactaaaataaaaaatgtttgacttggggaattcctgacttccctactggtggtcaaggcagagactgtgcaggctccaaagtcagtgcacttgctgacagtgcacttgctgtgttccaagggtaagtgccttatatgccttaatactgacacctaaagcccagtgggcccaggccgggaaaatgggacagaggctctgcttactttaattcagtgtcagaaatggtcacaactcaacaactcaaaggaaattaagaaactaaataatgaggctcagggccgggtgcggtggctcacgcctataatcccagcactttgggaggccgaagtgggcggatcacctgaggtaaggagttcaagaacagcctgtccaacatggtgaaaccctgtctctactaaaaatacaaaaattagccaggtgtggtggcacgcgcctgtagtcccagctactcaggaggctgaggcaggagaattgcttgaacctgggaggtggaggctgcagtgagccaagatcgtgccactgcactccagcctgggagacagagcacgactccatctcgggggcggcggggaggggggaagacggggggtggggggctcagaaacaggaaaaaaaagtatggggaggggcagaaaagaatctcatcttttacatttgagcagttacattatccaactaagtccgaagaacagcttctctttggacccagggatctcattccaaaaacagatcagcaaccagcagggccccatgacttcctctctcccacaggtctactcagagacacctgctctcacatcaagtacaccagaaagatggtgcaggagttagcaggcagactgaggtttcaagagatagagagagaatgttcccagactttttgctcactaactacttcggttttgcgttcccatttgagaccccacagaaacgaacgtggatttctctactccaatggtgcaggtggaacaaactcccatttaggcttattcaatgaatgtaaaataaaacatttctaatagtgacaactctgcagccagtcagacacggcgagtctcttctccatggtgtaggggcaacccacccctacaacccacccctacacatgggttctggttctctacccctttacgcagttgcctttcctgttgctgttgcaacagtgactgttgcaacactgagggttttcagctctgccctgcacccagaggaggtggcaatcaccacagagcccaggacaggagtgggctgctccttccagataacgcagaagcagcgcccacttcctccccgctccccgtagcaatttcaaggaagctcattctgtcgcagccaatttgaagaagcaaagaatgacactaaaccaatgaaactaaatcttactctgcattcgcatgccccacggcatgaggttccacactgggcactcaaaatccaggatagacagagctcatttcaacccctctaaaaaagcacgctgggcttccagactttgtgagtagtggagggaaatcatccagccccaagtgaacagctccccaggctcaccttgggcgtgcagtgcgcggtggagcaggggcaggagccccgcctgccagaaggagtagcagccatccaccagcttgttgcagcggccctgaaatcctccttcaaatcgcatctgccggcttgtcacccattgctgaggagacacagatgggaaaggcagttgtaggctaaaagagacaaaatccagcccgacagaatctccaggagtcaatctgtgggatggagggtttcccatcttgtggcttcttggcactctagttttggtgctctggttttctttccttccctccccacactgccatagacacagagtgaagcatttaagccaacgctgtagaggcatccagcactgatctctgctcaatgcctggcagacaactaccttttcctgggttccaaagcagtgccagtgctgagaagataaagaggccaagctggtttgtaaggagaccttcaaagtctcttaataaacatggcttaagttggaaattgaaggcaagactaccagtagctcatttctcattacttccctgctccggggagtttattaaaagcagataaatggaatttggtactacatttcttttttttttttttttttttttttttttttttgagacggagtctcgctctgtcgcccaggccggactgcggactgcagtggcgcaatctcggctcactgcaagctccgcttcccgggttcacgccattctcctgcctcagcctcccgagtagctgggaccacaggcgcccgccaccgcgcccggctaattttttgtatttttagtagagacggggtttcaccttgttagccaggatggtctcgatctcctgacctcatgatccacccgcctcggcctcccaaagtgctgggattacaggcgtgagccaccgtgcccggcctggtactacatttcatcagatgatctcaaactgctcctgacttttacttggcacctggggaaatttacccaaggtctcttagcaagtcactagcaggcctgaaagcagaagccattcattctaattaccaaatgacaactctgcccagtctgtggctgatataagaaaatcttttactttgaagctgtaaaataggtcttggtcttgatgtcactcagcggtcacacacgataccaccattccttgcttatctacaagttttctaaacacactctactacaaagatcaagatagtcatgggtttggtccctcagaatgagcagaaccaactggctgagcagatatgacatttccatttccctccctagaccacctaggccgttccagccacggacttacagagctgcctcactcaactgaaagggtacaggggagggtacttcctgtttctagagtcttactaggtaaaggtcctgaaaggagccactgggacccttgatggaagtgggggccagccctcccctaaaagctgttgtttagattattccctcttcaaggcaacacctgcccatagagagtcacagtcacaaatgcttaaaagagacagaaaacactgtactgcaggttcaggtactaatatatcctcggttgatcttaaatgaaccagggcttccagcatgtaatggaagtgggctaagcattactcaggcagagagaaagcaggcgctgcagtgggagtcggttcctcatttctacttaccgcagggcttaagtgtttttaagcagactaatttactttttccagtgcctaagcccatggatttgttctgtttccttgggctataggaattcatacttcagatatgggtcctacttctcccaaagcaaatggaagggagtagtctggattagagcaggggtccctaacccccagaccatgccaggctgcacagcaggacatgagtggtgggtgagccagtgaagcttaatctgtatttacagctgctcctcactgctcccattactgcctgagctccacttcctgacagatcagcagcagcattagattctcataggagcgcaaaccctactgtgaaccgtgtatgccaggcttctaggttgcacgctctacatgagagtctaatgcctgatgatctgtcactgtctcccatcacccccaaatgggactgtctagttgaaagaaaacaagctcagggctctcactgattctacattatggtgagttgtataattatttcattatatattacagtgtaataatagaaataaagtacacaataaatgtaatgtacttgaatcatcctgaagccatcaccccccgtcccacccccaaccccaggtccacggaaaaattatctcccacaaaactggtcccttgtgccaaaaagattattactgtgggttagagggacactaacatttattaagtacctactatgtgccaggctgtttataaatgttctctcctttaaccttaaaaaaataaggattgttatccctaccttataaaagaaaaaaatatcaagctaaaagagattagacaatttgcccaaggactcatgtctcaaatgtagtagggacagggttcaaatctagaacactgtctttataactgaggcactccctaatcacattccttatctctgcctgggagatgggacttttttgtttcatgccttattggtgttcagattttaaaacatctgagaaactcttaagttcagcatacaaagttggctgtttcagcatgagccttcaagccttcatgaatctttaaaaagactacaccgggggaggctttctgaaggtggaggcaagacactgctggttacatgtctacagggtacaacagaaactctccaggaagctcacgatgggccgcataacgggaggctggcatctgaactcagggagaggaggtgcatgtcagttgcagctggtttgctttgacgtcatggtcagggggtacatgctccccaaatgacatgacggggaatgccttctccctggtggccgtggaggtgtgtgtgtttgtgcacccactgatcatttaactacaatctagtgactccctgaagctgactgctttctgagtttcttctgaatactggccaggagcgtggggtccagacataaatgttgggctgccttctcaatgcaattagccagctctgcctaaacaactcatttaaatgtaggtactaaatgtttacacagtgcagcaggtaataaaagtttggtttcgaaatgctgcaaagctcttcttgtaacttttcctcttaggaggttctttctataacacacgataacctctaattctacgaaactgaagtataaggaaggtactctgctcacaccagatgtctgcagcacacagtctatgtagtctacacactatgtaaaaagctctaagcaggaagacagaaaggcagaagggggagccaagacagagcagctgctcactccttcctctgtgttggaacagagctaactctcttagcccttcccatagccaaactctcctgaagcctgcatgtctgagtacaatcacatcaccatgacctggggcctgagagggggatggctcaaaagatacttactaataagctcttcaagttcaaggaacgttccctcttgaggattaccagcgcggccaggccacagaaggtatagccaccatgggcttccatccctggtaccccgccaatgccaccttcccagttctgacacctaagaagagattgagaaaagcagaatgagtggccagtgagtggacgtacacaagaccaggaccatcctaggtggcagagaaaaagttcactcagattaaggtgtgaaccatcacaactatgaatgaaaagatgccaactaattaacttttggaaatgtcttttcaaaaaaaaaaaaaaaaaaaagctgggcctggtggcacccatgtgtaatcccagctgctcaggagactaaggcaagaagatcacttgaggcgaggagttcgaggctgcagtgagctatgatcacaccattgtgctccagcccgggtgaaagagtgagactaggtctccaaaaaatgtaagtataataaaaactgtaaaatgttaaaaacccagacacttagaaacagcctacttgtgtaagaaacataataattcaaattattactctttgggaaaaagttataaaatcatacatatacatatatgtacatatatacacatatatatacatatatatatatacacacatatatatacatatatatacatatatatatagtgataaccatcaagttaaaataaaattaaagagtgattgttgattctagtgatcttttatttttgaaacagggtcttaactctgttacctaggttgactgcagatcatggctcactgcagcctcaacctcctggactcaggcaatcctcccacctcagcctcctgagtagctgggactatgggcgtgccccaccatacccggaccattttttgtattttttgtagagatggggcattgccatgttacccaggctggtcttaaatttctggcctcaaggaatcctcccaccccagcatcccaaagcgttgggatgacaggcatgggccaccgcacttggcctctggtgatctttgagtacaggtctactagtaatatttttcctttttgtttttctatttgttcaaaaagtttttataatgaacctgtatactattaaaaaataaacgttatttttaaaaattataattaggccaggtggtgatggcttcttaaacagcctgcagaaccatgagccaaataaacctcttttctttctaagttacccagcctcaggtattcctttatactgacacaaaatggactaacacaagaaggacaagaaataactgacttagtagaatagagaaacctttcctacccaaaggatagggatgggagaggggcaacaaaaagcaaggtgatctgctccaataaaaggctccaggattagagatacagggaacctccacaaagtggaatgcgtctgaaccaagtttgttggttgcaaacttatataagaatcagacctttaagtcccctactcaaatccagcagaagatgggaagtttcagaggtttaatcaaaaggatctgagttccagaatatccaacaagctaagaggaggagggagcactgtaccaaatgtgattacgtgagagtcagtaatctcaacacaatacccccagccccattcctctgtgtatttcacacaaggctgccagtttcataccccaagcaggaatttagaagattcctctctgagggaactgataagcccaagggaaaaaccctacagacactgctttgagaattccccaatgaatggcttgatcctgcccactctcgcagagctccccagcagcttttcagtgctggatccttaaatatgaacagacagctgtagagtaccagacatttgaccacagtctctactatgaaagaggagaccaaaacaaacaaaaataaattggaggaaataagacagggagcaaaagaaaactttttaaagttgtatctttagataaaatattatatgaagtaagactattgagaggacaaaatatccccagaaaagaacaagagagtagataaaaaagtagtcaggaagtaaaagtagtcagggaggaaaactaaaaataggattacaaaaataaaaacaagaggattagaagataaatactaagagaatctctcaaagtataagaagaaggattaagagatggaaacgaaccatgcaatgaaatatttttatttttatttatttatttttgagacagagtctcgctctgatgccgaggctggagtacagtggcacaatcttggctcactgcaacctccgcctcctgggttcaagtgattctcctgcctcagcctcctgagtacgtgggattacaggtgcatgccaccacgcccggctaatttttgtatttttagtaaagacagggtttcaccatgttggtcaggctggtttcgaactcctgacctcgtgatctgcctgccttggcctcccaaagtgctgggattacaggtatgagccactgcacccggcagtattatttttatttatttatttattttgagatggagtctcacactgtcacctgggctggagtgcaatggtgcgatctcggctcactgcaacctctgcctcctgggttcaagcaattctcctgcctcagcctcccgagtagctgggattacaggtacccaccaccacacccggctaatgttttgtatattttgtagaggctgggtttcactatgttggccaagctggtctcgaactcctgacctcgtgatccgcccgcctcagcctcccaaagtgttaggattacaggcgtgagccaccacgcccagcctcaaagtattcttaaaagtcagacaatcaaatgtactaatgggatgtcatatttttaaaaggctggccaggtgcgggggctcatgcctgtaatcccagcactttgggagaccaaggcaggaggatcatttgaggtcaggagtttgagactaacctgatcaacatggcgaaaccccgtaaaaattagctgggtgtcgtggcgcacgcctataatcccagctacttgggaggctgaggcaggagaatcgcttgaacctgggagaaagaggttgcagtgagctggtctgcaccaccgcactccagcctgggcaacagagcaaggcaccatctcaataaataaataaataaataaataaataaataaataaataaataaataaataaataataaataaataaataagaggctgggcatggtggctcacacctgtaatcccagcacttggggaagccgcagcaggaggattacgtcagcccaggagtttgagaccaacctgggcaatgtggtgaggctttgtctctacaaaaatttaaaaaattagcggatggtggatgcctgtagtcacagctactcaggaggctgaggatgatcacttgagcctggaaagtcgaggcaacagtgaaccatgatcgtgtcactgcactccaatctgggagacacataaaacaaaaagagacgtctcaaaaaaaaaaaaaaaaaaaaaaaaaaaaaaaaaaaaaaaaaaagggcccggcgtggtggctcacgcctataatctcagcactttgggaggccgaggcaggcgatcacttgaggtcaggagttcgagaccagcctggccaacatggtaaaaccccatctctactaaaaatacaaaaattagctgggcgtggtcgtgggcttctgtagtcccagctactcaggaggctgaggcaggagaattgctggaacctgagaggcagaggttgcagtgagccgagatcacgccattgcactccagcccgggtaacaacagcaagactccgtctcaaaggaaaaaaaaaaaagagcaaacacagaaaacacaagagaagaaattatcaaagaaatactgtaataaagaatcttggtactaaagtatatgcacttccaaatcgagtgcccagcaaaatgaataaaaataatccacatcaagattcatcatcaagtttccaaacaagaataaacattccaggccaggcgaggtggctcatgtctgtaatcccagtactttgggaggctcaggagggcagatcacttgaggtcaggagtttgagaccagcctggccagtatgacgagaccctgtctctactaaaaatacaaaaattagtcaggcatggtggcaggcacctgaggttgcagtgagctgagattacgccactgcactccaacctgggtgacagagcaagactccatcacacacaaaaagaataaagattccaagccgctaaagaaggacaggatggggatagaaaaagagagacagaagaaaaaaacatacagagaattaagaatcacaatggcactgccaggtagtacagcacagtggaatccatttgatttctctgtatttctgcttaatataaaatttaaaggctgggtgtggtggctcacgcctataatcccagcactttgggaggctgaggcaggcggattgcttaagctcaggggtttaagaccagcctgggcaacatgggaaaaccccgtctctactaaaaacacaaaaattagccaggtgtggtggcatacacctgcagtcctggctacttggaaagctgaagcaggaggatcacttgaacccaggaggtcaaggctgcagtgagccaagatcacgccactgcactccagcctgggtgacgaagtgagaccctctttcaaaaaataaataaattaaattaaattaattaaattcagtatcccaccacttgacatataaggaaactatgacacagagcagtggaataacttgtccaagcacaaagctaattagaaatggcaggctggccatcgtggctcacacctgtaattccaacactttgtggggctgaggcaggaagattgcttgaaaccaggagttcaagaccagcctgggcaacacagtgagactctgtctttacaagacattttaaaaattagctaggtgttgtggtgcacacctgtggtctctgctactcaggaggctgaggtgggaagactgcttgagcccaggaggtcaaggctgcagtgagccgtgatcatatcactgcaatccagccagggcaacaagcaagaccgtgtcttcaaagaaaaaaaaaaaaagctgggcgcagtggctcatgcctgtaatccttgaactttggtaggtcaaggtgggtggatagcctgagcccaggagttcaagccccacctggacaacacagacagatcccatctctacaaattttttttttaaacattagctggttatggtggcacgcgcttgttgtcccagctacttaggaggttgagatgggaggattgcttgagcccaggaggtggtggctgcagcgagctgtgatcacaccactacactccagctcgtgcaacagagcaagactcggtctcaaaaaaagaaagagagaattgaaagacagaggaagaaagaaggaagagaagaggaaagaaagggcaaaactgggattcaaacccaggctgtctgagttccgtatctagtctgtgcctaaccagtcaacccccctgcaaatgacagctgtacactgaacaaaatacaaaaaaacagcttcctgagggttcagctgactgaaaaagggcaggcagattttggtggagtttgaaacttggaacagagaacagcatgcagttagtccctcccttcccccacaactttttctctctggtttgccctcaggatggcagccatagcccagggcggcagcagcaggccaggggtcaggggtcagggcgggcagccaacactctaatgggaagccaaccatccttctggcaggaagatgcaggctgccagaaactgaggacgaatccagaaacaggaaagtcaaagaagaaaaatcccaaattctgcatttaaactcagttcaagtttccacatacgtgctggggaaacaaagcaacttctaagcaagaactgagctctgagctgctgcatgagtgacagtttgtagcttgagtctgaccaagttgactgcctgctaaactgaaaacatcaaccccttttggggcaaaccaacagaatccataccgttctgttgtatgacacctccaccatcatatcacaatgtctaggacacaacacaacatcactcagcacaggaagactcatggagctgacatgccaactccaggacacacagatgtggaaattcccagacaagcaatttaaagcagacattataattccatacttaccacagcaaaatgaagaaaaatgcactcataaagaataaaaagatggaaaatctcagctgagaaacacaaaatataaaagagaaccaaacacaggcagtgcctactctccagctctcaactatagctgccttaccattgagcatgacagtcctcaatgaactctggttactattatcagccttattaacaatgacattggaagccagaagataatgaagcaatgcttacaaaattcagaaagactacagtttataccattgccaagttagaaatctctaaccaaataattaagtgtgagattagaacacagatacatgcaagatattaaaaatgtatctcccaggtacccttttttgggatctgttggagtacaatacttcatgaaaataagaaaaccaagaaaaaggaggacagggacttcaacgaaggagagaaatgaagtgaatttcatgctgaaaggaagcttcgggatgcctgctgtgtagcaagctgagagcaatctgtccagactgaagcaggagggcagagggctccagaaggggcaactcaaaacgcacgtgtgcacagagacaggttacctgaagggtttgactatgtttagagtaattttttatagctctgacagacaatttgggaaggaattcataagtacattcatgatatatccattaactccaggaaaatgaaactcatacaaaaaagtaaacatgatctcagcatatcatctggtatcactgtaaattatatttatatggtaatacatactactttgataaaaataaaatttttttaactaaaacagtatctcagcttggctatcattccatcatagtatatatgtgtctactataccttttgcttctttttttgagatggagtctcgccctgtcgcccaggctggagtgcagtggcgtgatctcggctcactgcaagctccgcctcctgggttcactccattctcctgcctcagcttcccgagtagctgggactacaggcgcccgccaccatgcccagctaattttttgtatttttagtagagacggggtgtcaccatgttagccaggatggtctcgatttcctgacctcatgatccgcttgccctggcctcccaaagtgctggaattacaggcgtgagccaccgcacctggcctgctttttttaaactatgaaatatttggagcatccaggaaagtacagcaaacaaaatatagaacatacacgtatctaagacctagcttagaattagccatatacacttcaggtctttgttgttgttaactattacagctgaagtctcctatgcagacttatctcatttcctttgctctcccctcagcgggaatcactatgctaaatttggtgtttatctttcgtatacatgtttttatattattaccacatgattcttctcagaaacaatacagaattctcttgcatgtttcaaattttaagtaaatgtgctaatctgtatggtttttttgtatttttttcttttcattctttcaactcaacatagagatttttccatattgatacatgtaactctagttcattcattttcactgctacattatattccgatgcaactataccacacttacccatctcgtgcttatgagcactgaatctgctttcagcttttggctcttataaacaagtcctgtgctcctctctcccattcgtgtgtgcaagggtttctgtgggagtggaattactgggtcctacgcaagggcacctttgacatactgtcaaattgctctaaaaactggttaaatcaattcaggctctcactaatattgtttaccaaagttttttatctttgccaatctaaaatataatataacattaaagaaagtttggaaaaaagaagacattttaagtatttaaaaaaatcattagataaccctaatggatctcctgtgatttttgtatttccttccaagtccctctgcattttctttatttttctgaagtagtgtcgtgaccgcctgctctccaagaggccaggagaaaccctggcttctctcaccttgctatccattcagcagtgccctcaaagaggtctggagtgatgatgttggtcagcgaggctacggaggcagcacagtatgcgcttctggaaagacagaaacgggaaacacattaagctctacggaagagctaatgaggctcagtgaactccgcgggcggactgctcgccttgcctagtaagctgtaatcacctcctgtcctcactcttggcacacggtcagtcctcctgggtctccaactgagaggtgtgacattctatttggatagagttgctcacggcatggcttcagtgaaagaacatgacattctattctccctacctccacatggtccaatctacatcagaggaaataacagccatatcaattcatgtcaaaagtggattcagctcttctttcaaagacctataatggttgccataaatctatggtatcattcaggtacttctgatatgctcattcatttggatgttagtactgtttcagagccaggatttctgtttacagccttgacacattaaagattaactatactttttctgcaacagataaactgcaaaacaggccaccaaattgtaatagatcaaacaaggataggaacaggtgagtccactccaatacagtccttaaacctctagagggagaaaagagccttgatttcaaacctctcaccagtacacacacacacacacacacacacacacacacacacacacgttaaatgaaaaaggcgcacgtctatattttttgttttgcttttgttttggtttttattgagacagggtctcactctgtcgcccaggctagagtgcagtggtatgatctcagctcactgcaacctccgcctcctgggttcaagcaattctcctgtatcagcctcccaagtagctgggattacaggcgcatgccaccatgcctggcttatttttctatttttagtggagatggggtttcgccatgttggctaggctggtttcaaactcctgacctcaagcaatccacctgccttggcctcccaaagtgctgggattacaggcataagccaccgcgcccgggctattttttaaaaaagcattattaggctgggcacagttgctcatgcctgtaatcccagcactttgggaggctgaggcaggtggatcacgaggccaggagttcaagaccaacctgaccaatattgcgaaaccccgtctccactaaaaacacaaaaattagctgggcatggtggcgtgtgcccgtagtcccaactacttgggaggctgaggcaggagaaccacttgaacccgggaggcgggggttgcagtgagccaagatcatgccactgcattccagcttgggcaacagagtgagactctgtctcaaaaaaaaaaacaaacacaaaaaattattatacttgatttaggatcattcttgctgttccatcctcccagccctaattcttctcggggcacattttatttcagcttctccctctgtcatggtatacacacacagactgcctttccttcccctctatggttttttcaaatacccggcacagggaagacaaaaatcattggtttgaattctgctcaaaaatccttctcctggccaggcatggtagctcatgcctgtaatcccagcactttgggaggctaaggcaggtggattatttgaggtcaggagttcgagactagcctggccaacatggtgagacctcgtctctactaaaaatacaaaaattagctgggcatggtggcacacgcctgtaatcccagctacttgggagaccgaggcaggagaatcgtttgaaccccagagacagaggttgcagtgagccaagatcccaccactgcgctcctgcctgggcaacagaaagaaactccatctcaaaacaaaacaaacaaaaagtatattcctaagggctcctaagaaacataaaagaagggcctagtttccatcttcttttttttttttaagataggatctcactttgttgcccaggctgcagtgcagtggcgctatcatggctcactgcaacctcaaactcctgggctcaaactgatcttgcctcagcctcctaagcagctgaggctacagatgcatgccaccacacctggctaattttttaaaaattttttgtagagacagggtcttgctgtgttacccaggttggtcttgaactcctggcctcaagtgattctctcatctcagtctctcaaagtgttgagattacagacatgagccactgccgctcggccctggtttccatcttactcagtatagatataacatgaagtcagacttactgaggtattccaaagaagtctctgcagaagctgcatgcattatgatcctaccagcatttttagcagccaaaggcacagtggaagtttagttccaccagcaggcattgggagcacacaagagtcacaagtgccaatgccaaatgtgatcatctaccagcagctaattttgaagatctgtctaatttccttgcaattgtaggcctcttaaagaggctcagatgcatttgctcttgaatcctattgtgacttgtgaggtaggaggcgacctataatacagtttgcctctcacaagtgtgaggactaagaagtgatgacagaagacaggagtcccaggtctcacgctgagatggggaggaaacgtaatacaaccttttcatgtatttctccccctttccctccacccagtcatcgcagctctcaaatttgaatttgtccactaactttccatccttgctgccatcacccaaatccaagccttcttcaacctggatcagtcttcctgctctctctccctccagccctgaaaccagagggcttttattggaacactacagtccatcactgcaattgggaaacttctaagaaaatacaaatcagatcacatcactaaactccagactccataggagatttcagggcctctgtagcctgttcccagcctgtccctccagctccactgctcccctgcccaccaggccatctacacttcaacactgaacttgtcctttcttgagcaacacatgctttctcaccaaacttctgcaaatgctagatccctgcctccaccttatcctcacagaatgatctagattatataacctagaaaggaggtctcctttcttaagaactgagaaaaaatagtgcttgctatgagttcactgtgatttgattttttacaatacactggaactacagacccttgagtaggctcatctctgaaactatcagcagtgtaacagagcagaaagatcatccagagactgctgtctatcccagaagggcagcgagctagtctccagatgtcaaactctcccatcactgctgcttttctccaagtcaaatccacccaaacaagcactcctgaggactggctgatgcttccaggcaaaggacaatgaaagaaatgccaagtgaaaaatgatggaatcggggtactagaaaccaggcaaagcaaggaaaatggatgcaatctgctagcttttctctatcattcatatctttaatcctttatgtaaatagaaagcacgggcacgaatggcagagcatcacccaaagagcaaaggtcagggaagaatatggctacagtgcttggcaggggaaccaagctgccttactggagaagtttcctagcatttatctagaacatataaataaagagcatagggaaaaaaaaagtgctggaatgaataagatagcaaataatcacagctgcaaaaggtatatgataaaataccaaaaggatcttgctatgatttgtttgcttttgcctaataatcttagtaggtttttaaaagctgcgtttcaagactgtgcatattttgggggaatagcaacagaacaggaacgaaaatgtagtgaacacgagggaaaaaaactcttttaacattttccttaagaagaatcaacacatactgatttacctcagtcgttctactggtttcactggtatacacagatcctaatctaatttttttggttggattagacaagttagagatagaagaacatcttgaactaaaggcctttgcagcctgattacctattatctgtaatgtattttatgctccacaatgttcgtggttttttcctcccctatactttcaaaccaatggttaaaccagatgcttaagccagactattaatcaacttgtgtagaagcaaacccatttacacataggcagtaagacagctttgctatagaaacctcacaaaatgtatttctcaactaaataataagaaaatggcataaaatctcaataagccactgtcttagagaaatggcttattcaatgaattccctgtatgcctcataagtaatctgccaggtgaggaagcaacttgcttggtacatcagacacttatggaagaaaataataatttcgagctaactggcaccaatcagttaatgcgattttattgcactgcactctcccggcccacaaggctctctgcacctcccagaaaaactctcatgtgcctcaggaggacctcagggattagacattctcatgatttcatcaaattcactcagaaggtatttactgaggccctgctggactttcccctcccttcctatctcagagaggtgaaggaatacattacaccatacagttatttatattgtggtatatcattttgtaccaaacaaatgtatttttaatttctaaaacaaaagcatttgtttcttatattttcacatttacataaaataagtcaagtgatcatgacacctgaggacatctgcatcacatctgaatgattctgacgtgtcactgacatgtcatcccatgtgtcattctgggacaaagcagcagcttccccatgatgttccttaggcttggcatctctaatggcagatgagctctagagtcaactgatgtggcagcctgtgcaaaaccccactcacctcacatccacctcacctccgacatgcatgagaaaggagccgtcaggttgcttcagggagtacaaatactgaagaagcttctctctgagaaacagggaaagaggtaggagaggcaacagtcagtgcgtgtcagcaggcggggaactcctctaggtttctgtcactgctggctttcactgtacctgttaatgatgtcataggcctcctcggtgccaatgatgcacaatgcattgactgctgcatatgtgggtgcaaggtgtggatactgaccgggtcctcctccaaagccaccttctgggctctgacacagctccaggaactgacacacactaggtacacagccaaagggcaaaaacaaagtcagagagcattcatgtcaaaacaccaaattcccactagattccaggcctttccaatgatcccccactccctcaaaagttgaggggaacctctcctcccacttgttgaatataacctctccccaaagggcttaattctctctccagctatcatcatttctgtctgccctcctctgagtttcgtacttaagcgcttgttggtcatgaagcagggaacacaaggctgggaagaaaccgactttcgtagctatggggtaagagtctcccgtgcttcccacacaaacctttcccagactttccactcaacttgctgccctggacctgtggtaccagcctcctcctccttgcctttgggaacctcccagcctttgaattttgccaaaacatggtgctcaactgcttctttccacactaaccatcctagtcaggatccatcacctaggcctatcatgaacatgtaaatagaggtcttctcactcccattgccacctaagcctctgtgggccactgatttctactccaccagtaagaagcaagttttgtttttttgtttttttttttgaggcggggttgccctcggtcgcccaggctgcagtgcagtggtgtgatctcagctcattgcagcatccgtctcccaggttcaagagattcttttgcctcacccttccaagtagctgggattacaggcgtgcaccatcacgcccagccaattttttgtattttcagtacagacaaggtttcaccatgctggccaggctggtcttgaactacctgacctcaagtgatccacccgccgcagcctctgcaagtgctgggattacaggtgtgagccactgcatccggctgaaaaacacatttttaatggagcctgcttccatggctgggagaacagaagagaggcaggctgctctcatgctcaccttaattgcggtaaacataagaggagctgcactgactcgccgtgagaatgcctcccagtctgcgggttcttggagaattctccacgttaattcaaacaggctcccattccctcactgaggggagctgttttctgagggtttgcctccaagcctggcatcaggctgcccagaggttacagtcttgctttaggtgaaatcaagagagccctatcatcagtccggggtcttccgaagtgcaccagaaagggtgccccaggaaagccctggttatcaagctgtttctccacagctcagcagggtcacagccttcccgccaggagaaacctccatttacaacaagcaaactgtctttgcagtgttcatggggccttctttcctgggcgctttcacctcattatttccttgctactgctgccagaaagactacatagcctactctccaagaagacacaagtttataactgtttgccaacatcacatttaattgctttcgatttcagagttcccattatccgggcagagaaagcaaaagcaaacgctgctgccttgctctgtgagttctgaaacgtcacaggttaaaacaacacatacttctttttgcacctacaattttactgtagaaaacacaaggattgaaactgaagttgaaaacaattatgtggcactatggtttttgtttttgattttgagagagggtcttactctgtcggccaggctgcaggacagcggcataatcacggctcactgcagcctcaacctccccagactcaagctatcctcccacctcagcctcccaagtagctagaattacaggcatgagccaccacgcctggctagtttttgtattttttataaagatggggtttcgccatgttgcccaggctagtcttgaactcctgggctcaagcaatcctcccacctcggactcccaaagtgctgaggtcacaggtgtgagccatcatgcccagcatgtgacacatttttaacagcaattaatttctgtagagaacttgaatttgttccttctttccaaatcgtcatcaattcttatgacatttcccagaaacaaatagttaataagctcatgccctaacaaaggctggctgcactagcataccaaaaggtttctgtaccacaaaaagttttagctgatacaaaacttaacagcacattttttaaaagaaagaaaaagagtcacctggttatccactccctttcccagctcctaagatagaatcgtgccgaacgcaacactactgaccctaaagcctcgaattagttaggatctgaatgtaccagacacaccttgataccatccctccatgccaacctccctcagctgacatgctgcatctgactgtctggggctgtgctagagaactggaggttgggcttctcttgatctcagacacttccgtattacagaacattctgatcccaaggctttccaacttgcaccttaaggaattggcaagttgactatgaactaccagctgtcattcacagacttcttagcaattctgaagaccaaaatgttaatgatacttctacatatttaaaaaaaacaaacaaacaaaaaaaaggagccaggcatagtggcttgtgcctgtaattccagtactttgggaggccaaggcaggaggattgcttgaagccagtagttcaagaccagcctgggcaacacagtgagaccccagctctacaaaaaaatatttttttttcccacaaatgtagggggagaaaaacttatcatagagacaagaagttcaccaataaataaaaaattacaagcaaaaaacattgtacaaacaccaagtggcacattttgtgaaaaacaagtattcacaaaatcattcctttagaatatgactgaaagctgcaatacatcaattttctttaacgtcagcaaggcatttcattctagcttacgtgccaattaccagcaaagtgggaaactatcttctatatcatggatcttcaaacccaaaatgtgtgcatcagaatctgtagaaagctaataaaagaatacagagacccagtcctgctgaggtggaaaagatcctgggcctttgtatttttaccaaattctcaggtgattcagatacatgcaaagcttgagccatcactagtccttgctgcacaactaaaattacttggggggtgttttaaaaaaatcccaacacccaagccacacctaattccaattaaaccggaatcactatgggtgggacccaggtggcagtattttttttaaactccccacgtgattccaatgttcagccaggtatcagtgcttctcaaacttgagttgcatagaaattacctgtggatcttgctaaactgcagctctaattcagtagaactagatgggtctgagagtcctctttttttttttttttaggagatggagtgtccctctgtcgcccaggctggagtgcagttgagcgatctcagctcactgcaagctctgcctcctgggttcaagtgattctcctccctcagcctcccgagtagctgggactacaggtgcatgccgccacgcccagctaatttttgtattttttagtagagtcagggtttcactgtgttgcccaggctggtctcgaactcccgagctcagacaatccgcccgccttggcctcccaaagtgctaggattacaggcgtgagccaccatgcccggctgagagtcctcatttctaataagttcccaggtgatagcaatgctcctggtctggggaccacattttgagtagcaatgagatacatctgtgctgtccaataggcagccactagccacatgaggcaatttaaattctcaattaattaaaatagaaaattcagctcttcagtcacacaagacacatttcaagtactccacaactaactgtggctagtggccaatatagaacacgtatagatgtttatagacacctatagacatttacagaatatagaacattttcattatcacagaaagttctgctggacaccaccacttttatcattccatcattaaagagtatgtaaatcttgtaagagggtcaagttcaaagcagggatatcagcgattgcctctcagccttataaggagtttacttgggactcttaggtgatggctgaggactgatctaaagtgattgattctggccaggcgtggtggctcatgcctgtaatcccagcactttggctgaggtgagggggatcacttgagctcaggagttcaaggccagcctgggcaacatggcaaaaccccatctctacaagaattataaaaattaaccaggcacgttggcacccacctctagccccagctactcaggaggctgaggtgggaggatcacttgagcttggggaagtccaggttgcagtgagctgtgattgtgccactgcattccagcccagacaatagagtgagaccctgtctcaatcaattaatcaatgttgattctaaacaccgtcatcagtttggatgaaggattcaaaggcatgtacagtaaataagcatataatacaaaatgagcagcaaaacaaatcagaaaccaataagaataaaacaaatgcaacaggtacaaatagcaagaattacgcttagagatggcaggggtgggggatgggtaaggcacatgaatatgggaaatgactaggaacatagcaggaaaagaccagtaataagggtccacgagttgtgaagaacaacaataaaaatgcttgttaaaagcatcataaatgcagtattagtcagaactgtatctggctctagcctccattttccacctcaaagggaattcacatgagagttgtaaaaatgactactttttttttttttaagtatttggctgggtgtggtggctcgtgcctgtaatccctagactttgggaggccaaggcaggaggatcacttaaggccaagagtttgagaccagcttaggcaatacagcgagaccttatctctatttttaaaataatataaaaagcttaatattacagacaatcacagtgagaaagctacccagcaaaatacctcaaatatacaaaggataattacataaacattctagtaggtaaaaactgagactaatttgtagcaagaagtatttaggttacataaaaaacttcagcactagactaggctatcatagacagacttaaggcctaggataagttataaaaattatagctatgttctgcacaattgggcaggtttaaaaaaaaaaaaacagaaaaaaagattacagctttggaaataggaacagtcatccatgggcagaacggcttaggaggggatgtaaatgcaagatgcatgagctggcatcacatcaagcttgttctcgtactaactaaaacagcttcagcttgatatagtgaagaggaaatctccttccctaggtagaatatgacaatggacaggtgaagacgggcagcatctcttgttgattccgggtggcctctgctgctcacagagtcagacgtgttatttgactcttcatcaagcaccggcaagtctctggatggctgctgttctggaagaatggtcaggtcgaaagttggctactataggccgggcgcagtggctcacgcctataatcctagcactttgggaggccgacgtgggcggatcacttaaggccaggagtttgagaccagcctggccaacatggtgaaaccccatctctactaaaaatacaaaaattagccaggcatagtggcatgcgcccgtagtcccagctgcttgggaggctgaagcacgagaatcgcttgaacccggaaggtggaagttgcagtgagctgagattgcaccagtgccctccagcctgggggacacagcaagactgcctcaaaggaaaaaaaagttggctactttagagcagagtttctcaactgttgacactggggctcagtaattctttggtgcagggaccgtcctgtagaggatatttagcagcacctctgacctgcacccaccaggtgccaacagcacctggccaggaaaaatgcccaggagacaaaggcctagatatggtgtcctcactgaaaggtaaggaaacatacaaactagacttaaaaattaaaaggaaaaatatttaaggggctattccggggataagctactaacaaccttttgaaagggaaaggataaaacactgaaatagcaaaatttgaatttatctttggaaaaatcttacaagctgaaatgtcctaaaatggtttttaagttaaaggcaatttttaaatcttacagaagctaaaaacataactttaacagtgcgatggtctccctgtgaattttattttgctctgtttcactgaagctgctttcagtaacaaagaatgggattctcattagaggatgcttccttcagtgccaaaaccattaagcaaagcaaatgtacttagtctagttccaaaatattaattcattttagataaacacatataaatgtgtgcatataacctcttaaaagagggaagctaggccgggtgcggtggctcacatctgtaatcccaacactttgggaagccaagacaggtgtatcacctgaggtcaggagttcaagaccagcctggccaacatgttgaaagcctgtctttacaaaatacaaaaattagctgggcgtggtggcacacccctgtaatcctagctacttgggaagctgaggcaggagaatcacttgaacccgggaggtggaggttgcagtgagctgagatcatgccactgcactacagcctggcaacaagagcaaaactccgtctcaaaaaaaaaaaaaaaaggccgggcgcggtggctcatgcctgtaatcccagcactttgggaggctgaggcaggtggatcacctgaggtcaggagttcgagaccaacttggccaacatggtaaaacccaatctctactaaaaatacaaaaattagccgggtgtggtggctcccgcctgtatgcctgtagtcccagctactcgggaggccgaggcaggagaattgcttgaacccaggaggtggaggttgcagtgagccaagatcgtgccactgcactccagtctgggcaacagagcgagactctcaaaaaaaaaagaggcaagctgaagtcctacctatggactgggcatggtggctcacgcctataatcccagtgttttgggaggctaaggcaggaggatcaattgagcccaggagattgagaccagcccaggcaacacagcaaggcactgtctctaccaaaaataaagaaaacattccaggctatgaatacattattcttgaaacctctgataccagcagtaacaacctcgccttgctggctttggtcagcggtcatagcagctgacaaaagtattttgtccactagagggaacccagcttatcatattgttccctaaacaaatagaagcacagcagtgaacaaaataggaaagagaaacctttgtgtaagtgtagggggcgtgtgtgttacatgcaggggaaaagaaggcaggaaaataataaaactgcagagctagactttttgactctaggtcaccttaatatatttgtatgaagaaagaaaactgaacgcatttcaaagcatttcatttccctgtgcaagataaataaaaaggcaatattctatttcagctagtctaaaaaaaatcttctatttatatagaagtccttaagatttatctgtatcttactaaaaataatctatttccttatgggtcagagccagtaggctttgttcataacaagtgttttctgcacctagaagtaaccacctcctaggcacaaagcaaaatacattattgggaagtctaagaaatgtttaaaagttcactaaatcaatgcgtagaagaaccacaggtaaagcttttaaggcatctgtgaagcagaaactctcattaactgtcaagtggtttttgaaataaggacaaatcagcttatttttaaaccattccttttttaattacaaaataataaaagatcattgtagaaacttcagaaaatgcaagtaagcttaaaaaaaatgttttgtttgtttgttttttgagacaacagtctccttctgttacccaggctggagtgcagtggtgtgatctcggctcactgcaacctctgcctcccggattcaagcaattctcctgcttcagtctcccgagtagctgggattacaggtgccagccaccacatctggctattttttgtatttttagtagagacagggtttcaccatgttggccagactggtctcgaactcctgacctcaagtaatccgcctgtctcagcctctcaaagtcctgggattacagccatgagccactacatccagccagaaagttcttctttttctttttctttttttgagatggagtttcactcttgttgcccaggctggagtgcagtggtgcaatcttggctcaccgcaacctccgcctcccgggttcaagcgagtctcctgcctcagcctcctgagtaggagccgggagtgcagtaacagaaggagactcttgtctcaaaaaacaaacaaacagcctcctgagtaggattacaggcatgcgccaccacgcttggctaattttgtatttttagtagagacggggtttctccatgttggccaggctggtctcaaactcccgacctcaggtgatccacccacttcgttctcccaaagtgctgggattacaggtgtgagccaccgcgcctggcctttttttttttttttttttaagacagagtctcactctgtcctccaggctggagtagagtggcatgatcttggctcgtcgcaacgtccacctcccagattcaagcaattctcctgccttagtctcccgagtagctgggattacaggcatacaccaccaagccaggctaatttttatatttttagtagagacaagatttccccatgttggccaggctggtctcgaactcttgatctcaggtgatctgccgaccttggcctccccaagccctgggattacaggtgtgagacaccgtgcccagcccagaaagtttataaaatcacttttaaccccatcgtccagaaataactactacatgtatctttctggttctatctatgcatatcatcatctatatttttaatgtatgtaaattaaatcttttaaactattttcatttcacatctctctatataaatacatatattttaacatacaaatatacacattcatatatttattgagacagggtcttgctctgttgcccaggctggaatgcagtggtgccatcatggctcactgcagcctcaaacccctgaactcctgtctcggcctcctgagcagctagaactagaagtgtgcaccaccacgcccagctatttttatttttatttttgaaatggagtctcactatgtcgcccagactggtcttgaattcctgggccccagtggtcctctgaccgtggcctcccaaagtgctggggttacaggtgtgatcatgcgtggccacatttatacattttttaatggttatatagtatttcacagaatgtactgcaccataaatgacttatgttttattttttaaatttatgtattttatttatttatttttttgagatggagtgtcactctgttgcccggactggagtgcaaaggcgcaatctcgactcactgcaacctccgcctcctaggttcaagcgattctcctgcctcagcctcccgagtagctgggatgacaggcatgcaccaccatgcccagctaatttttgtattttagtagagatggggtttcaccatgttggccaggctggtctcaaactcctgacctcaagtgatccacccacctcaacctcccaaagtgcttgggattacaggcgtgagccaccacacccagctttacatttaaaaaaaattttttttaaacattctctactgttgatatttaatttagattgcttccaatgaaaggccctttaaaggctcctctcttcctatgtgacattgccccagaagcggcgctgacacttcctcagaaaagccttcactataaaacaccaagtacacagcctagaaaaaaactcagtcgattttggctcgagttcttccacctcaggcaccccctgtgattctctcttccagtttttcatgggtctgcggcctcctccatccagcgttcagatccaggctcacagaaatccccattttttctttcttctctcacacccaactttcccattgtgcaagagtgaagggaaaactttccaaatatcctgattgtgtaggagtgaagggaaaacttcccaaacaatccccaggcccccgagctggtatttcaaaaacacacgaggctggatgtggtggctcacacctgttatcccagcactttgggaggccgaggcaggtagatcagctgaggtcaggagttcaagaccagcctggtcaatatggtgaaagcctacctctactaaaaatacaaaaattagccaggcacggtggtgggtgcctgtaatcccagctactcaggaggctgaggcaggagaatcgcttgaacccgggaagcagaggcagcagtgagctgagactgtgccactgcaccccagcctgggtgacagagtgaaactctgtctcaaaaaaaaaaaaaaaaaaaaccacgtgggcctttctttgacaattaaattcctgttactgcagaaactgtgtccaactctccttccagtgctggaagcagccaggcttgcagtggcatcccgatgatcaaaacaatgcacttgcctctccctcagaaagcatcctacgtaccacaagggttaatggcctaattctttattatcttccccatccacattcatcacaagacaccctgcccaggaaggcaagaatgagaggttattgttaagacagaatgaatgagacaatgtgcagttctgttcctctgacctgacaatgtgactgaggcaggggctctgtgaccagagaggggccccggctaggcctctgtgtgtcccagcacagctgcctccttgtgctgtggagaaacaaacctggctcagaagtctctcatcccagatgcttcgacctcaagagcaccagaggaagctgagaaattcgagatgctgcctagagcccatgctgcctctcagtggatctcttggatccaattcctggctgccctttcttattccaggtatccctaggactggagtcatgatcagtcttttcttctttaatatataaatggtgatgagtgtctgggaatgagatgccagatcacgaatgccatctgtacaaggatcttgggaagaagctcagttgcttagatctctaatcatcgatcaggtttaggaaaactgagagtcatggcatttgtatgccacaccagtaacacatccagtcccatcaagagctacatggtcgctccaagcaccgggagcggggaggtacttctatagaggtgcgtaggaaaggcaaaggcatttttgttcactggactggcacgtgcttccccacagaagctgttcaaatgcatactgtactttctggcaaaatcttgtctctcagagttgatgattaagacttttctcaaagaccagagtcaagagccaaaagaaaaggccacagaagaaaccagaatccttctcttggaagttcaaagtcttgttctacccaccagcttacattagttttctaaagtggaggagtttcaggaagttgccggaggtcatgagaagagcaaagatttctttgtggcactgtttttttccattccaaacaaacaaaacagaaacaaaacaaaatcccaaactcaaaatacaatttcagagaacaccccagatttcccaaagacagactcactctgtagccactatctgggggatgggttcatctagcagttccaagctgtgcaggatccaatagcagagccatgggcggctggcatccagacactgggagagagacaggagagaaaacatcccttattcacaatcactccaagacactgctgccaaggctgtatctgtctcactcccagcagcctggcaagggggaggagggcacccttgctcaaacaacaatcagtgaataaaggacactttgctttgtggccttagccaggagctgaaatgaccatctgttaaaaaaaaaaaaaaaaaaaaaaaagataacaaggctgggcgcggtggttcatgcctgtaatcccagcactttgggaggccaaggtgggtggatcatttaaggtcaggagttcaagaccagcctggccaacatggcgaaaccctgtctctattaaaattacaaaaattagctgggcatagtgatgtgcgcctgtaatcccagcgacttgggaggccgaagcaggagaatcacttgaacccgggaggcagaggttgcagtgagccgagatggcaccactgcactccagcctaggcgacagagcaagactccgtctcaaaaaaaaaaaagaaagaaaagaaaaaaaagacaacaggattaaaaaaaagatgaccctgaacccagtggatccctccctggcaggcatctaaggaaggctgagcagaggacttcctacaggccaggaggttaggggctgctattttctcggtatagaaccaaggagatatacattctctgaagagatttcctagcttaactcaatcactgattcaacaaatatttgatagtatctacttgtgccaagcactgtattagacactggggggatgataataaaatttggtttctaccgtttatttttttgagacagggtctcgctctgtcacccaggctagagtgcagtggtatgatctcagctcactgcagcctcaacctcccgggctcaagcaatcctcccacctcagcctcctaagtagctgggactacgggcacacaccactatgcctggctaattttttaagtttttatagagacagcatcccactatgttgcccaggctggtcttgaactcctgggctgaagcaattcacctgcctgagcctcccaaagtgctgagattacaggcattagccaccatgcctgaactggtttctgttcttgagatgcttgggatatagaatgtgtgtggttacctgtaggggaagagagcactggacagacatataagttacctcatgtctttctggaaccaacacgtgtacatatacctggagaaatgctgtaatggacgaaaacagagttttgagggagcacgtggaagagactgactaattctgcctggggagctaggaaaggcttccaaaggcaaaatgcagacggctcttgatcctaattaaaccataaatgattattgagcattcaaggctaggcagggtaggtaggagtactgccccagttttataaattaaaatatataaatgaggtccaaagattaacctttttcagattataaaaatagcaaatgtcagaggtgagacaagaacctaggtttttagagtcaatccagtgttctttccgttggcccaagctgctctcttcaaaactatgctgatatcccaagctgtggctaacccaccacctggaaggtaggctggtgagctactgaagacactgccagggatgcagcttaagtttgaatcccagctcctcatcttactcgctatgtgcctttgagcaaatgacttaattttactatgcccatttcattatctgcaaaaaacaagagattgatctacctcatgtagttacaagatttaaataagagaatgcaactgggcgcagtagctcacgcctgtaaccccagagcctcaggaggctgaggcaggtggatcacttgaggtcaggagctcgagaccagcctggccaatatggtgaaaccctgtctctactaaaaatacaaaaattagccaggcgtgatggtgcacacctgtaatcctggccactcagaaggctgaggcaagagaatcgcttgaacctgaggcggaggttgcagtgactcacgatcatgccactgcactccagcctgggaaatacagcgagactccatctcataaattatgagagaatgcatggtaagctttcagcacactgttcaataaattgttagctgatatggtaccaactgtaacataactattgaggacttgagtcaaggattgaaaattcatagcccacaggccaaatctagcccatggatgtgtattgtttaactggtagtagctgcaacatttgtcaggagagtcacatgaaaacgtgatttccggcttcatttggaggaagaaaaaaaaaaaaggaaacaaagatgatttggcaaccctgggtctgcattcccagatggcagtaatgggcaggaaagaagttaagggcacagggtctccagttagcctcagtctccatgcagcccacttcactgatttatgctgcctgcctgggccctacaggcatttgagttggcaaatcattgccacaaataatcaaatgtggaacccaaataaaaagcagattaaaaatagagatgctgctctgtgttaagcagggcagaaagactggagacttcctgttcacattcaccctttgcctgccgctcagtcccatccaacatctgtcccctccaccgtcacccagtcctgacgttgctctgggaaatattaaagatctactcttaaacagtaatgttaaattgcaaggaccactctctatactggtcctctagtcagtatagaaattagatcttattacaagaaagggttttttgtctctttaatgaagatatgaaaagtaatgtacttactagaaggagtggtgaagttggaaaatttgtaaccatcacgatacagacttaacaggtttggacaatagtcctcaataaatgagcgagaaattagatcagcttatagggcaaagggttaagggtgaacaggtaactggcatttagccagctgtcaaggaggtctagataaagcacgtgaaccccttagtcatcatctagtaacagaagaaagccccatcctatctagggtgctccactcactctggaagagactaggttctgccctttcagggctgagtcccagctctgtgacagcaccctacctcctgccagagccacagagaacaaagagtgactctgcaacaggtcagccccaacagtcttttacgtttaaatagaaaaaggaggaggatttggtggataatttgacagcaagagttcctgggtaatgtgtttacctcataggcatctgtcagttgtcgaaggcctcttttcagataatggaagtgcttctccctctgcaaaacaagcctggaaagacaaacagtttataagcccattctaatagcttatgcttccaccatacacacgtatgtgcacgtacacacacacgggtaaacactcagcttcaggacgtccccctgcaatcactgactggataaccagcaacttctctggttccaaagagcaactaaaccagagaaaagaagctcttgtctgaatgtctctaaagcatctgaaaaccatgccagctgacatttagagtgcgattgtctcctaaaggcagtgactttgggctaacggaaaagccgcaatgagcacacgcagccaggcaatgacagtccacccagaaacttcctccagcatctaagaacagatatctttgtgcctccccatcctataagcaatttaaatctgagcctcgccacttccctgcctcagccgctgtcatttcagtcaccccgtctgggatgacttctccaaggcccataatttactccctgcctgcctctcggttatccaactattattctctccctgaaattccacctcccacgtgtgacccacagccctggccagaggaccgtgttctgcagccagtcgctgtccttggctttcaagtcagcaatactggctttaagatggaatgtgccgcccatggccacctgcacaggccgggcaaagcacagaggctgcacttctttcttggtctggcagaagagcctgtgtgactagggaaggaaacaaaaagcacagattgtcaagatgttccccgtgcttgcagattacagaaacaaaggaaagagaaccattccctttgctaggtagtcaattccacaattgtttatcaaattcccactgtacttggctcagagtaagagccttcatgcagtctttttttttttttttttttttcctgagacggagtctcgctctgtcacccaggctggagtgcagtggtgtgatttcagcttactgcaacctccacctcttgggttcaagctattctcctgcctcagccacctgagtagctgggattacaggcacgtgccaccacacccagctaatttttgtatttttagtggagacgggggtttcaccatgttgcccaggctggtcttgaactcctgacctcaggtaatcccctgccttggcctcccaaaatgctgggattacaggcgtgagccaccgcacccagcccttcatgtagtctttacctcaaaaactcttccaattcagaaatgaggtaagtatatcaatggctacaaggaaagaatgggtaggttttgcaagggaaaaacatactactgaggctcaaaagggaggggatatctcatgaagaaaggaatgatcaggaaagtttgtgtgaaaaaggaggaatgtgcgatgagtggccctggcagaaggagaaaattttaattcaattttaattcaagtttaaatagctgcaggtggctaatggctactctactatgctgcacaggtatcaagtgtacaagaggagtgacaggtgggagaatctgacctcaatacagggatgaaagaggaatgggaggaaagcaggagtactgccccagtttaaaaacaaacaaacaaacaaaaaaacaaggatctgggatgctgactaaggcatttctactcaatttactaggcaaagggaagtcctgaaggtttttgagatgaggaaagaaatgatcagaactgtgctttggagaaacagtaggtagtcagtatgtgtttacaaactgaagtatctgaaaatatcgcagtgggcagacagatggggtggggagacagggttagaagctctgaggagctgacccagttggggctacttagggcccgaactagtgtgtgacccgtgatcagctgacttttggatgtgtgggtcttaggatgctgggactgcattcaggtgatgatgtcaatcaggctgctggacacacacgtgaggctcaggagagggattcaggttacacacacagactacgaagcatttgtctgcacacaagtgacaggtgaagccacagaaggtgagagggcagagagagaagtttggaaacaaaactgtgggaagacccatctctaagggtttggaggagccagtgaaggagagaaacaggagagtttacatatgctagggaagagcaaaggaagtgtcatgtcacaggccatcagggaggagagaatttcaggaaggtgtttaacagtggcagatgctgcagcaagactgaggggaaaagacaacaaaccacagaagggctagagacctccaagagcattcagagcagaggtgaaggcaaattgtaaacaagagaaggccagactcagtttctctttcaggaaagtccactcaggacgcagggagcacccatctgtgtgggcagagtgttgtccagcactggggtagaggctgctctgtaccctagagcgacagtccagaggtggacacacatgtgaaaatgacaagcagagccctgtccaataaacgctgtgatcagccacgggaagagatggagggtcagaaaactcttcccaaagggaagagcattgagtttaaggctggaaagacatgagttaagcaggcaaaatgaagaaaacaccatgacacatttgagttagtttagttcagctggatcaaaagtacaaggcagtaagcagagaaattccacattagaaatgcaaaagctcagaggaaatccatagggaaggtctgtaaagaggatggaggagggctgggatgagggtatagtaggagaggtgagcctggaataaggaaggatgctgcattctttgagcgagaaatgatgggtacgaagctagcgaaatataggtctctgatgtgggaagaaggaaacaggaaagtcaggtgggtcagcctcgattttctcaggaactaggagtcaagatggtgggagagctgtggagtggccacggtggtgggtgtgttagggaatctacatgagacgaataaaaggattataaggcagttagtgaagcgccagtgaaattaagaaatataacatgttggtgaagccagtcagcagcctcaggagaaaccaagcctgctgacaccttggtcttagacttctggcctccagaaatgtgaaaaaataaatctctgtggtttaatgcaccccatctgtgataccgtcttatggcagcccaagctgactaataccctcaccggtccttcattctcaactcacctctatccaaaaatcttttctgtgtaggaagttaagaaagaaaaggtagagctcttcctatttttacctgaacaattcagccccaaaaccattcaattacatggagcagaataagacaggtttcgtgcaggacttgagggggtgcagggtgggatgcaggctgtcagctcaagtggatgaggagggcccccgtctcactgtgcagagggtgacaggagagcaagtgggtaaatctattaaggctatgggaagtcaggtttccactgtctgagaaggaacttacacatctatgtgtactgggtaatgatttaaatagaatttcttatgaggggtgagcccactgggcttccagactcttcacaatgtgcctccacccacactactctccaacctcatctccgcccctgagctctggtcatgctgccttctttgagctccgctcctttcagtctcctggctttagcacatgctgttccctctgcctggaacactctccccatcctttaagttagccacccctattccacctacagattcagcttaaatgtcactttctgtaagaagccttccctaacttcccaatccaaattagattctcccagtgattctctctctcaaattatcccatcggtaactgtatatttgtgttcatttgtttaatgtccacctcccccactagaccaagagcccagcaggggcaggcccagggctagccttgctcactctggcttccctgagcccagcagagtgtcctgtcctttggagactctctagatactgctgctgaaagagaggatcacacaaaggcagcagaatggaatgagagcaaagccacttcctccccccaaacctgggccatcctggaaaacatgcatttgattgtgacagatgagaggacaggggattcagtccattgctggttcctggggactttctaaactcactaaagccaggggcctctctagtcaaaaaataagcacctggcatgtaagcaataaagcaatcgaggaaaggtgaacttatttgtgagaccttggaaagaacaacagtaagaagggaatacatcctctacctgctcaggatctgggaaattctaaaattgtatcacatacaggaatagtagaaaacacgggagctaagctggtgcctgtgagagacctgctttgaggactttaactcagagtattctggcttcagagccattgtcagcacttaacctccagggctctattagcacagggacattatcaatatttctcacttctgaggagcacccgtctccttgcccaggagaaaacaaatttaaaaactacatgtgagcgaggtatctgtgtagtttatgcatttcaggtttcttattaaagccaaggtgataaatgcaaaagggtacattcaaaagggtgtgaaaccgtgacaatacccacagggaagaaaaaatgaattttcatgggaaagcagacatgaataaacaaaaccatgaaaagcatggtcaaaaagctccttgggactgactacctcactccaggtagacagtcccaaccttagagaagaaaatcatttctgggaaggggattaagtatagaatgtactgacattcagctccaggcttgactttcagcccagtctgctattcagctttggccctggaacactgaataggcaaatgcctacttcagcatcatcacaggcatccctggacctgtgcgtggtctgtggtcctgggcatgtgtgtgagtctgtcccatttgatcagcatcatgacctcagacacacaaacaagccctgccatctagatttactgctaacagctaaccatgcacttcagctaacagtgaaggttacttcctgtattaaagtgtcagacttttaaattttgactattaatatgttaaatattgagactgtgataatgatttaaaattctgataaattttctaatttattcttatatcctcgcttattctatgatggtgatgtttgccttcagccttatattgatatgttgaattatatactcagccattcagccaaaatgtatagtatctccaatattaattagcatcctttaaaacactcaatttcataggcaacaatgataaaaacgggtaattgtgaaattcctgaaactaacccagagccctgatatattctatttccacaaggatccgagcccaggaggaacactttttttttcccacccatacttgacctaccagctatgaatcaggggatttcactcctttaatatcatctaccaccactctcaaaaaacaactgcttcctcccagactataacctcccattttccctcatatctcagtgtgaataaaagtctttcttcagctcatgagctaaggaaaaacaaattttaaaaaaggaatgaaagagaccaagggctctatcctgatggtaagtgaaaagggaatgtcaaataatcaaaggttcatgtgagaaacagaggctgtgtgtccccagagcccaggcagtggacagtgactcagcccgatcgggtgagtcatcgggggtacaaccacaacaacaaagcccctccaaaagcaatcacccacaccctcaccattatgaagtcttgtcccctctggggaggctaagcttgaaccagcttgtgcctaggggcagcgaactgccaaggataccattacatttaagagagctcgttctcccaagctatttaaataaatggcgtcatttgctaatctctagctgtatctcatgacaagaggaataattcattttattgaggtcagagcattgggttaatgcagagatttggtttagcagttaagggaaagactatactagtaagctgatatttttcctcctttccttccccag

SEQ ID NO: 735275 - DNA, 1934 bp, Homo sapiens
cggcgaggtcggtcattctgcctgtccggtagcaccacgaaacacctgccactgacacctccccaccagcccccgagggttcgcgcaggcatcccgagccgcgccccctggtccgccgcagccagattccctcccgggcgggttacgcccctaggcgcaaaacggaaccactccgtatgaagaagacaaagtataaccagtcacaccaaagagaggcagcattatttagacagccggctactcccccagagactccacccagtcccctgggcccggcgtccagcgcgcagacggtgcccggctccaggagttccagctccctccacgtgtcctgtcttcccagcagcctcctctgccgcctcgggaggaaaatctcctgacaactcgcggtctgcggactacgactcccaggaggcgccgcgccgcggctctccccgcccccccccgcccccccccccctccccgggacgcgcaggcgccttgggctccgtcaacaagccgggctggcgtcgcctggatgcggtttcttccgggatttgtagtttttctggagctacccgggccgtctgttagagggacaagaactacaagtctcggctgccccagcgctgcgagcctggtcacgtggcgggggccgaccgggcgtgcgtgccgccgttgatccggtgctgcagtgaggagcgtggttcttgcccgtgttgtgtgtgtgtgtgagtgagagagcgagtgagtgagtgagtgagtgtgtgtgtgggggggactcggcttgttgttgtcggtgacttccccctccccttcaccccttcccctccccgccgccgctgcagtggccgctccctgggccgtaggaaatgagcgataacgatgacatcgaggtggagagcgacgctgacaaacgggctcatcataatgcactggaacgaaaacgtagggaccacatcaaagacagctttcacagtttgcgggactcagtcccatcactccaaggagagaaggcatcccgggcccaaatcctagacaaagccacagaatatatccagtatatgcgaaggaaaaaccacacacaccagcaagatattgacgacctcaagcggcagaatgctcttctggagcagcaagtccgtgcactggagaaggcgaggtcaagtgcccaactgcagaccaactacccctcctcagacaacagcctctacaccaacgccaagggcagcaccatctctgccttcgatgggggctcggactccagctcggagtctgagcctgaagagccccaaagcaggaagaagctccggatggaggccagctaagccactcggggcaggccagcaataaaaactgtctgtctccatcgtctcatcctcctttcagttcgttggtagagccctcagaaccatttaagagactctttatttttctctttctcccttttttttttaaatttttatttttacgtagaagctcttggacaacagctctcgttctccttccccatttccactgtatattttttaatgtattcccttcagggattccctgtccccaacaggaatttttaaaccaaaacaccccaacttggcagctttttctgtggaggacagacggccggccggacctctgagcacatagtgtcctgcccaccctaccagctcctccagccctgccgggcacatgcccgggggacgcctgccctgcccaggtggcctcctggcccgccctcacctctgatagactttgtgaatctgaactgctctactttgagaagatgaccggtttggagtaatcagaatgaaccctcctcctttttaagggttttttttttttcctttttctaaaaagctatgtatcgctcctattgaaagaccagatccttagagaagtttgtggtataaaaggaagtggggacgaatagtttactcgtaaagcgggatcctcag

SEQ ID NO: 735276 - DNA, 70591 bp, Homo sapiens
cggcgaggtcggtcattctgcctgtccggtagcaccacgaaacacctgccactgacacctccccaccagcccccgagggttcgcgcaggcatcccgagccgcgccccctggtccgccgcagccagattccctcccgggcgggttacgcccctaggcgcaaaacggaaccactccgtatgaagaagacaaagtataaccagtcacaccaaagagaggcagcattatttagacagccggctactcccccagagactccacccagtcccctgggcccggcgtccagcgcgcagacggtgcccggctccaggagttccagctccctccacgtgtcctgtcttcccagcagcctcctctgccgcctcgggaggaaaatctcctgacaactcgcggtctgcggactacgactcccaggaggcgccgcgccgcggctctccccgcccccccccgcccccccccccctccccgggacgcgcaggcgccttgggctccgtcaacaagccgggctggcgtcgcctggatgcggtttcttccgggatttgtagtttttctggagctacccgggccgtctgttagagggacaagaactacaagtctcggctgccccagcgctgcgagcctggtcacgtggcgggggccgaccgggcgtgcgtgccgccgttgatccggtgctgcagtgaggagcgtggttcttgcccgtgttgtgtgtgtgtgtgagtgagagagcgagtgagtgagtgagtgagtgtgtgtgtgggggggactcggcttgttgttgtcggtgacttccccctccccttcaccccttcccctccccgccgccgctgcagtggccgctccctgggccgtaggaaatgagcgataacgatgacatcgaggtggagagcgacgctgacaaacgggctcatcataatgcactggaacgaaaacgtagggaccacatcaaagacagctttcacagtttgcgggactcagtcccatcactccaaggagagaaggcatcccgggcccaaatcctagacaaagccacagaatatatccagtatatgcgaaggaaaaaccacacacaccagcaagatattgacgacctcaagcggcagaatgctcttctggagcagcaagtccgtgcactggagaaggcgaggtcaatggccatttggggttgggacagggagggtgttttgggtggcatagaggttttgtattgagggccagtgatgatgttttgatatttatttcctgctacttaaatttgaatctgagtgaattgtacctatttctgatgatgtcggtcttgcaaagcgacagattcataaagtaatgatgaaatctttctttcttcccgtgtgtatttctaagaaatagagccaactgattttgtatgtaaataccaagagcaatttacctggtactaaacccgcaccccagtgcggacccttcccagccctcatcccacttcctttcctactgtcctggaacctgtctccattgtgtgatccagccctggttctggctgtggtcagcagatcccagtgaagggttttgtgtgtttaggcctcatttctttgtctttttcctactccgttcctggcatttgctgatttctagtgtatactctgtagtctcagttcgtgtttgattccattccatggaaataaaaagtatgttgtacatactgccgaagaattgtcttgcaagttaaggcttccccctttactataagactataaataaaaacttattttatcctttcttggtggtggtgtcttcttacccttgttaaggccaaggtggttgatgagagacccctctggaagctgttagggcctcaatgtaagtctgagtgagaagtggaggtggcttacccggtcttgcagaaccaggagcagccataagccagagttgcttcccctttctcagctcagcctgagagagtaaatgggtggtgatggctttgttcattggatgaggcttttgaggttcaacagggatgtagccttagctgtggcaacatttctagatctagtttctgctaagcaagtgacctttgggggaattggtagcccagagctgtggttcaggttctcctggtaatgagtgcccagttcagaggtggctgttctccaggacctttcagtttctagatagttccagtttattaagaggaggcagcagagctgccaaggactggaagtcaagaaggctccaactgcaccgagttagctctactcagactgggacccaacaccagcctgaacttgtttgaccttggaagaaaaaggaattatggccagaacgcagctcagtgttggttttcctgtctggctgacaggaaatactgctgttcctagacccagagaggaagtcaagtcaaatcagttcttggatttgtcaccatctttagagtggtggagagcactgtggctcctatcaattgtatgtcaaatccgtaatatctttttttgtttaatgggagctggggcagatgggtcttgtcaatttgaaacatgatcaagcctccaaaggccatgattacattaaggaaaagaaaaatgctgggaaagcaagatcccatttataaaggcacttcttttcaagatagaggaaagaaactgcagtaaggaagaaatggaaatgagaatcagcttattgcctaaagccctcaaggttaacatgctttcctctttttcattgcccttaactatatctctttgtatatctgggcttaagtatacagttggtttgcttagtattggtgttagaagtgagctgtgggtgaagccatgttgatgcagagatggaaggcatgtgaagctggcacccagtagggagatagcaaacaggaaggggcagtcaagccagcatgaggacaggtggtgtccctgagagccagtccctggctccagtgtattggctggacaaaggattgagtttaggcttctctagatttcagtaaaccagttcagacaaggggcacagtggctaggtggctggttcacctaggaaaatccaaaccacctgattgacatggtgagcggactttggcacagggtggaggtaccactggaagcagcttcctgggcaggaacacagggcaggggagctccgcctggaaactgctcagctgaaaaggccaagtcaaagtcacagccaagcaagccccttctggtatgtgtgtctaggaagcgagtgtgagtattccctcaggataccaaagtcggaccatagcttactctctcacagtaatggtaatctctggtttattttttatattactctggacactcacttacacaaaaccagataagctgtagatttgcttggtcactgtggcaggtggcttcactgaggagtctgttaagcgtgctatttccctacctttacagttgccccaagtgcaagggtatttaaaatggcccagtttttaaagttcttgatacgctaaccccattgtaaaacatcaacaacttcttaggtaaagaatctaagctcacagagctgtcatcttagctgagacaggtttaaaaaacaagactgagtagacaataggagccagagccctgaactgggactgaagtaagcagaattctgtttctgatagtatcatgtgtgttttatgcttggcctctgaaagcagactggctgggttcacagtcctgtctctgccactcggtggctgtgttacttctcccagcctcagcatctttatctataaaatgaggataataatagcactagcctcatgagatggttatgaggcttaaatgagataatgcttataatgtgcttgacctcaggaccaagcaagcactgaggtgcctctgctgtcattatctacacaaagcatgtaaccagggctgactcagcaaggtggaaaaagccagctcccagacacctttcctaaagtgagtaagggttgacttcttggtatatcacaaatgcttcccactcctcagagatgtgccccatccttaccaggcacagtgactaaagagagcaaggtgacaccaggactggactgacaaactcttcgagactaaagcagcccctgtgggtacattaattagatctggtgtcaactcgagtgaggctctgcccattccctcccaccacgattcagtggcatctctcaggtttggacacttttggaggcccaggcagaactgctcagaagccccatgtggtgttactcaaagtgggatccttggatcatgcccagggctgcttgttaaaaggattcctgggctctaacccctctaatctaaagtgtgccgtggctcaccagtcagtttaacaagctctttcaggtggtcctcaagtcactcaggtttgactcccaacagtaatataacccggggaaccaaaaggacgctgttggggaagttaggcacagctgagctgaattagcgaagtggttctgaggtcaggatgaaggtgggggaggcgggcttgttaaatagttcaacccttagagctgccttgatgagtctacgtgctcccagcatgcctccaatgctctagggggctggctgagctacccagtttttaaacttgagaaggaagaaagctgagggctgcctacactagcccctttagaagccccaagcaggggtaatgacatggggcagcactcatttctgtagcatgcctaggctggcctctggtccccaggcaggttttataatccagccagagcaagggtctctctcaggcctggtcaccaggatgcattctcaaaagcctctgggaacatgaaactagagcattcctttcttcaaaactgtttctctagcctgaagaggaaacccaggtaggaaaaaagagtttgtcaatgtctacactgctagatagcgaatagagaatttccttcagtgtctagggtttactagggcagcggctaactcatacatccccaaagttcccttgggaagggaataaaaaatagtttctagttaacttcctcagggagaaaaccaatttggctaagccaggcttaactataggtaggactgggtgactgcaccaggcaggcctgtgcatgggttttggaggctctcctggcaaacccttatcaccctgctggtaagtgttgtccttgcttggtgtttcattggggtcggtgttgggaaggagcccagggagcttcagaatgactgccagagcgggtagggctaggggctctgagcccgcctgtctggactgccatgccagctacaacccttacctttggggtgacattgctctggcttcctgtgccattatgtgaggacaataatagcaccaagtgccattgtgaggcttaaaggagtgtgagaagcccatgaattgttcctggcatttaatactcaataaatactgtcaaatcttagatgtgtctgccatcagatgtcctgggtagtgcagccattttttagttttgttaaaatgtggaatgaagctgggcgcagaggctcacacctgtaatatcagcactttgggaagccaaggtgggcggatcacttgaggtcaggagtttgagaccagcctggtcaatgtggtgaaaccccgtctctactaaaaatacaaaaaaattagccgagcatagtgttgcatgcctgtggtcccagctactcgggagactgaggcaggagaatcgcttgaacccaggaggcagaggttgcagtgagccaagatcacgccactgcactccagcctgggtgacacagcaagactccttctcagaaaaaaaaaaatgtggagtgaataaactctccttttcgctgatgtaataagagtttagtatattaaaatccttgaaaggggaggtaaatgtatgttgaatgctaaaaggcagtaaaaatttgcatgttttctgaaagaacttgagcaagaccacaaatctgttaccttttggagaaaaaaaaggagttgaggaatgaaatatacccttgcaggctggctcagagccattaaccattaacatactggcgactttgccctgttcttcattccagtttcagtttgcatttctgcagtgccgggtggcaggcactgtgccaggtgcagatactgcaagtgcatctggtgtctgccccgtgtttcttgcccagggctggttatgacagtggtcagccatcgtttttcagccttccccttcagggaccccttgagcagaatctgcctggtgggtgaggtggagcagatgagcctcatgactgggccgaggggcccgcatgctctagctcactctggatcccatgtgcacgctcgcacacacaacacacccagcaggatgggcgtgtctagaagaatgccgagcaggtggccttggacaattcacaaccagccgagcaggtcccctcctgcgccctgtgctagatgccagctgccccagcaggcctgttgtgactgccaggccccatttaggattgttttcctttgctgtcctttgcagggtggggctcttgtatacccacagcctgctctgggcaaaattatgtagcacggtctctgctattaattttttccagtaaattaaaggctagagaagaagaagaagaaaaatcaaggatccaatattaagaaatctgagcccaaaccttctactccagtgctgaacatggtgaaggattaagcctcctatcaagaaaaacaagcctgacagcctgtagactgatagagggaggtgtgccttctctccagaaagcctacttctgcaggaacccaggagtatggaatgagccatgcaaagtctgattcaaaaaataacccaatgggcatgcacccccagtcactcatccggaatccggctggcagcctggcagcccggcagcccatggctcccatgcacagtgcttgagagcttcattgtttcctgtctgctggtgccatcaacagctctggggtggcaggggcagatcttgggctaaaggacagtggccaacagctttgggccaaaaggccacaacaagaccagccagctaagaggaggaatgtcatgtccacagcgaatacctactgcagcaaggctgtaggagactttggagaggaaggaccctgtttccaacaacttgaccatgtttcccatccagggacctctgtgcagagagtggtggtgagcaagtatttccaactgggagcccccacagagtcagtggctggtctgtgcacttgttactggactcctagcactgtgcttggcttgtggtgggtactctacaaatgctgcatgcatatgtgcgtgtgccagtggactccagccttgtgatgtaccttcatctctgtgcccttgatagggcggttccagggttgcctctgcgtgagttcaaccctcgggtatttgagcagcacgtagcctcagcccagcattgtgctggctactggggcaatctaggcagcttataaaggctgggccttgccttgaagaagcttagagatgaggttaggcatttagcacaaatgcacgtctgggctctgaatgccagaggagttcaggagatgggccctcagtgagagcggtttggcactatgggaggggcagggccaccaggtcatcgcttctcaagctcttgatgggctctccttctgtcctgcccacaagagcccagccttgggctccccatctagctgtccagacaggctgggggtggggggctgttggtgaagggagggtgggccagagccatctgctctgcacaggttgggtcacgattctattccaccactttcactggtcccttggtatccaggcacatggcagccactgctccagagagtgaggagaggggctggggggatggagcctcgcaaggagcatggacacctagcacttacgtcatcaccatcggcatctgccttacctggctacctctctgttcagcacacctgggagcagcacccttgcagcccttctcccttgacagagctgtgacattgaaccctgccctggtctggtagctgagggcccagcctccccttgcctcctttgtcccatcagcccaggccatcatgggtacagaaggtagcaatgaagtctcacactcggggtaaccaacatgcaatacttatggaaagactgtgtgatcaagggttgagagaatagtatactgaacccaaatgtacccattacatagtgtgaacaattatcaacatgcagtactcgttgaaagaaaagggatgataaaaatgcactattattgaaagtaagaaagtgtggggtctgttaaacagacaaaggagcccactgagaaagctcccaaaggccaaaactgcaacaatttgagcaacaaaataaataatgtagcattggaacataatatgaagtataaaataaacgagtccatagtgaaagaaatggttgaataaattgagaataaacatctcccatgtagaattccgggtagtttatgcaggtgctctgccttcaaacatatggagcataactccccacttctgtttgttgttttgagacagagtctcacgctgtcgcccaggttggagtgcagtggcacaatctcagctcactgcaacctctgcctcccaggttcaagcgattctcctgcctcagcttctcgagtagctgagattacaggtgtatgccaccacaccaggctaatttttgtgtttttagttgctatggggtttcatcatgttggccaggctggtctcgaactcctgacctcaagtgatccacctgcctcagcctgccaaagtgctgggattacaggcgtgagccacctccccacttcttaagcgtggactgcatatagtagctaccttctaaaggacacattcaagaaagggacaaaaagtaaccttatggaggaacctgacaaactacctcagccaggcgatgaagggtaacatcagcataaacatgatgaagcaggttgatagtatgtatccttgatgtgtgatgagaatggtactttacctctgtggccttcctccaaaaaactgttacgcatggtctgggcacggtggctcatgcctgtaatcatagcactttgggaggccaagggaggatgattgcttaagtctagcagttcaagaccagcctgggcaacatagcaagagcctgcctctaccaaaaaaaaaaaaaaaaaaatgtaattagctgcacatggtggtgtgtgcctgtggtcccacctactcaggaagctgaccaggaggattgcttgagcccaggaggttgaggctgcagtgagccatgatccactgtactctagcctgggcgacagagcaagacactgtctcttggaaaaaaaaaaaaaaacataaacccatctagtcataaggataacatcaaacaaatcccacctgagggatgttctacaaaatacctggccatacttttcaaaactgtcaaagtcatcaaaaacaaggaaagaatgagaaaccgtcaaaaccaagaggagtctaaggagacatgagacatgacagctcagtgtaatgtagtgtcctgggtgggatcttgggacagaaaaaggccattaggtaaaaactaggggaattcaaataaggtatggactttctttagtaatgtatcaaaattggttcattcattatggcaaatgccacctattagtggaagatgttaatagggaaaactgactaatgggtctgtgggaactctgtgtactatctttgcaatttttctgtcaatctcaaactattccaaaatgtttattttttaaaatgctttttttttttttttaagacagggtcttgctgtgtcatccaggctggagtacagtggcataatcatggcttactgcagcctttacttctcaggctcaagtgaccccccatcttagcctcccaagtagctgtgagcacaggtgtgtgccaccgcatccgactaatttttttttttttttttaatttttgtagagacagagtgtggctatgtcgctcaggctggtctcaaactcctgagttcaagtgatcttccagccttggcctcccaaagtgttgggattacagtcatgagccatcacacccgaactaaaaaatacattgtttttttttttttttttgagatggaatttcactcttgttgccaaggctggagtgcaagggtgcaatctcagctcaccacaacctctgcctcctgggttcaagcgattctcctacctaagcctctaagcctcccgagtagctaggattacaggtatgcaccaccatgcgcggctaattttgtatttttagtagagacggggtttctccatgttggtcaggctggtcatgaactcccaaccttaggtgatctgcctgtcttggcctcccaaagtgttgggattacaggcgtgagccaccacacccggccatgcatttttcttattgttattttgtaagcgctgtatttcctcagggggagcagagggcaagggaaagtttccattaagctgggctaatgatgagcgccctgtccctgccctgcctggttttgttcttggatgtgccagagaagcgggagggaggaacgtgaggccacctggccccagttccccagctggtggaaaacagaggcaaggagggttactgcaggaaagtgtgaggatgtgcaggaacctgttagatgtgcctgggccaggttggagaaagctggctgctgtcaggtcagctcctgggaagacggactcatcacggcctcactgagccacacggcatcacactgcactggtgtggccacacacttggtggcaagtggagacctcattagaagggtgaggggcctgccctatttgctgtcaccatccctgacctagtgacagatggcagctggtattcagggcctcagccatccagcctagaggtaaaccaagcatgtttcaccagtgccccctattccccgagacctctcaccttccttcagaggcctgcggtggtggaagggcatgggctttggaggcagcagatacgggctcgggctcaggcaccaccacttgacagctgggaaaccttgggtgatttacgtaagctctccaacctgtttctccagttgtaaaaggcaggtaatacgcctgcttcacccaccttacaaggtgagtcaaggatcaaatgagaggcggtagaacaggagggactgtcttaggggttattgtttgggcagatgaggcaagagtggtcagcactttttaagcagcaggtaaagccttggtcttggggctaattggtggtagagttttgtatatagtcacgccacatcatgttttggttaacaacagaatgcatgtacgacagtggtcccgtgagatcataatactgtatttttactgtaccttttccatgtttagattcacaaatacttaccactgtgttccagttgcctacagtatccagtacggtgacaagctgcacaggtttgtagcctaggagcaacaggctaccccatctagcctaggtgtgcggtagggtaggccatctaggtctgtgtaagtgcactccatgatgttcacacaacgacgagatcacctgactgcttttctcagggtgtatcctcgtcattaagtgacatgactgtattaggttgctttcagttgcaggtaatagtaagtccaactcacattgtctcatataactgaaaatccagaggccacgtgggcctcgggagccatgtgatcagggccatgtttctcagtctcagagcatatgtgtgtgctggcttctcacgctggtttccttctaggtagaaaaatggttataggaggcccaggccacacattctaccatcccctaataggaaagagctgcttttccccgtcatacagtgtccacgacgtctctctctttagactattttaggtcacatgcttgtgctctgaattgatcactggggcaaggacaaatcatgctgactgacttaagcctgagttactcccaacctgaacaaattactggggcaaagagagataaatgaaaattattggcttagccagtcagggcctgggcctggaggtaggagggcatcaagccctggcaaaccttttggctgccacaggtggggaggagtggcatggatgccaacagtgtccctacaggcttctatcccagtaatcactgtttgagagcaatggccatttgcctctctagcatccatttacccctttggcaacaatcctaatttgcatttggagctttgttccttccccgttcccaaaaactacgtgcttctaatgaagcctcatttccctctcaagggagaggcatgtgaccaagactttggccaattggtgcactgtattctccaagccattggactgcttcttggaaaggcacttggtttgattaaagccagtgaaacacaatgatactcgctggaaggaaggctggggtggaaccaagtgtgcctgtctgctgaacctgaccccaacaggatgtagggtctggagctattggtgctgccattttacaaccccatggagagcctgagattgaggctaatgtagaaagatggagggagggtgaggaacctaataggaccagcctaattcctggactctgcagtttgagtcaacagattgcctcttttgcttcaaaagccagtttgggtcaagttttctaccagttgcaatggtgtcttaaatcatattatactttccttcctattcaaaggcagtaaatgccaccaagcagtgcatgtgggcaactagaatgcttggtccaatccttactatttgtcacttgacactaatattacatgaaaagcatcccagtcatgaaaggtatggaagaatgctcaataataccaagaagggagagcagtgtggaactattgtttactggtattattatctcaggggtgtttcccctgattatccatgaggttctctttatgctccgctccctgtagggtctggcaggcttcccaacttatctggtgttcaaggtgggcctaagggtgaaactggagcccacctggatacagagatctgtattagttttgtgtttattgatgggagaaagtatttggggtcatccaccttgaatgctacataaatgtcttctactcaaggagtcacataataaatctctccaaaggtgcggtggctcacacccgtaatctcagcactttgggaggctgaggcaggaagattgcttgagcccaggagctcgagaccagcttgggcaacgtggtgaaaccccatttctataaaaaatacaaaaattagctagctgtggtggtgtgcacctgtggtcctagctacttgggaggctaaggcaggaagatcttctgagcccaggaggtcgaggctgcagtgagccatgattgtgccactgcactccagcctgggtgcatttgagcaagatcctatctcaaatgagtgaatagacaaatctctaggactcaccttgagggctgtcaggaaaccctctggaaaaggatgtctcatggatatgccagtgtaaactctcctgaaataaccctttctcttctctacccagactaactttacctaccctttggggcccaactcagatccctccttcttggtaaaaagccagttcagactgaagcaatcccttctattaaccacattaattattactgcaattaatctcacaataccttgaggctccgagtgctgagaggattttgccttttgttatagtgatggaaaggatgcatttcaatatgttgccttgcagtgcaaacctttgttaacagggcaaaaatagcacagggggcaggaattacattcctggatgtgcatttggcttatttacatggatttgggtgccctctaaggacaccatcttctctcccctccaagagggtcaggccacaggacatccatgttcttggcctcccatgggagagggtctctcgccagaggaagggaaagccaagtggccacagagttccagcctgtccctgtgacagcccctgcctctggccagacatccacccacccttgctaagtcagcctgctctggggctactaggcccagtccttgctgtctgtcggagacagaccatgaagtgcagtgtgtggagggctgggacatagcataccgaattaccccagggagcttggaaaacatctcttcccactctctgttaggcccacggcttcctctactggaggagacggcatgtgaggatggaactcggtcattcctctgtcaccaccgatgtgaacagtctggaatcctgcacacaggagactgacgatccctgagcaacctttagtagctcctaccattgggcattttcttggtacagatcacaaataagagacatcatagaaaatgttattcttttattatttcaaggaggtaatacatagcccaatatggcaaagcaaaagggaattagaggcagcaaatggccaggtttttctaagcgcctcatgctgcatctctgagctcctgtctgcccgcagcccacagctgcttacatgaaggccaggtcagtagacagatggcccaacttgatactccactgactgagaaagggctcaatgtgcagcacagcagaggcactgccaggacccagcacgctgggcggcaccccacgctgccaccaccagctacagaggctagtgccttagtagcagccagtgtgtctagcacttgattttattcctgtgagcctagagtgggcaggacgtgaataaatcctgagtcataagttaaggtgaaagacttagtagtgttaatactcttggtgagaaaagacaacacagtcttggaggagagtgggcttggagtctggtggaagaaagatagaaacccccagaagggcctcggcctgcaggcactgccttgaggccatcagagggggttttcacggtacatgatagggaggagtgaggcaggtgggcactggagggctgtttcctctggcacagttgaactagagggtcactttccactcataattggtttcctaggtctaagtcaccacacctggggctgaagcaagtcttgcctgtgcaccaagcgtggccttggaccctggagagatgcaaggctcagttctccagtgttgaagtggaaggactcccaactgaaggagatctttctctccccacctccagctcttttcccttacaaatgaccagggtgcaagtcgagaggcagaggcacctcctggtgcaactccaccacagtcttacagagaactcatcttggtgggacccaaagcccagccttggcatgaagcagacttattccacccatcggagggcacccagtctggtgactgaatggtggcgtgcaagtgggagtcagcagtggctctggatgccgtaatactcagatgccattcatctctgtgtgatcgtcctggctggagagctggtgaggagggactgcttcctcctggcatgcactgttcaccaaccacaccacgtgggctgatagatttttggtttgacaggtgtggaaagaatttttaaaaccagccactgtgttctccaaacccagagccattggttttgtttgacaagaaagtaccaagagaaccacagctccactgaggctaaggcttgtgtagcacagaatgcagtatgtattgaaacgtataaaccttgtctgactggggagatgggtgagcaaagagctgccgggacccaggtcctctagtcggttgcaggctctgccgatgtctcatccttaagctcctcaaaacctgggactggcttctgtagaaagtatgtagtggcctggatcaccttgtctggtccaatgttgtacactgggtgagtgggctgctgcaaagagaagaaaaggtgccagttaatcaccccggtggtccttgaaaacataacacatcctttgctccatgaaaggcacttctaagaatttagtataaggaatcagagatacacacaaagcccaaaggttcaaaaatggtgtatttgctaaaactatctagtacatgggacacaggttaatatacagccattataaacacgcatttaaatatttaacgatacaggcaaatacttacaacatattatgtgagaaaacagtatgtacaatactatctcaaactgtttttttttttttttttttttttttgagagagtcttgctctgttgcccaggctggagtgcattgacacgatcttagctcactgcaacctctgcctcctgtgttcaagcaattctcctgcctcagcctcctgagtagctgggattacaggtgtgagccaccacgcctgggtaatttttgtattttttttttttttttttgagacggagtctctcgctctgtcgcccaggctggagtgcagtggcgggatctcggctcactgcaagctccgcctcccgggttcacgccattctcctgcctcagcctcccaagtagctgggactacaggcgcccgccactacgcccggctaattttttgtatttttagtagagacggggtttcaccgttttagccgggatggtctcgatctcctgacctcgtgatccgcccgcctcggcctcccaaagtgctgggattatttttgtatttttagtagagacagggtttcaccatgttggtccggctggtctcgaactcctgacctcaggtgatccacccgcctcggcctcccaaagtgctggggttacaggtgtgagccaccacacctggtctcaaactttttaaaaagtgtatttgtacctgtgatgtatataaatagcaaaaattgtacccataccaaaatattaatagtgatatgattgtttttcattttcttttttatattttatgtatcccaattattaaaacaataaacatgtatttacatttataatcaagaaaaagggggccggacgcggtggctcatgcctgtaatcccagcattttgggaggccgaggtggatggatcacccgaggtcaggagttcaagaccagcctggccaagatggtgaaaccccgtctctacaaaaatacaaaaattagccgagcatgatggtgagtgtctgtaatcccagctagttgggaggctgaagcaggagaattgcttgaacccgggaggcggaggttgcagtgagccaagattgtgccactgcactctaacctgggcaacagcgagactctgtctcaaaaaaaaaaaaaaaagaaaaaaggaccacaaccctaatatgtagtaaggctgtcagatcatatttaaatatataaacaaaatttaaatatgaaatttaaattaaatagatgttattctagtacatcacagaaacccaaaagaaactttagatttgacacggcataatcctaggccaatattcaggattctcccactgtgggataatgaagaaggggacacaactgcaggagagattttaaaaattttgagagaatactaggagcaacctcatgctgaaacatacaaaaattcagataaaacaataatttttaaaaaccaggaaaactgccaaaattgacttaaggaatttttaaaggcctacatgaagaaattagtaacaacaattgcttattctgccacccccacataccttaaaagatactagacctagatggtttctcaggcaagtagtatcaaacctacaaagaaacagataatctctgatctatacaaaccttttaaggactgaaaaaaaaaaaggggctagtgcgggggccaggtacaatggctcacacctataatcccagcactttgggtggctgaggtaggatagcttgaggccaagagttcaagaccagactaggcaacatagcaaaaccctgtctctacaaaaaatttaaaaattagcaggttctggtggtgtgcacctgtagtccctgctacttgggaggctaaggcaggaggatagcttgagcccaggagttccaggctgcagtgagctatgatcacagcactgtactccagcatgagtgacagagtgagatcatgtctctgaaaaagaaaagaaaaagaaaaaaggtaagaggtgcaggaagctacccatttaattttatgaggctatgatattatcctgaaacactggaaaaggacaatacaataaaattttagatcaatctttcttatgaatgtacatgcaaaaaaatcctaaataaaagtactaggcaaacatactggcaaactgaatccagcagtatactgaacaaaacacacagacacagacacactgcctctactatgaccaagaagggcttatcctgggaatataaggcttaacatcagaatattaatgaaacatatcatattaaagaagaaaaatcagatgcggagaaagcattcaataaaatttaacactaccttatgactgaaactaacaaaaacaacctagcaaatcaggaataaaagtgaatatcactaacttgatataatgtaactatcacaaccttacagtaaacatcatgcttaatgatcaggttataaaaagccttcccattataatcaggagcaagagacgaatgccctctactacctttagtcagcactatgtggggatcttacccaacaatacaaggcaagaaaaataaaatggaaactaacttagacaaacttaaaactattaaagagttcaacaaggtggctggacacaagatttataaatattattagcatttctatacactagtaacaaacagttacaaaactgaaaataagaaaagattccagtcacaagagacatgaaaactgtaaattagacataactctaaccgaaaaaaaaaaaatgctagtcctttatggaaaaaattataaaaaaaacactgaaagacattaaagaaaagaaaaattatgttcataaatggaagcctaaatattgaaaagaagtcagttctctttgtactcctgggaagacaggaagaaaaaaaaaaaagttggttctctcctattaatctaaaatgtagtgcaattccaataaaaatcccattagaacttgacaggctgatcctacaattcacaggaaaaagcaaaaggcaaagaatagccaaggcaattttgaagaaaaacaacaaggcagacaggacttgcctacctgttttcagacttgcttaaaagagtgcagataggcaaacagaccaaaggaacaaaataagagagtccagaaacagggccccttcatgtatggaaacttgagggtgtggtacacatgagatacacatcagcaggaaaggttgtagacttcagtaaatggtgctggtcaattggttatccatatggaaaaaagataacattatatccaagcctcaccatacacagaaaccaaatccaagagaattaaaaatctagattaaaaaagcaagctttagactatttagaagaagttacacttaatgacttgctgcattgccttgttcattcccttcatagcacgcatcacaatttgtgatgtatttgtttaatgtgtgcctccttttgtctgcttccctcaaaaaatggtagagattccttaagttaatcctcacctaccctcccccaaaaacaaacccctgaatgacagaaaagacaaatagatttgaccacttcaaaattaaaatattaaaatatttttgtggggaaggggtgctgggggcagggtctcactctatctcccagactggagcaaacagagctcactgcagccttgactacctgggctcaagcgattctcccacctcagcctcccaaagtgctaggtttacaggtgcgaaccaccatatctggcctaaaatcttctatttaacaaaaaaacaccaaaaacaaaatgctatggtttggatgtggtttatttgtccccacaaaaattaatgttgaaatctgatccccaagatggctatgttgagaggtggggtttgtggaatgtgtttgggtttgaggggtggatccctcaggagtgccttggtgctgttcttgcagtagtgcgtgagctctcactcttgctctggggagtctggattagtccttgagggaatggattagttcctgcaagggtaggctgttataaagccaggatgctctcaggctctcctctgtttgcatgggttggcttcccctttgatttccacatgttataatgcagcacaacccttgccagaagccagagccatgcccttgaatttctcagtctatagaaccatgagctaaataaacctcttgtctttatacattacctagtctcaggtattctcttatagcaatgcaaatcagagtcacaaaatgaaaagacaagtcacaagctggaagatattcactacacacatgtaactgatagaagattagtattaaaaatatacagagaactacaaatacttaagggaaaacaactgaagttacccatcagtaagaaaatgagcacagaatatgaactggcagacaattcgcagaagacaacacaaatggccaacaaacatttgaaaatattctcaacctcaccagtaatcaggaaaacacaaaatcaaacaaataccacttcacacccatcaaattggcaaaaaggaaaaggtctgactatggatcgattcatcttacacaaccacactggggagcagttacagaggtatctatcaaagatgacaatatgtgtccccttcaacccagcaggtcccctcctggagacattctaacatgtgaacccaatgagacagataccacaacgttcactgcaacactgtaatagcaaaaaattgataactagcaggagaacagagaaacacactggggtacatttatataagggagtatcatataatagttaaaatgaataaactggagcaacacatgtgaacacagataaacctcaaaaatacaatggcaagtggaaaaagcaatgcagaatgactggtacagtaggtaccattacaaaaagtttgaaaacatgcaagcaactgttatattgcttataaaaaactatatattgcttatagatacatatgtatgtagcaatagcacaaaaacatccacaggcatgatacatgtcaaatttgggacagggttacctctggagaaggagggaggaaaaaaaactggaagagggctacataagaggcaaatagggggaaataattagggcctggaaaagctgggtggtggtttttctgattaagaatgaggttgagcatcttttcaactatctattggccatttgtgtttcttccatttgaaatgtttcccaattaaaagaaacaaagatggggccaggcgtggtggctcacacatgtaatcctggcaccttgggaggctgaggcaggcatatcacttgaggccaggagtttgagaccagcctggccaacatggggaaaccctgtctctactaaaaatacaaaaattagctgggtgtggtggtgcatgcctgtaatcccagctactcaggaggctgaggcacgagaattgcttgaacctgggaggtggaggttgcagtgagccaatatcatgccactgtactccagcctgggtgacagagtgagactttgtctcacaaaaaaaaattaaaaattaaaaaaaaaatttttttaaacaaaaaaggaaggttacaatgacacagatgagaaaataaggcagtgacctagatggtagcagcaggccatgtttacactggtggaagtagggcttagtaagagtagggaactgcacacaaaaattcatgacagtctgcatgggccctgtgatttgatcactggggacagtctccattggattcatgtccaggctcacgtctaggctcagagcacctccaggttgtcctcagctggctgcagcagtgagcatcctgccctcatagggctattgttttttcaggaaagcagacaaacacacattaaacaacacaccaccaactgagtaaagtactacaaagaatatgaacaaggcactgaggcagagcattctggggatctcattctctgaagagatggcatctaagctgagcctctgggagagacgcggcaggctgtacagccagtgccgcatggctgcagtgctatcacgagcctgctgggactcacagcctcagagtgacacgtaactgtggcctcctctaggggaagctaataccagcagtgggctaggtcctcagccctgggataaaggcacaacagctctttgacagatcagaccgcccatctggaaccctgagcttgcccagaggtgcgtctcctctgtggtcacatcctcactaacggctgcacagctcgaagggcagagggaccacaagcttccgcctgtccacacaggaaatgcagagccagttctgcttacttggaaagccttctgtccgcgaggtccctgtggagaaggggtgtgaagccctgcacccgtcttaccagagcgttttcgggcacacccaggaccacatcatgcaacatggctccgctgccgaagtgctgggctatggacaggccgctcaggcagtagcaggtgtggtagaaatcacgcgacctgtaaggacaggcagctctgagcaggcgctcctctgctccgcacacatctacaaatgtagccacaccaattcagagaccactggtgcaatcacacgtccccccccatcctccatgtggctagaggaggcatggttttcccagcagtgttatttaaagccccactggctgagcacagtggctcacacccataatcccagcaagcaggaggctgaggcaagagaacggtttgaggccaggagttcaaaaccaacttgggcaacatgggagaccccgtctctacaaaaaattaaaaattagctaggtgtggtggccgatgcctgtaattccagttacttgggaggctgaagcaggaggatcactcgagcccaagaggtgaaggctgcagtgagtcatgattgtgacactgcactccagcctgggtgacagagtgagaccctgtctcaaaaaagtaaaatacaataaaataaaagccccatcctccagccctgcccagcagtgggaactgtattttttttcttttctttctttttttaccttaaactattaaaggaaactgtaattttaaagtcagtctctccagctgtcttctggaaagggctctccaggggcagtactaatgataaattgatacacttctctagaaaaatacctaaatatctagaaatgggccacatccttcctgatacattgtgggaccaggccttcccctggatgccaagagcagcaggacgtgtgctgggatgggggaagacagagggtgggtaacaaaggtgagaggacttattttatttccctttttctaacacataagccatctcagatttgagcttaatcatttaatccactctataatagttgtcatgattacagtctctgtttacaacactgaggggttttaaaatcctgtatcctattctatttagatcagtttttttttgttttttttaaaaaaaagaagagttatctacccagcaatctgtttccctgtctgggggagggggttgcatgcaggctgggggacaagacgggcagctggaggtgccaagatcaatggcctcaaggggtgctcccaactgggtgctttttcccatacaacctagcgctatgcaggtgctgaaggtgacacctctgctcttgagatctggctctgagtaggcctgaggtgcacgcccctctgctctctcctcccctctcccttccctccccagagagaaaacactcacttgccaggtttatccagaagcccccccgcagggcactggcagcacatcaggatgtactcctgcagggcctgctgatggaacatccagtggctcatgctaagggcagggtcacctgttgaagggcaaagggtcagtaagggcccggcagatccagccaagtatcaatgacctaattccactttctcacctgggggaatagtcaaggtttcctgctccccttcctcttccattcattcttggtacaactgctatcttccccatgtcctacgcacagcatgtcccttctcctgaactttgacatgtgtcaaagagcagcaattcaaagtggcactttcactttcttgaaatgcaccctgttaacgtggatggtgatcctcaaccacatctctggcaggcagtgaaccagcctagctgtttagcttaccttcccagactgacctcggtagctgctcccaacttggtccataactctaccctggacttcaagagacattccctctagcatatctctataacttgttaaccagactgattagctcagagaactcttaatgggtaataaagtctgtttcttctacttttctaagcctaaatttaattgatctccaaagggaattctctaacttgtctctcagctcaaagaatttacctaagaaacattactagtaactgccctcctgcatcatatgataccctagcaaaaactgggtattctggtaatactactaaggtactgacaagcaactggacttcttcactctgaagtccaatcactatggtcaaagaattctgtgggccacacagttatcaagtgggaaggagggacaaatcacggacaggtgtgcagaaacatctgcatagaaatcgattaaaaatatatatacatataggatgtacactaagtccttggtcaattttatattttgatacctgggctaaaagatgcctgacaataaatcatttttaaaaaaaagatgcccaacaattggtaaatggcacctgaaagctaattgttctttcttccagtctttttggttctatgcgtttttctacctagttattataactgtgtagcttatgtttttcacttataccactataggcataaattttctattctattacataatctgcatagccatcactgtgaatagccatatagtatttcattaagtggacatataaggtaactgtatcataaaaagaactgagctaaaaatcttatatatatgtcagtatataaattcctatggtgggccaggcacgatggcttatgcctgtaatcccagcactttgggaggctgaggggggttgatcacgaggtcaggagatcgagaccatcccggctaacacggtgaaaccctgtctctactaaaaatacaaaaaaattagccggacatggtggtgggcgcctgtagtcccagctactcaggaggctgaggcaggagaatggcgtgaacccaggaggcggagtttgcagtgagctgagatcacaccactgcactccagcctgggcgacacagcgagactccatctcaaaaaaaaaaaaaaattcctatggtgaaaattataaaagtttatggtatcaataacctttcccattttggagaaaatagcaaaaaagaaaaacgggggaaaagatttctaaaaataaaaatgaaaagtttatgatacagtctataaagagattgaagcaaaatattaaactgttgaatatttcctttttttttttcttttttgagacagagtctcactctgttgcccaggttggagggcaatggcacgatctcggctcactgcaacctccgcctcccgggttcaagcgattgtcctgcctcagcctcccgagtagctgggattacaggcatgcaccaccatgcctggctaattcttgtatttttagtagagacatggtttcactatgttggtcaggctgctctctaactcctgacctcaggtgacccaccctcttttggcctcccaaagtactgggattacaggcatgggccaccgcacccagcctaaattgttgaatatttcaaacagacaataagaatttattaaatttctttaaaaagagacacagaggaaaagggtttccaaggttgagcactaggtgagggacagtggccaggtgacatttagaggccagggacaaaagcttctcgtcttcaaccctgagtcgcactcagccctgaaacacccattaagagacacaggaaactaagtccgacctaaggagaagcatccaatctcccatctcaggctggctgcaggccacatgctttgatacacttgcactattttaattcccttcctttcttttcctcacctgtaagcacagtgaactttgttgtagaagatacatacatatatgatgggacttcactctatcttcttttacttatttccaaggttgtttccagttccttgccattatgaggaatgctggactaaatctttgtcaatattatgtatgcttaagattattttcttcaaatagactgaccacggtggaattattcggttaaagggaataaacattgttaaggcttttaatagatactgataaactgctttaagaatttatagactactctcagcacaatccctgtggagtagccctgctctgcaggagctgtcaaaaataaatatataaataaactaaaaataaaaacaaagactttatatagctaccagcaaaatttaaaattttgctataccacctccagcattagcacctttttgttgttgttgttgagatgctatcttgctctgtcgcccaggctggagtgcagtggtgtgatctcagctcactgcaacctctgcctcccaggttcaagtcattctcctgtctcagcctcctgagtaccttggattacaggtacaagcccccacgcctggctaatttttgcatttttagtagagacagggtttcactatgttgatcaagccagtctcgaactcctaaaatgatctgcccaactcggcttcccaaagtgctaggattacaggcgtgagccaccacgcccggccagctttagttactttttaaaagttatcagcaattaaaatggtaaaaagaaatagtacctgatagtttattttgatttgcatgcctctgattactaattagggtgaaatttttccataacttgtgtttaatatttgcatttccttatgatggtgtctgtttggcctaatcttctgagatccaatagccaattttattaatctagctttttcttatacttgccccttgtctacatcatatgctgcatctattttctcctttttgctcctctgttttggttatgtgagtttaaaactttttaaaatttttaaaatttaattaatgtaaaacatatatatgttttatacttaatattgtaatcatactattgatttttccttcacgatttcctttttaagaaaatatttaatgtgtatggggatttttggggggatgagtgatgaaaatgttctaaaattgtcatgatggttcgcaactgaataggtaagttgtgtggtatgggaattatatctcaacaaagctattatttaaaaaagcatatttattaaactttaggaaactgcattacacatctgtacaaaatgtacatatatttcatatcctataacaaataaaagactattattataaggtaaatgataacctgtggctaaaattagagtctgaaaagaaaacgctatgtttattatataaaaaactatagactgtttcagtgacttcctatattattaaagcatagaagctcaaagttcaaaagctctacaaggagcttccagatatcctgaatttggacaccagcacacataatcacaacaagatgaaagcagatacgattatagggtgataactgcacactggaatccaccttttaaatcctttctacctcttcctgaaattataggtcgccattctaatctcattttgcatttcaaaggttccttttatctaaaaaaatcaaaagtctttccacaccataactgataggtgcagccatctgtagctcaatttcacaggtaggcaagaaaattccagggtatgtccaaaagaacatataagaaaccagtaactaccaagccaagtggaaactcacaggcctgctgctttcttattgctccacaaaacaaaaaaacaaagtaactcactgatttagtcagcacttgagatttcttaagccttttttttttttttttagacggagtcctgccctgttacccaggctggagtgcaacggcgcgatctcagctcactgcaacctccgcctccggggttcaagggattctcctgcctcagcctcctgagtagctgggattacaggcaacgtggcaccatgcctggctaattttttgtatctttagtagagatggggtttcaccatgttggccaggctggtcttgaactcctgagctcatgatccacccacctcggcctcccaaaatgctgggattacaggcttttgtgtttttttgagacaaagtcttgctctgtcgctcaggctggagttgcagtggcactctctgcctgcaacctctgcctcccagactcaagtgatccttctacctcagcctcctgagtagctaggactacaggcatgtgccaccatgtctggttaactgtttttaattttttgtagagacaagctctcactatattgcccaggctggtcttgaactcctgagctcaagaggtcctcctgctttggcctcccaaagtgctgggattatggtcatgaaccaccatgtccagcattttaaggtactaatagtaattccttcttctactcaaatactgtcatttacacatagaaggtagtcaatggcatggagccactgatggtcacttgctgggtcagggcatggcctagacccacgtgctgcactatgtagagcattctttttgctttttagttagcaatatgatcaatgccttttaaaaaatgtatttgtacatttaccaaaataaaattagtaatgcacatggtttttttttttttaaaggcacagtataatacagaaggatagaaaatctaaaaagttggccaggtatggtggctcacgcctgtaatctcagcactttgtgtggccaaggaaggtggatcacttgaggccaggagtttgagaccagccaggccaacatagtcatatcctgtctctactaaaaatagaaaacattggctgggtgtggtggtacacgcctgtaatcccagctacacaggaggctgaggcaagaaaatcaattgaaccgaggaggctacagtgagccgagattgcaccactgcactccagcctcagcaacagagtgagactctgtctcaaaaaaaaaaaaaaaaaaaaaaaaaaatctaaaaagtctccctccttctgtcttctgtctgcttctcttctcccaaaggtacccattgttcaaggggttttgtgtagggttccaggaaaagctgtgtacatctcgggctgtgtgcccaggcactgctccaggccccgcccccttacacttcatgttgtatcttgcagagctttctatatcagcccatggtatgcagctactgtttggagagatttttattatttaacccttaaccttttgataggcacttaggctgctattgaaactccacttcaatatacatcctttgctaatatccctgcaggtaaattcctgacagtgcacttgctgtgttcaaagggtaagtgcccttataatttaaatggatgtctccaaactgccctccaaaaaatgacttaacctatttacatccccactatcaaattacctgttttctcacactctccccaacatagggtatcaagttttttaatctctgccaatccaataataaaaacaaatagtgccactcttttgattagcatttcttttactacaagtgagctaaacaatttttcgttggattaatggccacctactgtggttatgagcagggcagggttcagatgccagctagtctggattcacacaaccacatactaacccttgtgagtgccaatcaggtattataaagcaatcacttaacctcactgtagtttgtttcctcatctgtaaacaatggtacctatttcatagggttgttttgagaattaaatgagaaaacatatgtgaaatgctcagtacagcccctggcatacagtgagggcttgggaagactccgctaccagtagtagtggcagttgtagtagaaaaagtaagaaggacagttctttcactgggacctctttcttcagatcctttgcctgtttttcagttgggttgtccatccatttcttactggtttgtatgattttttttcaaattaaagaaattagccattcatcacttgttataaatatttttcgcacctttttgcttgttttgtttgtagaatttccctgtttctgtaaaataacttttgttgtctttttttatgcaagaaatacctattaactatagaaagattagaaaatacaaacagaagcaaacatcacctgtaacttcacatcctagatactttctatgaattttttgtagtcaactcttcactaaaaatgggattccacacatattgctttgatatgatcacaatatattgtgactatctttctacactgcatccccttttgactcccaaagtcagtattttgccctcctttcaacacacttcccttctttacagactcctgtctgttccaagttcaagagatgccctgtgtctgagaagacaacacaggccttctcccagccaatgaaaaaagctggaagcaccaagattcataggcacccttttccatagacaaagctttgaatgccactaagccccctagaacatgtgctacaagaaacaattaaccagcagcccccctggaagactttgacaggtggtgctcctgttatagctcattccacatttccctgggattgcagaattactgagtcttatccatgccagggacaggtttgtaaaagactgaccattttaccaggggcttgacctcaccagttccaaataaagagatcaccatgaccccaagtttttttctatcttagaaatgttgggccaggcacggtggctcacgcctgtaatcccagcactttgggaggccaaggcggacagatcacctgaggtcaggagttcgagaccagcctgaccaacatggagaaaccctgtctctactaaaaatacaaaattggctgggcgtggtggtgcatgcctataatcccagctatttaggaggctaaggcaggagaattacttgaacccagggggcagaggttgcagtgatccattgcactccggcctgggcaacaagagtgaaactccgtctcaaaaaaaaataatactaaaataaaaaatgtttgacttggggaattcctgacttccctactggtggtcaaggcagagactgtgcaggctccaaagtcagtgcacttgctgacagtgcacttgctgtgttccaagggtaagtgccttatatgccttaatactgacacctaaagcccagtgggcccaggccgggaaaatgggacagaggctctgcttactttaattcagtgtcagaaatggtcacaactcaacaactcaaaggaaattaagaaactaaataatgaggctcagggccgggtgcggtggctcacgcctataatcccagcactttgggaggccgaagtgggcggatcacctgaggtaaggagttcaagaacagcctgtccaacatggtgaaaccctgtctctactaaaaatacaaaaattagccaggtgtggtggcacgcgcctgtagtcccagctactcaggaggctgaggcaggagaattgcttgaacctgggaggtggaggctgcagtgagccaagatcgtgccactgcactccagcctgggagacagagcacgactccatctcgggggcggcggggaggggggaagacggggggtggggggctcagaaacaggaaaaaaaagtatggggaggggcagaaaagaatctcatcttttacatttgagcagttacattatccaactaagtccgaagaacagcttctctttggacccagggatctcattccaaaaacagatcagcaaccagcagggccccatgacttcctctctcccacaggtctactcagagacacctgctctcacatcaagtacaccagaaagatggtgcaggagttagcaggcagactgaggtttcaagagatagagagagaatgttcccagactttttgctcactaactacttcggttttgcgttcccatttgagaccccacagaaacgaacgtggatttctctactccaatggtgcaggtggaacaaactcccatttaggcttattcaatgaatgtaaaataaaacatttctaatagtgacaactctgcagccagtcagacacggcgagtctcttctccatggtgtaggggcaacccacccctacaacccacccctacacatgggttctggttctctacccctttacgcagttgcctttcctgttgctgttgcaacagtgactgttgcaacactgagggttttcagctctgccctgcacccagaggaggtggcaatcaccacagagcccaggacaggagtgggctgctccttccagataacgcagaagcagcgcccacttcctccccgctccccgtagcaatttcaaggaagctcattctgtcgcagccaatttgaagaagcaaagaatgacactaaaccaatgaaactaaatcttactctgcattcgcatgccccacggcatgaggttccacactgggcactcaaaatccaggatagacagagctcatttcaacccctctaaaaaagcacgctgggcttccagactttgtgagtagtggagggaaatcatccagccccaagtgaacagctccccaggctcaccttgggcgtgcagtgcgcggtggagcaggggcaggagccccgcctgccagaaggagtagcagccatccaccagcttgttgcagcggccctgaaatcctccttcaaatcgcatctgccggcttgtcacccattgctgaggagacacagatgggaaaggcagttgtaggctaaaagagacaaaatccagcccgacagaatctccaggagtcaatctgtgggatggagggtttcccatcttgtggcttcttggcactctagttttggtgctctggttttctttccttccctccccacactgccatagacacagagtgaagcatttaagccaacgctgtagaggcatccagcactgatctctgctcaatgcctggcagacaactaccttttcctgggttccaaagcagtgccagtgctgagaagataaagaggccaagctggtttgtaaggagaccttcaaagtctcttaataaacatggcttaagttggaaattgaaggcaagactaccagtagctcatttctcattacttccctgctccggggagtttattaaaagcagataaatggaatttggtactacatttcttttttttttttttttttttttttttttttttgagacggagtctcgctctgtcgcccaggccggactgcggactgcagtggcgcaatctcggctcactgcaagctccgcttcccgggttcacgccattctcctgcctcagcctcccgagtagctgggaccacaggcgcccgccaccgcgcccggctaattttttgtatttttagtagagacggggtttcaccttgttagccaggatggtctcgatctcctgacctcatgatccacccgcctcggcctcccaaagtgctgggattacaggcgtgagccaccgtgcccggcctggtactacatttcatcagatgatctcaaactgctcctgacttttacttggcacctggggaaatttacccaaggtctcttagcaagtcactagcaggcctgaaagcagaagccattcattctaattaccaaatgacaactctgcccagtctgtggctgatataagaaaatcttttactttgaagctgtaaaataggtcttggtcttgatgtcactcagcggtcacacacgataccaccattccttgcttatctacaagttttctaaacacactctactacaaagatcaagatagtcatgggtttggtccctcagaatgagcagaaccaactggctgagcagatatgacatttccatttccctccctagaccacctaggccgttccagccacggacttacagagctgcctcactcaactgaaagggtacaggggagggtacttcctgtttctagagtcttactaggtaaaggtcctgaaaggagccactgggacccttgatggaagtgggggccagccctcccctaaaagctgttgtttagattattccctcttcaaggcaacacctgcccatagagagtcacagtcacaaatgcttaaaagagacagaaaacactgtactgcaggttcaggtactaatatatcctcggttgatcttaaatgaaccagggcttccagcatgtaatggaagtgggctaagcattactcaggcagagagaaagcaggcgctgcagtgggagtcggttcctcatttctacttaccgcagggcttaagtgtttttaagcagactaatttactttttccagtgcctaagcccatggatttgttctgtttccttgggctataggaattcatacttcagatatgggtcctacttctcccaaagcaaatggaagggagtagtctggattagagcaggggtccctaacccccagaccatgccaggctgcacagcaggacatgagtggtgggtgagccagtgaagcttaatctgtatttacagctgctcctcactgctcccattactgcctgagctccacttcctgacagatcagcagcagcattagattctcataggagcgcaaaccctactgtgaaccgtgtatgccaggcttctaggttgcacgctctacatgagagtctaatgcctgatgatctgtcactgtctcccatcacccccaaatgggactgtctagttgaaagaaaacaagctcagggctctcactgattctacattatggtgagttgtataattatttcattatatattacagtgtaataatagaaataaagtacacaataaatgtaatgtacttgaatcatcctgaagccatcaccccccgtcccacccccaaccccaggtccacggaaaaattatctcccacaaaactggtcccttgtgccaaaaagattattactgtgggttagagggacactaacatttattaagtacctactatgtgccaggctgtttataaatgttctctcctttaaccttaaaaaaataaggattgttatccctaccttataaaagaaaaaaatatcaagctaaaagagattagacaatttgcccaaggactcatgtctcaaatgtagtagggacagggttcaaatctagaacactgtctttataactgaggcactccctaatcacattccttatctctgcctgggagatgggacttttttgtttcatgccttattggtgttcagattttaaaacatctgagaaactcttaagttcagcatacaaagttggctgtttcagcatgagccttcaagccttcatgaatctttaaaaagactacaccgggggaggctttctgaaggtggaggcaagacactgctggttacatgtctacagggtacaacagaaactctccaggaagctcacgatgggccgcataacgggaggctggcatctgaactcagggagaggaggtgcatgtcagttgcagctggtttgctttgacgtcatggtcagggggtacatgctccccaaatgacatgacggggaatgccttctccctggtggccgtggaggtgtgtgtgtttgtgcacccactgatcatttaactacaatctagtgactccctgaagctgactgctttctgagtttcttctgaatactggccaggagcgtggggtccagacataaatgttgggctgccttctcaatgcaattagccagctctgcctaaacaactcatttaaatgtaggtactaaatgtttacacagtgcagcaggtaataaaagtttggtttcgaaatgctgcaaagctcttcttgtaacttttcctcttaggaggttctttctataacacacgataacctctaattctacgaaactgaagtataaggaaggtactctgctcacaccagatgtctgcagcacacagtctatgtagtctacacactatgtaaaaagctctaagcaggaagacagaaaggcagaagggggagccaagacagagcagctgctcactccttcctctgtgttggaacagagctaactctcttagcccttcccatagccaaactctcctgaagcctgcatgtctgagtacaatcacatcaccatgacctggggcctgagagggggatggctcaaaagatacttactaataagctcttcaagttcaaggaacgttccctcttgaggattaccagcgcggccaggccacagaaggtatagccaccatgggcttccatccctggtaccccgccaatgccaccttcccagttctgacacctaagaagagattgagaaaagcagaatgagtggccagtgagtggacgtacacaagaccaggaccatcctaggtggcagagaaaaagttcactcagattaaggtgtgaaccatcacaactatgaatgaaaagatgccaactaattaacttttggaaatgtcttttcaaaaaaaaaaaaaaaaaaaagctgggcctggtggcacccatgtgtaatcccagctgctcaggagactaaggcaagaagatcacttgaggcgaggagttcgaggctgcagtgagctatgatcacaccattgtgctccagcccgggtgaaagagtgagactaggtctccaaaaaatgtaagtataataaaaactgtaaaatgttaaaaacccagacacttagaaacagcctacttgtgtaagaaacataataattcaaattattactctttgggaaaaagttataaaatcatacatatacatatatgtacatatatacacatatatatacatatatatatatacacacatatatatacatatatatacatatatatatagtgataaccatcaagttaaaataaaattaaagagtgattgttgattctagtgatcttttatttttgaaacagggtcttaactctgttacctaggttgactgcagatcatggctcactgcagcctcaacctcctggactcaggcaatcctcccacctcagcctcctgagtagctgggactatgggcgtgccccaccatacccggaccattttttgtattttttgtagagatggggcattgccatgttacccaggctggtcttaaatttctggcctcaaggaatcctcccaccccagcatcccaaagcgttgggatgacaggcatgggccaccgcacttggcctctggtgatctttgagtacaggtctactagtaatatttttcctttttgtttttctatttgttcaaaaagtttttataatgaacctgtatactattaaaaaataaacgttatttttaaaaattataattaggccaggtggtgatggcttcttaaacagcctgcagaaccatgagccaaataaacctcttttctttctaagttacccagcctcaggtattcctttatactgacacaaaatggactaacacaagaaggacaagaaataactgacttagtagaatagagaaacctttcctacccaaaggatagggatgggagaggggcaacaaaaagcaaggtgatctgctccaataaaaggctccaggattagagatacagggaacctccacaaagtggaatgcgtctgaaccaagtttgttggttgcaaacttatataagaatcagacctttaagtcccctactcaaatccagcagaagatgggaagtttcagaggtttaatcaaaaggatctgagttccagaatatccaacaagctaagaggaggagggagcactgtaccaaatgtgattacgtgagagtcagtaatctcaacacaatacccccagccccattcctctgtgtatttcacacaaggctgccagtttcataccccaagcaggaatttagaagattcctctctgagggaactgataagcccaagggaaaaaccctacagacactgctttgagaattccccaatgaatggcttgatcctgcccactctcgcagagctccccagcagcttttcagtgctggatccttaaatatgaacagacagctgtagagtaccagacatttgaccacagtctctactatgaaagaggagaccaaaacaaacaaaaataaattggaggaaataagacagggagcaaaagaaaactttttaaagttgtatctttagataaaatattatatgaagtaagactattgagaggacaaaatatccccagaaaagaacaagagagtagataaaaaagtagtcaggaagtaaaagtagtcagggaggaaaactaaaaataggattacaaaaataaaaacaagaggattagaagataaatactaagagaatctctcaaagtataagaagaaggattaagagatggaaacgaaccatgcaatgaaatatttttatttttatttatttatttttgagacagagtctcgctctgatgccgaggctggagtacagtggcacaatcttggctcactgcaacctccgcctcctgggttcaagtgattctcctgcctcagcctcctgagtacgtgggattacaggtgcatgccaccacgcccggctaatttttgtatttttagtaaagacagggtttcaccatgttggtcaggctggtttcgaactcctgacctcgtgatctgcctgccttggcctcccaaagtgctgggattacaggtatgagccactgcacccggcagtattatttttatttatttatttattttgagatggagtctcacactgtcacctgggctggagtgcaatggtgcgatctcggctcactgcaacctctgcctcctgggttcaagcaattctcctgcctcagcctcccgagtagctgggattacaggtacccaccaccacacccggctaatgttttgtatattttgtagaggctgggtttcactatgttggccaagctggtctcgaactcctgacctcgtgatccgcccgcctcagcctcccaaagtgttaggattacaggcgtgagccaccacgcccagcctcaaagtattcttaaaagtcagacaatcaaatgtactaatgggatgtcatatttttaaaaggctggccaggtgcgggggctcatgcctgtaatcccagcactttgggagaccaaggcaggaggatcatttgaggtcaggagtttgagactaacctgatcaacatggcgaaaccccgtaaaaattagctgggtgtcgtggcgcacgcctataatcccagctacttgggaggctgaggcaggagaatcgcttgaacctgggagaaagaggttgcagtgagctggtctgcaccaccgcactccagcctgggcaacagagcaaggcaccatctcaataaataaataaataaataaataaataaataaataaataaataaataaataaataataaataaataaataagaggctgggcatggtggctcacacctgtaatcccagcacttggggaagccgcagcaggaggattacgtcagcccaggagtttgagaccaacctgggcaatgtggtgaggctttgtctctacaaaaatttaaaaaattagcggatggtggatgcctgtagtcacagctactcaggaggctgaggatgatcacttgagcctggaaagtcgaggcaacagtgaaccatgatcgtgtcactgcactccaatctgggagacacataaaacaaaaagagacgtctcaaaaaaaaaaaaaaaaaaaaaaaaaaaaaaaaaaaaaaaaaaagggcccggcgtggtggctcacgcctataatctcagcactttgggaggccgaggcaggcgatcacttgaggtcaggagttcgagaccagcctggccaacatggtaaaaccccatctctactaaaaatacaaaaattagctgggcgtggtcgtgggcttctgtagtcccagctactcaggaggctgaggcaggagaattgctggaacctgagaggcagaggttgcagtgagccgagatcacgccattgcactccagcccgggtaacaacagcaagactccgtctcaaaggaaaaaaaaaaaagagcaaacacagaaaacacaagagaagaaattatcaaagaaatactgtaataaagaatcttggtactaaagtatatgcacttccaaatcgagtgcccagcaaaatgaataaaaataatccacatcaagattcatcatcaagtttccaaacaagaataaacattccaggccaggcgaggtggctcatgtctgtaatcccagtactttgggaggctcaggagggcagatcacttgaggtcaggagtttgagaccagcctggccagtatgacgagaccctgtctctactaaaaatacaaaaattagtcaggcatggtggcaggcacctgaggttgcagtgagctgagattacgccactgcactccaacctgggtgacagagcaagactccatcacacacaaaaagaataaagattccaagccgctaaagaaggacaggatggggatagaaaaagagagacagaagaaaaaaacatacagagaattaagaatcacaatggcactgccaggtagtacagcacagtggaatccatttgatttctctgtatttctgcttaatataaaatttaaaggctgggtgtggtggctcacgcctataatcccagcactttgggaggctgaggcaggcggattgcttaagctcaggggtttaagaccagcctgggcaacatgggaaaaccccgtctctactaaaaacacaaaaattagccaggtgtggtggcatacacctgcagtcctggctacttggaaagctgaagcaggaggatcacttgaacccaggaggtcaaggctgcagtgagccaagatcacgccactgcactccagcctgggtgacgaagtgagaccctctttcaaaaaataaataaattaaattaaattaattaaattcagtatcccaccacttgacatataaggaaactatgacacagagcagtggaataacttgtccaagcacaaagctaattagaaatggcaggctggccatcgtggctcacacctgtaattccaacactttgtggggctgaggcaggaagattgcttgaaaccaggagttcaagaccagcctgggcaacacagtgagactctgtctttacaagacattttaaaaattagctaggtgttgtggtgcacacctgtggtctctgctactcaggaggctgaggtgggaagactgcttgagcccaggaggtcaaggctgcagtgagccgtgatcatatcactgcaatccagccagggcaacaagcaagaccgtgtcttcaaagaaaaaaaaaaaaagctgggcgcagtggctcatgcctgtaatccttgaactttggtaggtcaaggtgggtggatagcctgagcccaggagttcaagccccacctggacaacacagacagatcccatctctacaaattttttttttaaacattagctggttatggtggcacgcgcttgttgtcccagctacttaggaggttgagatgggaggattgcttgagcccaggaggtggtggctgcagcgagctgtgatcacaccactacactccagctcgtgcaacagagcaagactcggtctcaaaaaaagaaagagagaattgaaagacagaggaagaaagaaggaagagaagaggaaagaaagggcaaaactgggattcaaacccaggctgtctgagttccgtatctagtctgtgcctaaccagtcaacccccctgcaaatgacagctgtacactgaacaaaatacaaaaaaacagcttcctgagggttcagctgactgaaaaagggcaggcagattttggtggagtttgaaacttggaacagagaacagcatgcagttagtccctcccttcccccacaactttttctctctggtttgccctcaggatggcagccatagcccagggcggcagcagcaggccaggggtcaggggtcagggcgggcagccaacactctaatgggaagccaaccatccttctggcaggaagatgcaggctgccagaaactgaggacgaatccagaaacaggaaagtcaaagaagaaaaatcccaaattctgcatttaaactcagttcaagtttccacatacgtgctggggaaacaaagcaacttctaagcaagaactgagctctgagctgctgcatgagtgacagtttgtagcttgagtctgaccaagttgactgcctgctaaactgaaaacatcaaccccttttggggcaaaccaacagaatccataccgttctgttgtatgacacctccaccatcatatcacaatgtctaggacacaacacaacatcactcagcacaggaagactcatggagctgacatgccaactccaggacacacagatgtggaaattcccagacaagcaatttaaagcagacattataattccatacttaccacagcaaaatgaagaaaaatgcactcataaagaataaaaagatggaaaatctcagctgagaaacacaaaatataaaagagaaccaaacacaggcagtgcctactctccagctctcaactatagctgccttaccattgagcatgacagtcctcaatgaactctggttactattatcagccttattaacaatgacattggaagccagaagataatgaagcaatgcttacaaaattcagaaagactacagtttataccattgccaagttagaaatctctaaccaaataattaagtgtgagattagaacacagatacatgcaagatattaaaaatgtatctcccaggtacccttttttgggatctgttggagtacaatacttcatgaaaataagaaaaccaagaaaaaggaggacagggacttcaacgaaggagagaaatgaagtgaatttcatgctgaaaggaagcttcgggatgcctgctgtgtagcaagctgagagcaatctgtccagactgaagcaggagggcagagggctccagaaggggcaactcaaaacgcacgtgtgcacagagacaggttacctgaagggtttgactatgtttagagtaattttttatagctctgacagacaatttgggaaggaattcataagtacattcatgatatatccattaactccaggaaaatgaaactcatacaaaaaagtaaacatgatctcagcatatcatctggtatcactgtaaattatatttatatggtaatacatactactttgataaaaataaaatttttttaactaaaacagtatctcagcttggctatcattccatcatagtatatatgtgtctactataccttttgcttctttttttgagatggagtctcgccctgtcgcccaggctggagtgcagtggcgtgatctcggctcactgcaagctccgcctcctgggttcactccattctcctgcctcagcttcccgagtagctgggactacaggcgcccgccaccatgcccagctaattttttgtatttttagtagagacggggtgtcaccatgttagccaggatggtctcgatttcctgacctcatgatccgcttgccctggcctcccaaagtgctggaattacaggcgtgagccaccgcacctggcctgctttttttaaactatgaaatatttggagcatccaggaaagtacagcaaacaaaatatagaacatacacgtatctaagacctagcttagaattagccatatacacttcaggtctttgttgttgttaactattacagctgaagtctcctatgcagacttatctcatttcctttgctctcccctcagcgggaatcactatgctaaatttggtgtttatctttcgtatacatgtttttatattattaccacatgattcttctcagaaacaatacagaattctcttgcatgtttcaaattttaagtaaatgtgctaatctgtatggtttttttgtatttttttcttttcattctttcaactcaacatagagatttttccatattgatacatgtaactctagttcattcattttcactgctacattatattccgatgcaactataccacacttacccatctcgtgcttatgagcactgaatctgctttcagcttttggctcttataaacaagtcctgtgctcctctctcccattcgtgtgtgcaagggtttctgtgggagtggaattactgggtcctacgcaagggcacctttgacatactgtcaaattgctctaaaaactggttaaatcaattcaggctctcactaatattgtttaccaaagttttttatctttgccaatctaaaatataatataacattaaagaaagtttggaaaaaagaagacattttaagtatttaaaaaaatcattagataaccctaatggatctcctgtgatttttgtatttccttccaagtccctctgcattttctttatttttctgaagtagtgtcgtgaccgcctgctctccaagaggccaggagaaaccctggcttctctcaccttgctatccattcagcagtgccctcaaagaggtctggagtgatgatgttggtcagcgaggctacggaggcagcacagtatgcgcttctggaaagacagaaacgggaaacacattaagctctacggaagagctaatgaggctcagtgaactccgcgggcggactgctcgccttgcctagtaagctgtaatcacctcctgtcctcactcttggcacacggtcagtcctcctgggtctccaactgagaggtgtgacattctatttggatagagttgctcacggcatggcttcagtgaaagaacatgacattctattctccctacctccacatggtccaatctacatcagaggaaataacagccatatcaattcatgtcaaaagtggattcagctcttctttcaaagacctataatggttgccataaatctatggtatcattcaggtacttctgatatgctcattcatttggatgttagtactgtttcagagccaggatttctgtttacagccttgacacattaaagattaactatactttttctgcaacagataaactgcaaaacaggccaccaaattgtaatagatcaaacaaggataggaacaggtgagtccactccaatacagtccttaaacctctagagggagaaaagagccttgatttcaaacctctcaccagtacacacacacacacacacacacacacacacacacacacacgttaaatgaaaaaggcgcacgtctatattttttgttttgcttttgttttggtttttattgagacagggtctcactctgtcgcccaggctagagtgcagtggtatgatctcagctcactgcaacctccgcctcctgggttcaagcaattctcctgtatcagcctcccaagtagctgggattacaggcgcatgccaccatgcctggcttatttttctatttttagtggagatggggtttcgccatgttggctaggctggtttcaaactcctgacctcaagcaatccacctgccttggcctcccaaagtgctgggattacaggcataagccaccgcgcccgggctattttttaaaaaagcattattaggctgggcacagttgctcatgcctgtaatcccagcactttgggaggctgaggcaggtggatcacgaggccaggagttcaagaccaacctgaccaatattgcgaaaccccgtctccactaaaaacacaaaaattagctgggcatggtggcgtgtgcccgtagtcccaactacttgggaggctgaggcaggagaaccacttgaacccgggaggcgggggttgcagtgagccaagatcatgccactgcattccagcttgggcaacagagtgagactctgtctcaaaaaaaaaaacaaacacaaaaaattattatacttgatttaggatcattcttgctgttccatcctcccagccctaattcttctcggggcacattttatttcagcttctccctctgtcatggtatacacacacagactgcctttccttcccctctatggttttttcaaatacccggcacagggaagacaaaaatcattggtttgaattctgctcaaaaatccttctcctggccaggcatggtagctcatgcctgtaatcccagcactttgggaggctaaggcaggtggattatttgaggtcaggagttcgagactagcctggccaacatggtgagacctcgtctctactaaaaatacaaaaattagctgggcatggtggcacacgcctgtaatcccagctacttgggagaccgaggcaggagaatcgtttgaaccccagagacagaggttgcagtgagccaagatcccaccactgcgctcctgcctgggcaacagaaagaaactccatctcaaaacaaaacaaacaaaaagtatattcctaagggctcctaagaaacataaaagaagggcctagtttccatcttcttttttttttttaagataggatctcactttgttgcccaggctgcagtgcagtggcgctatcatggctcactgcaacctcaaactcctgggctcaaactgatcttgcctcagcctcctaagcagctgaggctacagatgcatgccaccacacctggctaattttttaaaaattttttgtagagacagggtcttgctgtgttacccaggttggtcttgaactcctggcctcaagtgattctctcatctcagtctctcaaagtgttgagattacagacatgagccactgccgctcggccctggtttccatcttactcagtatagatataacatgaagtcagacttactgaggtattccaaagaagtctctgcagaagctgcatgcattatgatcctaccagcatttttagcagccaaaggcacagtggaagtttagttccaccagcaggcattgggagcacacaagagtcacaagtgccaatgccaaatgtgatcatctaccagcagctaattttgaagatctgtctaatttccttgcaattgtaggcctcttaaagaggctcagatgcatttgctcttgaatcctattgtgacttgtgaggtaggaggcgacctataatacagtttgcctctcacaagtgtgaggactaagaagtgatgacagaagacaggagtcccaggtctcacgctgagatggggaggaaacgtaatacaaccttttcatgtatttctccccctttccctccacccagtcatcgcagctctcaaatttgaatttgtccactaactttccatccttgctgccatcacccaaatccaagccttcttcaacctggatcagtcttcctgctctctctccctccagccctgaaaccagagggcttttattggaacactacagtccatcactgcaattgggaaacttctaagaaaatacaaatcagatcacatcactaaactccagactccataggagatttcagggcctctgtagcctgttcccagcctgtccctccagctccactgctcccctgcccaccaggccatctacacttcaacactgaacttgtcctttcttgagcaacacatgctttctcaccaaacttctgcaaatgctagatccctgcctccaccttatcctcacagaatgatctagattatataacctagaaaggaggtctcctttcttaagaactgagaaaaaatagtgcttgctatgagttcactgtgatttgattttttacaatacactggaactacagacccttgagtaggctcatctctgaaactatcagcagtgtaacagagcagaaagatcatccagagactgctgtctatcccagaagggcagcgagctagtctccagatgtcaaactctcccatcactgctgcttttctccaagtcaaatccacccaaacaagcactcctgaggactggctgatgcttccaggcaaaggacaatgaaagaaatgccaagtgaaaaatgatggaatcggggtactagaaaccaggcaaagcaaggaaaatggatgcaatctgctagcttttctctatcattcatatctttaatcctttatgtaaatagaaagcacgggcacgaatggcagagcatcacccaaagagcaaaggtcagggaagaatatggctacagtgcttggcaggggaaccaagctgccttactggagaagtttcctagcatttatctagaacatataaataaagagcatagggaaaaaaaaagtgctggaatgaataagatagcaaataatcacagctgcaaaaggtatatgataaaataccaaaaggatcttgctatgatttgtttgcttttgcctaataatcttagtaggtttttaaaagctgcgtttcaagactgtgcatattttgggggaatagcaacagaacaggaacgaaaatgtagtgaacacgagggaaaaaaactcttttaacattttccttaagaagaatcaacacatactgatttacctcagtcgttctactggtttcactggtatacacagatcctaatctaatttttttggttggattagacaagttagagatagaagaacatcttgaactaaaggcctttgcagcctgattacctattatctgtaatgtattttatgctccacaatgttcgtggttttttcctcccctatactttcaaaccaatggttaaaccagatgcttaagccagactattaatcaacttgtgtagaagcaaacccatttacacataggcagtaagacagctttgctatagaaacctcacaaaatgtatttctcaactaaataataagaaaatggcataaaatctcaataagccactgtcttagagaaatggcttattcaatgaattccctgtatgcctcataagtaatctgccaggtgaggaagcaacttgcttggtacatcagacacttatggaagaaaataataatttcgagctaactggcaccaatcagttaatgcgattttattgcactgcactctcccggcccacaaggctctctgcacctcccagaaaaactctcatgtgcctcaggaggacctcagggattagacattctcatgatttcatcaaattcactcagaaggtatttactgaggccctgctggactttcccctcccttcctatctcagagaggtgaaggaatacattacaccatacagttatttatattgtggtatatcattttgtaccaaacaaatgtatttttaatttctaaaacaaaagcatttgtttcttatattttcacatttacataaaataagtcaagtgatcatgacacctgaggacatctgcatcacatctgaatgattctgacgtgtcactgacatgtcatcccatgtgtcattctgggacaaagcagcagcttccccatgatgttccttaggcttggcatctctaatggcagatgagctctagagtcaactgatgtggcagcctgtgcaaaaccccactcacctcacatccacctcacctccgacatgcatgagaaaggagccgtcaggttgcttcagggagtacaaatactgaagaagcttctctctgagaaacagggaaagaggtaggagaggcaacagtcagtgcgtgtcagcaggcggggaactcctctaggtttctgtcactgctggctttcactgtacctgttaatgatgtcataggcctcctcggtgccaatgatgcacaatgcattgactgctgcatatgtgggtgcaaggtgtggatactgaccgggtcctcctccaaagccaccttctgggctctgacacagctccaggaactgacacacactaggtacacagccaaagggcaaaaacaaagtcagagagcattcatgtcaaaacaccaaattcccactagattccaggcctttccaatgatcccccactccctcaaaagttgaggggaacctctcctcccacttgttgaatataacctctccccaaagggcttaattctctctccagctatcatcatttctgtctgccctcctctgagtttcgtacttaagcgcttgttggtcatgaagcagggaacacaaggctgggaagaaaccgactttcgtagctatggggtaagagtctcccgtgcttcccacacaaacctttcccagactttccactcaacttgctgccctggacctgtggtaccagcctcctcctccttgcctttgggaacctcccagcctttgaattttgccaaaacatggtgctcaactgcttctttccacactaaccatcctagtcaggatccatcacctaggcctatcatgaacatgtaaatagaggtcttctcactcccattgccacctaagcctctgtgggccactgatttctactccaccagtaagaagcaagttttgtttttttgtttttttttttgaggcggggttgccctcggtcgcccaggctgcagtgcagtggtgtgatctcagctcattgcagcatccgtctcccaggttcaagagattcttttgcctcacccttccaagtagctgggattacaggcgtgcaccatcacgcccagccaattttttgtattttcagtacagacaaggtttcaccatgctggccaggctggtcttgaactacctgacctcaagtgatccacccgccgcagcctctgcaagtgctgggattacaggtgtgagccactgcatccggctgaaaaacacatttttaatggagcctgcttccatggctgggagaacagaagagaggcaggctgctctcatgctcaccttaattgcggtaaacataagaggagctgcactgactcgccgtgagaatgcctcccagtctgcgggttcttggagaattctccacgttaattcaaacaggctcccattccctcactgaggggagctgttttctgagggtttgcctccaagcctggcatcaggctgcccagaggttacagtcttgctttaggtgaaatcaagagagccctatcatcagtccggggtcttccgaagtgcaccagaaagggtgccccaggaaagccctggttatcaagctgtttctccacagctcagcagggtcacagccttcccgccaggagaaacctccatttacaacaagcaaactgtctttgcagtgttcatggggccttctttcctgggcgctttcacctcattatttccttgctactgctgccagaaagactacatagcctactctccaagaagacacaagtttataactgtttgccaacatcacatttaattgctttcgatttcagagttcccattatccgggcagagaaagcaaaagcaaacgctgctgccttgctctgtgagttctgaaacgtcacaggttaaaacaacacatacttctttttgcacctacaattttactgtagaaaacacaaggattgaaactgaagttgaaaacaattatgtggcactatggtttttgtttttgattttgagagagggtcttactctgtcggccaggctgcaggacagcggcataatcacggctcactgcagcctcaacctccccagactcaagctatcctcccacctcagcctcccaagtagctagaattacaggcatgagccaccacgcctggctagtttttgtattttttataaagatggggtttcgccatgttgcccaggctagtcttgaactcctgggctcaagcaatcctcccacctcggactcccaaagtgctgaggtcacaggtgtgagccatcatgcccagcatgtgacacatttttaacagcaattaatttctgtagagaacttgaatttgttccttctttccaaatcgtcatcaattcttatgacatttcccagaaacaaatagttaataagctcatgccctaacaaaggctggctgcactagcataccaaaaggtttctgtaccacaaaaagttttagctgatacaaaacttaacagcacattttttaaaagaaagaaaaagagtcacctggttatccactccctttcccagctcctaagatagaatcgtgccgaacgcaacactactgaccctaaagcctcgaattagttaggatctgaatgtaccagacacaccttgataccatccctccatgccaacctccctcagctgacatgctgcatctgactgtctggggctgtgctagagaactggaggttgggcttctcttgatctcagacacttccgtattacagaacattctgatcccaaggctttccaacttgcaccttaaggaattggcaagttgactatgaactaccagctgtcattcacagacttcttagcaattctgaagaccaaaatgttaatgatacttctacatatttaaaaaaaacaaacaaacaaaaaaaaggagccaggcatagtggcttgtgcctgtaattccagtactttgggaggccaaggcaggaggattgcttgaagccagtagttcaagaccagcctgggcaacacagtgagaccccagctctacaaaaaaatatttttttttcccacaaatgtagggggagaaaaacttatcatagagacaagaagttcaccaataaataaaaaattacaagcaaaaaacattgtacaaacaccaagtggcacattttgtgaaaaacaagtattcacaaaatcattcctttagaatatgactgaaagctgcaatacatcaattttctttaacgtcagcaaggcatttcattctagcttacgtgccaattaccagcaaagtgggaaactatcttctatatcatggatcttcaaacccaaaatgtgtgcatcagaatctgtagaaagctaataaaagaatacagagacccagtcctgctgaggtggaaaagatcctgggcctttgtatttttaccaaattctcaggtgattcagatacatgcaaagcttgagccatcactagtccttgctgcacaactaaaattacttggggggtgttttaaaaaaatcccaacacccaagccacacctaattccaattaaaccggaatcactatgggtgggacccaggtggcagtattttttttaaactccccacgtgattccaatgttcagccaggtatcagtgcttctcaaacttgagttgcatagaaattacctgtggatcttgctaaactgcagctctaattcagtagaactagatgggtctgagagtcctctttttttttttttttaggagatggagtgtccctctgtcgcccaggctggagtgcagttgagcgatctcagctcactgcaagctctgcctcctgggttcaagtgattctcctccctcagcctcccgagtagctgggactacaggtgcatgccgccacgcccagctaatttttgtattttttagtagagtcagggtttcactgtgttgcccaggctggtctcgaactcccgagctcagacaatccgcccgccttggcctcccaaagtgctaggattacaggcgtgagccaccatgcccggctgagagtcctcatttctaataagttcccaggtgatagcaatgctcctggtctggggaccacattttgagtagcaatgagatacatctgtgctgtccaataggcagccactagccacatgaggcaatttaaattctcaattaattaaaatagaaaattcagctcttcagtcacacaagacacatttcaagtactccacaactaactgtggctagtggccaatatagaacacgtatagatgtttatagacacctatagacatttacagaatatagaacattttcattatcacagaaagttctgctggacaccaccacttttatcattccatcattaaagagtatgtaaatcttgtaagagggtcaagttcaaagcagggatatcagcgattgcctctcagccttataaggagtttacttgggactcttaggtgatggctgaggactgatctaaagtgattgattctggccaggcgtggtggctcatgcctgtaatcccagcactttggctgaggtgagggggatcacttgagctcaggagttcaaggccagcctgggcaacatggcaaaaccccatctctacaagaattataaaaattaaccaggcacgttggcacccacctctagccccagctactcaggaggctgaggtgggaggatcacttgagcttggggaagtccaggttgcagtgagctgtgattgtgccactgcattccagcccagacaatagagtgagaccctgtctcaatcaattaatcaatgttgattctaaacaccgtcatcagtttggatgaaggattcaaaggcatgtacagtaaataagcatataatacaaaatgagcagcaaaacaaatcagaaaccaataagaataaaacaaatgcaacaggtacaaatagcaagaattacgcttagagatggcaggggtgggggatgggtaaggcacatgaatatgggaaatgactaggaacatagcaggaaaagaccagtaataagggtccacgagttgtgaagaacaacaataaaaatgcttgttaaaagcatcataaatgcagtattagtcagaactgtatctggctctagcctccattttccacctcaaagggaattcacatgagagttgtaaaaatgactactttttttttttttaagtatttggctgggtgtggtggctcgtgcctgtaatccctagactttgggaggccaaggcaggaggatcacttaaggccaagagtttgagaccagcttaggcaatacagcgagaccttatctctatttttaaaataatataaaaagcttaatattacagacaatcacagtgagaaagctacccagcaaaatacctcaaatatacaaaggataattacataaacattctagtaggtaaaaactgagactaatttgtagcaagaagtatttaggttacataaaaaacttcagcactagactaggctatcatagacagacttaaggcctaggataagttataaaaattatagctatgttctgcacaattgggcaggtttaaaaaaaaaaaaacagaaaaaaagattacagctttggaaataggaacagtcatccatgggcagaacggcttaggaggggatgtaaatgcaagatgcatgagctggcatcacatcaagcttgttctcgtactaactaaaacagcttcagcttgatatagtgaagaggaaatctccttccctaggtagaatatgacaatggacaggtgaagacgggcagcatctcttgttgattccgggtggcctctgctgctcacagagtcagacgtgttatttgactcttcatcaagcaccggcaagtctctggatggctgctgttctggaagaatggtcaggtcgaaagttggctactataggccgggcgcagtggctcacgcctataatcctagcactttgggaggccgacgtgggcggatcacttaaggccaggagtttgagaccagcctggccaacatggtgaaaccccatctctactaaaaatacaaaaattagccaggcatagtggcatgcgcccgtagtcccagctgcttgggaggctgaagcacgagaatcgcttgaacccggaaggtggaagttgcagtgagctgagattgcaccagtgccctccagcctgggggacacagcaagactgcctcaaaggaaaaaaaagttggctactttagagcagagtttctcaactgttgacactggggctcagtaattctttggtgcagggaccgtcctgtagaggatatttagcagcacctctgacctgcacccaccaggtgccaacagcacctggccaggaaaaatgcccaggagacaaaggcctagatatggtgtcctcactgaaaggtaaggaaacatacaaactagacttaaaaattaaaaggaaaaatatttaaggggctattccggggataagctactaacaaccttttgaaagggaaaggataaaacactgaaatagcaaaatttgaatttatctttggaaaaatcttacaagctgaaatgtcctaaaatggtttttaagttaaaggcaatttttaaatcttacagaagctaaaaacataactttaacagtgcgatggtctccctgtgaattttattttgctctgtttcactgaagctgctttcagtaacaaagaatgggattctcattagaggatgcttccttcagtgccaaaaccattaagcaaagcaaatgtacttagtctagttccaaaatattaattcattttagataaacacatataaatgtgtgcatataacctcttaaaagagggaagctaggccgggtgcggtggctcacatctgtaatcccaacactttgggaagccaagacaggtgtatcacctgaggtcaggagttcaagaccagcctggccaacatgttgaaagcctgtctttacaaaatacaaaaattagctgggcgtggtggcacacccctgtaatcctagctacttgggaagctgaggcaggagaatcacttgaacccgggaggtggaggttgcagtgagctgagatcatgccactgcactacagcctggcaacaagagcaaaactccgtctcaaaaaaaaaaaaaaaaggccgggcgcggtggctcatgcctgtaatcccagcactttgggaggctgaggcaggtggatcacctgaggtcaggagttcgagaccaacttggccaacatggtaaaacccaatctctactaaaaatacaaaaattagccgggtgtggtggctcccgcctgtatgcctgtagtcccagctactcgggaggccgaggcaggagaattgcttgaacccaggaggtggaggttgcagtgagccaagatcgtgccactgcactccagtctgggcaacagagcgagactctcaaaaaaaaaagaggcaagctgaagtcctacctatggactgggcatggtggctcacgcctataatcccagtgttttgggaggctaaggcaggaggatcaattgagcccaggagattgagaccagcccaggcaacacagcaaggcactgtctctaccaaaaataaagaaaacattccaggctatgaatacattattcttgaaacctctgataccagcagtaacaacctcgccttgctggctttggtcagcggtcatagcagctgacaaaagtattttgtccactagagggaacccagcttatcatattgttccctaaacaaatagaagcacagcagtgaacaaaataggaaagagaaacctttgtgtaagtgtagggggcgtgtgtgttacatgcaggggaaaagaaggcaggaaaataataaaactgcagagctagactttttgactctaggtcaccttaatatatttgtatgaagaaagaaaactgaacgcatttcaaagcatttcatttccctgtgcaagataaataaaaaggcaatattctatttcagctagtctaaaaaaaatcttctatttatatagaagtccttaagatttatctgtatcttactaaaaataatctatttccttatgggtcagagccagtaggctttgttcataacaagtgttttctgcacctagaagtaaccacctcctaggcacaaagcaaaatacattattgggaagtctaagaaatgtttaaaagttcactaaatcaatgcgtagaagaaccacaggtaaagcttttaaggcatctgtgaagcagaaactctcattaactgtcaagtggtttttgaaataaggacaaatcagcttatttttaaaccattccttttttaattacaaaataataaaagatcattgtagaaacttcagaaaatgcaagtaagcttaaaaaaaatgttttgtttgtttgttttttgagacaacagtctccttctgttacccaggctggagtgcagtggtgtgatctcggctcactgcaacctctgcctcccggattcaagcaattctcctgcttcagtctcccgagtagctgggattacaggtgccagccaccacatctggctattttttgtatttttagtagagacagggtttcaccatgttggccagactggtctcgaactcctgacctcaagtaatccgcctgtctcagcctctcaaagtcctgggattacagccatgagccactacatccagccagaaagttcttctttttctttttctttttttgagatggagtttcactcttgttgcccaggctggagtgcagtggtgcaatcttggctcaccgcaacctccgcctcccgggttcaagcgagtctcctgcctcagcctcctgagtaggagccgggagtgcagtaacagaaggagactcttgtctcaaaaaacaaacaaacagcctcctgagtaggattacaggcatgcgccaccacgcttggctaattttgtatttttagtagagacggggtttctccatgttggccaggctggtctcaaactcccgacctcaggtgatccacccacttcgttctcccaaagtgctgggattacaggtgtgagccaccgcgcctggcctttttttttttttttttttaagacagagtctcactctgtcctccaggctggagtagagtggcatgatcttggctcgtcgcaacgtccacctcccagattcaagcaattctcctgccttagtctcccgagtagctgggattacaggcatacaccaccaagccaggctaatttttatatttttagtagagacaagatttccccatgttggccaggctggtctcgaactcttgatctcaggtgatctgccgaccttggcctccccaagccctgggattacaggtgtgagacaccgtgcccagcccagaaagtttataaaatcacttttaaccccatcgtccagaaataactactacatgtatctttctggttctatctatgcatatcatcatctatatttttaatgtatgtaaattaaatcttttaaactattttcatttcacatctctctatataaatacatatattttaacatacaaatatacacattcatatatttattgagacagggtcttgctctgttgcccaggctggaatgcagtggtgccatcatggctcactgcagcctcaaacccctgaactcctgtctcggcctcctgagcagctagaactagaagtgtgcaccaccacgcccagctatttttatttttatttttgaaatggagtctcactatgtcgcccagactggtcttgaattcctgggccccagtggtcctctgaccgtggcctcccaaagtgctggggttacaggtgtgatcatgcgtggccacatttatacattttttaatggttatatagtatttcacagaatgtactgcaccataaatgacttatgttttattttttaaatttatgtattttatttatttatttttttgagatggagtgtcactctgttgcccggactggagtgcaaaggcgcaatctcgactcactgcaacctccgcctcctaggttcaagcgattctcctgcctcagcctcccgagtagctgggatgacaggcatgcaccaccatgcccagctaatttttgtattttagtagagatggggtttcaccatgttggccaggctggtctcaaactcctgacctcaagtgatccacccacctcaacctcccaaagtgcttgggattacaggcgtgagccaccacacccagctttacatttaaaaaaaattttttttaaacattctctactgttgatatttaatttagattgcttccaatgaaaggccctttaaaggctcctctcttcctatgtgacattgccccagaagcggcgctgacacttcctcagaaaagccttcactataaaacaccaagtacacagcctagaaaaaaactcagtcgattttggctcgagttcttccacctcaggcaccccctgtgattctctcttccagtttttcatgggtctgcggcctcctccatccagcgttcagatccaggctcacagaaatccccattttttctttcttctctcacacccaactttcccattgtgcaagagtgaagggaaaactttccaaatatcctgattgtgtaggagtgaagggaaaacttcccaaacaatccccaggcccccgagctggtatttcaaaaacacacgaggctggatgtggtggctcacacctgttatcccagcactttgggaggccgaggcaggtagatcagctgaggtcaggagttcaagaccagcctggtcaatatggtgaaagcctacctctactaaaaatacaaaaattagccaggcacggtggtgggtgcctgtaatcccagctactcaggaggctgaggcaggagaatcgcttgaacccgggaagcagaggcagcagtgagctgagactgtgccactgcaccccagcctgggtgacagagtgaaactctgtctcaaaaaaaaaaaaaaaaaaaaccacgtgggcctttctttgacaattaaattcctgttactgcagaaactgtgtccaactctccttccagtgctggaagcagccaggcttgcagtggcatcccgatgatcaaaacaatgcacttgcctctccctcagaaagcatcctacgtaccacaagggttaatggcctaattctttattatcttccccatccacattcatcacaagacaccctgcccaggaaggcaagaatgagaggttattgttaagacagaatgaatgagacaatgtgcagttctgttcctctgacctgacaatgtgactgaggcaggggctctgtgaccagagaggggccccggctaggcctctgtgtgtcccagcacagctgcctccttgtgctgtggagaaacaaacctggctcagaagtctctcatcccagatgcttcgacctcaagagcaccagaggaagctgagaaattcgagatgctgcctagagcccatgctgcctctcagtggatctcttggatccaattcctggctgccctttcttattccaggtatccctaggactggagtcatgatcagtcttttcttctttaatatataaatggtgatgagtgtctgggaatgagatgccagatcacgaatgccatctgtacaaggatcttgggaagaagctcagttgcttagatctctaatcatcgatcaggtttaggaaaactgagagtcatggcatttgtatgccacaccagtaacacatccagtcccatcaagagctacatggtcgctccaagcaccgggagcggggaggtacttctatagaggtgcgtaggaaaggcaaaggcatttttgttcactggactggcacgtgcttccccacagaagctgttcaaatgcatactgtactttctggcaaaatcttgtctctcagagttgatgattaagacttttctcaaagaccagagtcaagagccaaaagaaaaggccacagaagaaaccagaatccttctcttggaagttcaaagtcttgttctacccaccagcttacattagttttctaaagtggaggagtttcaggaagttgccggaggtcatgagaagagcaaagatttctttgtggcactgtttttttccattccaaacaaacaaaacagaaacaaaacaaaatcccaaactcaaaatacaatttcagagaacaccccagatttcccaaagacagactcactctgtagccactatctgggggatgggttcatctagcagttccaagctgtgcaggatccaatagcagagccatgggcggctggcatccagacactgggagagagacaggagagaaaacatcccttattcacaatcactccaagacactgctgccaaggctgtatctgtctcactcccagcagcctggcaagggggaggagggcacccttgctcaaacaacaatcagtgaataaaggacactttgctttgtggccttagccaggagctgaaatgaccatctgttaaaaaaaaaaaaaaaaaaaaaaaagataacaaggctgggcgcggtggttcatgcctgtaatcccagcactttgggaggccaaggtgggtggatcatttaaggtcaggagttcaagaccagcctggccaacatggcgaaaccctgtctctattaaaattacaaaaattagctgggcatagtgatgtgcgcctgtaatcccagcgacttgggaggccgaagcaggagaatcacttgaacccgggaggcagaggttgcagtgagccgagatggcaccactgcactccagcctaggcgacagagcaagactccgtctcaaaaaaaaaaaagaaagaaaagaaaaaaaagacaacaggattaaaaaaaagatgaccctgaacccagtggatccctccctggcaggcatctaaggaaggctgagcagaggacttcctacaggccaggaggttaggggctgctattttctcggtatagaaccaaggagatatacattctctgaagagatttcctagcttaactcaatcactgattcaacaaatatttgatagtatctacttgtgccaagcactgtattagacactggggggatgataataaaatttggtttctaccgtttatttttttgagacagggtctcgctctgtcacccaggctagagtgcagtggtatgatctcagctcactgcagcctcaacctcccgggctcaagcaatcctcccacctcagcctcctaagtagctgggactacgggcacacaccactatgcctggctaattttttaagtttttatagagacagcatcccactatgttgcccaggctggtcttgaactcctgggctgaagcaattcacctgcctgagcctcccaaagtgctgagattacaggcattagccaccatgcctgaactggtttctgttcttgagatgcttgggatatagaatgtgtgtggttacctgtaggggaagagagcactggacagacatataagttacctcatgtctttctggaaccaacacgtgtacatatacctggagaaatgctgtaatggacgaaaacagagttttgagggagcacgtggaagagactgactaattctgcctggggagctaggaaaggcttccaaaggcaaaatgcagacggctcttgatcctaattaaaccataaatgattattgagcattcaaggctaggcagggtaggtaggagtactgccccagttttataaattaaaatatataaatgaggtccaaagattaacctttttcagattataaaaatagcaaatgtcagaggtgagacaagaacctaggtttttagagtcaatccagtgttctttccgttggcccaagctgctctcttcaaaactatgctgatatcccaagctgtggctaacccaccacctggaaggtaggctggtgagctactgaagacactgccagggatgcagcttaagtttgaatcccagctcctcatcttactcgctatgtgcctttgagcaaatgacttaattttactatgcccatttcattatctgcaaaaaacaagagattgatctacctcatgtagttacaagatttaaataagagaatgcaactgggcgcagtagctcacgcctgtaaccccagagcctcaggaggctgaggcaggtggatcacttgaggtcaggagctcgagaccagcctggccaatatggtgaaaccctgtctctactaaaaatacaaaaattagccaggcgtgatggtgcacacctgtaatcctggccactcagaaggctgaggcaagagaatcgcttgaacctgaggcggaggttgcagtgactcacgatcatgccactgcactccagcctgggaaatacagcgagactccatctcataaattatgagagaatgcatggtaagctttcagcacactgttcaataaattgttagctgatatggtaccaactgtaacataactattgaggacttgagtcaaggattgaaaattcatagcccacaggccaaatctagcccatggatgtgtattgtttaactggtagtagctgcaacatttgtcaggagagtcacatgaaaacgtgatttccggcttcatttggaggaagaaaaaaaaaaaaggaaacaaagatgatttggcaaccctgggtctgcattcccagatggcagtaatgggcaggaaagaagttaagggcacagggtctccagttagcctcagtctccatgcagcccacttcactgatttatgctgcctgcctgggccctacaggcatttgagttggcaaatcattgccacaaataatcaaatgtggaacccaaataaaaagcagattaaaaatagagatgctgctctgtgttaagcagggcagaaagactggagacttcctgttcacattcaccctttgcctgccgctcagtcccatccaacatctgtcccctccaccgtcacccagtcctgacgttgctctgggaaatattaaagatctactcttaaacagtaatgttaaattgcaaggaccactctctatactggtcctctagtcagtatagaaattagatcttattacaagaaagggttttttgtctctttaatgaagatatgaaaagtaatgtacttactagaaggagtggtgaagttggaaaatttgtaaccatcacgatacagacttaacaggtttggacaatagtcctcaataaatgagcgagaaattagatcagcttatagggcaaagggttaagggtgaacaggtaactggcatttagccagctgtcaaggaggtctagataaagcacgtgaaccccttagtcatcatctagtaacagaagaaagccccatcctatctagggtgctccactcactctggaagagactaggttctgccctttcagggctgagtcccagctctgtgacagcaccctacctcctgccagagccacagagaacaaagagtgactctgcaacaggtcagccccaacagtcttttacgtttaaatagaaaaaggaggaggatttggtggataatttgacagcaagagttcctgggtaatgtgtttacctcataggcatctgtcagttgtcgaaggcctcttttcagataatggaagtgcttctccctctgcaaaacaagcctggaaagacaaacagtttataagcccattctaatagcttatgcttccaccatacacacgtatgtgcacgtacacacacacgggtaaacactcagcttcaggacgtccccctgcaatcactgactggataaccagcaacttctctggttccaaagagcaactaaaccagagaaaagaagctcttgtctgaatgtctctaaagcatctgaaaaccatgccagctgacatttagagtgcgattgtctcctaaaggcagtgactttgggctaacggaaaagccgcaatgagcacacgcagccaggcaatgacagtccacccagaaacttcctccagcatctaagaacagatatctttgtgcctccccatcctataagcaatttaaatctgagcctcgccacttccctgcctcagccgctgtcatttcagtcaccccgtctgggatgacttctccaaggcccataatttactccctgcctgcctctcggttatccaactattattctctccctgaaattccacctcccacgtgtgacccacagccctggccagaggaccgtgttctgcagccagtcgctgtccttggctttcaagtcagcaatactggctttaagatggaatgtgccgcccatggccacctgcacaggccgggcaaagcacagaggctgcacttctttcttggtctggcagaagagcctgtgtgactagggaaggaaacaaaaagcacagattgtcaagatgttccccgtgcttgcagattacagaaacaaaggaaagagaaccattccctttgctaggtagtcaattccacaattgtttatcaaattcccactgtacttggctcagagtaagagccttcatgcagtctttttttttttttttttttttcctgagacggagtctcgctctgtcacccaggctggagtgcagtggtgtgatttcagcttactgcaacctccacctcttgggttcaagctattctcctgcctcagccacctgagtagctgggattacaggcacgtgccaccacacccagctaatttttgtatttttagtggagacgggggtttcaccatgttgcccaggctggtcttgaactcctgacctcaggtaatcccctgccttggcctcccaaaatgctgggattacaggcgtgagccaccgcacccagcccttcatgtagtctttacctcaaaaactcttccaattcagaaatgaggtaagtatatcaatggctacaaggaaagaatgggtaggttttgcaagggaaaaacatactactgaggctcaaaagggaggggatatctcatgaagaaaggaatgatcaggaaagtttgtgtgaaaaaggaggaatgtgcgatgagtggccctggcagaaggagaaaattttaattcaattttaattcaagtttaaatagctgcaggtggctaatggctactctactatgctgcacaggtatcaagtgtacaagaggagtgacaggtgggagaatctgacctcaatacagggatgaaagaggaatgggaggaaagcaggagtactgccccagtttaaaaacaaacaaacaaacaaaaaaacaaggatctgggatgctgactaaggcatttctactcaatttactaggcaaagggaagtcctgaaggtttttgagatgaggaaagaaatgatcagaactgtgctttggagaaacagtaggtagtcagtatgtgtttacaaactgaagtatctgaaaatatcgcagtgggcagacagatggggtggggagacagggttagaagctctgaggagctgacccagttggggctacttagggcccgaactagtgtgtgacccgtgatcagctgacttttggatgtgtgggtcttaggatgctgggactgcattcaggtgatgatgtcaatcaggctgctggacacacacgtgaggctcaggagagggattcaggttacacacacagactacgaagcatttgtctgcacacaagtgacaggtgaagccacagaaggtgagagggcagagagagaagtttggaaacaaaactgtgggaagacccatctctaagggtttggaggagccagtgaaggagagaaacaggagagtttacatatgctagggaagagcaaaggaagtgtcatgtcacaggccatcagggaggagagaatttcaggaaggtgtttaacagtggcagatgctgcagcaagactgaggggaaaagacaacaaaccacagaagggctagagacctccaagagcattcagagcagaggtgaaggcaaattgtaaacaagagaaggccagactcagtttctctttcaggaaagtccactcaggacgcagggagcacccatctgtgtgggcagagtgttgtccagcactggggtagaggctgctctgtaccctagagcgacagtccagaggtggacacacatgtgaaaatgacaagcagagccctgtccaataaacgctgtgatcagccacgggaagagatggagggtcagaaaactcttcccaaagggaagagcattgagtttaaggctggaaagacatgagttaagcaggcaaaatgaagaaaacaccatgacacatttgagttagtttagttcagctggatcaaaagtacaaggcagtaagcagagaaattccacattagaaatgcaaaagctcagaggaaatccatagggaaggtctgtaaagaggatggaggagggctgggatgagggtatagtaggagaggtgagcctggaataaggaaggatgctgcattctttgagcgagaaatgatgggtacgaagctagcgaaatataggtctctgatgtgggaagaaggaaacaggaaagtcaggtgggtcagcctcgattttctcaggaactaggagtcaagatggtgggagagctgtggagtggccacggtggtgggtgtgttagggaatctacatgagacgaataaaaggattataaggcagttagtgaagcgccagtgaaattaagaaatataacatgttggtgaagccagtcagcagcctcaggagaaaccaagcctgctgacaccttggtcttagacttctggcctccagaaatgtgaaaaaataaatctctgtggtttaatgcaccccatctgtgataccgtcttatggcagcccaagctgactaataccctcaccggtccttcattctcaactcacctctatccaaaaatcttttctgtgtaggaagttaagaaagaaaaggtagagctcttcctatttttacctgaacaattcagccccaaaaccattcaattacatggagcagaataagacaggtttcgtgcaggacttgagggggtgcagggtgggatgcaggctgtcagctcaagtggatgaggagggcccccgtctcactgtgcagagggtgacaggagagcaagtgggtaaatctattaaggctatgggaagtcaggtttccactgtctgagaaggaacttacacatctatgtgtactgggtaatgatttaaatagaatttcttatgaggggtgagcccactgggcttccagactcttcacaatgtgcctccacccacactactctccaacctcatctccgcccctgagctctggtcatgctgccttctttgagctccgctcctttcagtctcctggctttagcacatgctgttccctctgcctggaacactctccccatcctttaagttagccacccctattccacctacagattcagcttaaatgtcactttctgtaagaagccttccctaacttcccaatccaaattagattctcccagtgattctctctctcaaattatcccatcggtaactgtatatttgtgttcatttgtttaatgtccacctcccccactagaccaagagcccagcaggggcaggcccagggctagccttgctcactctggcttccctgagcccagcagagtgtcctgtcctttggagactctctagatactgctgctgaaagagaggatcacacaaaggcagcagaatggaatgagagcaaagccacttcctccccccaaacctgggccatcctggaaaacatgcatttgattgtgacagatgagaggacaggggattcagtccattgctggttcctggggactttctaaactcactaaagccaggggcctctctagtcaaaaaataagcacctggcatgtaagcaataaagcaatcgaggaaaggtgaacttatttgtgagaccttggaaagaacaacagtaagaagggaatacatcctctacctgctcaggatctgggaaattctaaaattgtatcacatacaggaatagtagaaaacacgggagctaagctggtgcctgtgagagacctgctttgaggactttaactcagagtattctggcttcagagccattgtcagcacttaacctccagggctctattagcacagggacattatcaatatttctcacttctgaggagcacccgtctccttgcccaggagaaaacaaatttaaaaactacatgtgagcgaggtatctgtgtagtttatgcatttcaggtttcttattaaagccaaggtgataaatgcaaaagggtacattcaaaagggtgtgaaaccgtgacaatacccacagggaagaaaaaatgaattttcatgggaaagcagacatgaataaacaaaaccatgaaaagcatggtcaaaaagctccttgggactgactacctcactccaggtagacagtcccaaccttagagaagaaaatcatttctgggaaggggattaagtatagaatgtactgacattcagctccaggcttgactttcagcccagtctgctattcagctttggccctggaacactgaataggcaaatgcctacttcagcatcatcacaggcatccctggacctgtgcgtggtctgtggtcctgggcatgtgtgtgagtctgtcccatttgatcagcatcatgacctcagacacacaaacaagccctgccatctagatttactgctaacagctaaccatgcacttcagctaacagtgaaggttacttcctgtattaaagtgtcagacttttaaattttgactattaatatgttaaatattgagactgtgataatgatttaaaattctgataaattttctaatttattcttatatcctcgcttattctatgatggtgatgtttgccttcagccttatattgatatgttgaattatatactcagccattcagccaaaatgtatagtatctccaatattaattagcatcctttaaaacactcaatttcataggcaacaatgataaaaacgggtaattgtgaaattcctgaaactaacccagagccctgatatattctatttccacaaggatccgagcccaggaggaacactttttttttcccacccatacttgacctaccagctatgaatcaggggatttcactcctttaatatcatctaccaccactctcaaaaaacaactgcttcctcccagactataacctcccattttccctcatatctcagtgtgaataaaagtctttcttcagctcatgagctaaggaaaaacaaattttaaaaaaggaatgaaagagaccaagggctctatcctgatggtaagtgaaaagggaatgtcaaataatcaaaggttcatgtgagaaacagaggctgtgtgtccccagagcccaggcagtggacagtgactcagcccgatcgggtgagtcatcgggggtacaaccacaacaacaaagcccctccaaaagcaatcacccacaccctcaccattatgaagtcttgtcccctctggggaggctaagcttgaaccagcttgtgcctaggggcagcgaactgccaaggataccattacatttaagagagctcgttctcccaagctatttaaataaatggcgtcatttgctaatctctagctgtatctcatgacaagaggaataattcattttattgaggtcagagcattgggttaatgcagagatttggtttagcagttaagggaaagactatactagtaagctgatatttttcctcctttccttccccag

SEQ ID NO: 735277 - DNA, 71592 bp, Homo sapiens
cggcgaggtcggtcattctgcctgtccggtagcaccacgaaacacctgccactgacacctccccaccagcccccgagggttcgcgcaggcatcccgagccgcgccccctggtccgccgcagccagattccctcccgggcgggttacgcccctaggcgcaaaacggaaccactccgtatgaagaagacaaagtataaccagtcacaccaaagagaggcagcattatttagacagccggctactcccccagagactccacccagtcccctgggcccggcgtccagcgcgcagacggtgcccggctccaggagttccagctccctccacgtgtcctgtcttcccagcagcctcctctgccgcctcgggaggaaaatctcctgacaactcgcggtctgcggactacgactcccaggaggcgccgcgccgcggctctccccgcccccccccgcccccccccccctccccgggacgcgcaggcgccttgggctccgtcaacaagccgggctggcgtcgcctggatgcggtttcttccgggatttgtagtttttctggagctacccgggccgtctgttagagggacaagaactacaagtctcggctgccccagcgctgcgagcctggtcacgtggcgggggccgaccgggcgtgcgtgccgccgttgatccggtgctgcagtgaggagcgtggttcttgcccgtgttgtgtgtgtgtgtgagtgagagagcgagtgagtgagtgagtgagtgtgtgtgtgggggggactcggcttgttgttgtcggtgacttccccctccccttcaccccttcccctccccgccgccgctgcagtggccgctccctgggccgtaggaaatgagcgataacgatgacatcgaggtggagagcgacgctgacaaacgggctcatcataatgcactggaacgaaaacgtagggaccacatcaaagacagctttcacagtttgcgggactcagtcccatcactccaaggagagaaggcatcccgggcccaaatcctagacaaagccacagaatatatccagtatatgcgaaggaaaaaccacacacaccagcaagatattgacgacctcaagcggcagaatgctcttctggagcagcaaggggaaagcgagagctgatcaagttctttgttcctggggaattcacttctcttcctccctcatggaagatgcaagtaaaaggaaatgcaagtaatccgtgcactggagaaggcgaggtcaagtgcccaactgcagaccaactacccctcctcagacaacagcctctacaccaacgccaagggcagcaccatctctgccttcgatgggggctcggactccagctcggagtctgagcctgaagagccccaaagcaggaagaagctccggatggaggccagctaagccactcggggcaggccagcaataaaaactgtctgtctccatcgtctcatcctcctttcagttcgttggtagagccctcagaaccatttaagagactctttatttttctctttctcccttttttttttaaatttttatttttacgtagaagctcttggacaacagctctcgttctccttccccatttccactgtatattttttaatgtattcccttcagggattccctgtccccaacaggaatttttaaaccaaaacaccccaacttggcagctttttctgtggaggacagacggccggccggacctctgagcacatagtgtcctgcccaccctaccagctcctccagccctgccgggcacatgcccgggggacgcctgccctgcccaggtggcctcctggcccgccctcacctctgatagactttgtgaatctgaactgctctactttgagaagatgaccggtttggagtaatcagaatgaaccctcctcctttttaagggttttttttttttcctttttctaaaaagctatgtatcgctcctattgaaagaccagatccttagagaagtttgtggtataaaaagaaagtggggacagattcgcagcacagagtcgctggcatgtttcactcctgcttctctcagccagctgtttaagcctgcggcgccagcctcacggagggccgtgtgacactctcgtggtatgtatgggagatggcagcagtgaagcagcagccaccagggagtggccatttggggttgggacagggagggtgttttgggtggcatagaggttttgtattgagggccagtgatgatgttttgatatttatttcctgctacttaaatttgaatctgagtgaattgtacctatttctgatgatgtcggtcttgcaaagcgacagattcataaagtaatgatgaaatctttctttcttcccgtgtgtatttctaagaaatagagccaactgattttgtatgtaaataccaagagcaatttacctggtactaaacccgcaccccagtgcggacccttcccagccctcatcccacttcctttcctactgtcctggaacctgtctccattgtgtgatccagccctggttctggctgtggtcagcagatcccagtgaagggttttgtgtgtttaggcctcatttctttgtctttttcctactccgttcctggcatttgctgatttctagtgtatactctgtagtctcagttcgtgtttgattccattccatggaaataaaaagtatgttgtacatactgccgaagaattgtcttgcaagttaaggcttccccctttactataagactataaataaaaacttattttatcctttcttggtggtggtgtcttcttacccttgttaaggccaaggtggttgatgagagacccctctggaagctgttagggcctcaatgtaagtctgagtgagaagtggaggtggcttacccggtcttgcagaaccaggagcagccataagccagagttgcttcccctttctcagctcagcctgagagagtaaatgggtggtgatggctttgttcattggatgaggcttttgaggttcaacagggatgtagccttagctgtggcaacatttctagatctagtttctgctaagcaagtgacctttgggggaattggtagcccagagctgtggttcaggttctcctggtaatgagtgcccagttcagaggtggctgttctccaggacctttcagtttctagatagttccagtttattaagaggaggcagcagagctgccaaggactggaagtcaagaaggctccaactgcaccgagttagctctactcagactgggacccaacaccagcctgaacttgtttgaccttggaagaaaaaggaattatggccagaacgcagctcagtgttggttttcctgtctggctgacaggaaatactgctgttcctagacccagagaggaagtcaagtcaaatcagttcttggatttgtcaccatctttagagtggtggagagcactgtggctcctatcaattgtatgtcaaatccgtaatatctttttttgtttaatgggagctggggcagatgggtcttgtcaatttgaaacatgatcaagcctccaaaggccatgattacattaaggaaaagaaaaatgctgggaaagcaagatcccatttataaaggcacttcttttcaagatagaggaaagaaactgcagtaaggaagaaatggaaatgagaatcagcttattgcctaaagccctcaaggttaacatgctttcctctttttcattgcccttaactatatctctttgtatatctgggcttaagtatacagttggtttgcttagtattggtgttagaagtgagctgtgggtgaagccatgttgatgcagagatggaaggcatgtgaagctggcacccagtagggagatagcaaacaggaaggggcagtcaagccagcatgaggacaggtggtgtccctgagagccagtccctggctccagtgtattggctggacaaaggattgagtttaggcttctctagatttcagtaaaccagttcagacaaggggcacagtggctaggtggctggttcacctaggaaaatccaaaccacctgattgacatggtgagcggactttggcacagggtggaggtaccactggaagcagcttcctgggcaggaacacagggcaggggagctccgcctggaaactgctcagctgaaaaggccaagtcaaagtcacagccaagcaagccccttctggtatgtgtgtctaggaagcgagtgtgagtattccctcaggataccaaagtcggaccatagcttactctctcacagtaatggtaatctctggtttattttttatattactctggacactcacttacacaaaaccagataagctgtagatttgcttggtcactgtggcaggtggcttcactgaggagtctgttaagcgtgctatttccctacctttacagttgccccaagtgcaagggtatttaaaatggcccagtttttaaagttcttgatacgctaaccccattgtaaaacatcaacaacttcttaggtaaagaatctaagctcacagagctgtcatcttagctgagacaggtttaaaaaacaagactgagtagacaataggagccagagccctgaactgggactgaagtaagcagaattctgtttctgatagtatcatgtgtgttttatgcttggcctctgaaagcagactggctgggttcacagtcctgtctctgccactcggtggctgtgttacttctcccagcctcagcatctttatctataaaatgaggataataatagcactagcctcatgagatggttatgaggcttaaatgagataatgcttataatgtgcttgacctcaggaccaagcaagcactgaggtgcctctgctgtcattatctacacaaagcatgtaaccagggctgactcagcaaggtggaaaaagccagctcccagacacctttcctaaagtgagtaagggttgacttcttggtatatcacaaatgcttcccactcctcagagatgtgccccatccttaccaggcacagtgactaaagagagcaaggtgacaccaggactggactgacaaactcttcgagactaaagcagcccctgtgggtacattaattagatctggtgtcaactcgagtgaggctctgcccattccctcccaccacgattcagtggcatctctcaggtttggacacttttggaggcccaggcagaactgctcagaagccccatgtggtgttactcaaagtgggatccttggatcatgcccagggctgcttgttaaaaggattcctgggctctaacccctctaatctaaagtgtgccgtggctcaccagtcagtttaacaagctctttcaggtggtcctcaagtcactcaggtttgactcccaacagtaatataacccggggaaccaaaaggacgctgttggggaagttaggcacagctgagctgaattagcgaagtggttctgaggtcaggatgaaggtgggggaggcgggcttgttaaatagttcaacccttagagctgccttgatgagtctacgtgctcccagcatgcctccaatgctctagggggctggctgagctacccagtttttaaacttgagaaggaagaaagctgagggctgcctacactagcccctttagaagccccaagcaggggtaatgacatggggcagcactcatttctgtagcatgcctaggctggcctctggtccccaggcaggttttataatccagccagagcaagggtctctctcaggcctggtcaccaggatgcattctcaaaagcctctgggaacatgaaactagagcattcctttcttcaaaactgtttctctagcctgaagaggaaacccaggtaggaaaaaagagtttgtcaatgtctacactgctagatagcgaatagagaatttccttcagtgtctagggtttactagggcagcggctaactcatacatccccaaagttcccttgggaagggaataaaaaatagtttctagttaacttcctcagggagaaaaccaatttggctaagccaggcttaactataggtaggactgggtgactgcaccaggcaggcctgtgcatgggttttggaggctctcctggcaaacccttatcaccctgctggtaagtgttgtccttgcttggtgtttcattggggtcggtgttgggaaggagcccagggagcttcagaatgactgccagagcgggtagggctaggggctctgagcccgcctgtctggactgccatgccagctacaacccttacctttggggtgacattgctctggcttcctgtgccattatgtgaggacaataatagcaccaagtgccattgtgaggcttaaaggagtgtgagaagcccatgaattgttcctggcatttaatactcaataaatactgtcaaatcttagatgtgtctgccatcagatgtcctgggtagtgcagccattttttagttttgttaaaatgtggaatgaagctgggcgcagaggctcacacctgtaatatcagcactttgggaagccaaggtgggcggatcacttgaggtcaggagtttgagaccagcctggtcaatgtggtgaaaccccgtctctactaaaaatacaaaaaaattagccgagcatagtgttgcatgcctgtggtcccagctactcgggagactgaggcaggagaatcgcttgaacccaggaggcagaggttgcagtgagccaagatcacgccactgcactccagcctgggtgacacagcaagactccttctcagaaaaaaaaaaatgtggagtgaataaactctccttttcgctgatgtaataagagtttagtatattaaaatccttgaaaggggaggtaaatgtatgttgaatgctaaaaggcagtaaaaatttgcatgttttctgaaagaacttgagcaagaccacaaatctgttaccttttggagaaaaaaaaggagttgaggaatgaaatatacccttgcaggctggctcagagccattaaccattaacatactggcgactttgccctgttcttcattccagtttcagtttgcatttctgcagtgccgggtggcaggcactgtgccaggtgcagatactgcaagtgcatctggtgtctgccccgtgtttcttgcccagggctggttatgacagtggtcagccatcgtttttcagccttccccttcagggaccccttgagcagaatctgcctggtgggtgaggtggagcagatgagcctcatgactgggccgaggggcccgcatgctctagctcactctggatcccatgtgcacgctcgcacacacaacacacccagcaggatgggcgtgtctagaagaatgccgagcaggtggccttggacaattcacaaccagccgagcaggtcccctcctgcgccctgtgctagatgccagctgccccagcaggcctgttgtgactgccaggccccatttaggattgttttcctttgctgtcctttgcagggtggggctcttgtatacccacagcctgctctgggcaaaattatgtagcacggtctctgctattaattttttccagtaaattaaaggctagagaagaagaagaagaaaaatcaaggatccaatattaagaaatctgagcccaaaccttctactccagtgctgaacatggtgaaggattaagcctcctatcaagaaaaacaagcctgacagcctgtagactgatagagggaggtgtgccttctctccagaaagcctacttctgcaggaacccaggagtatggaatgagccatgcaaagtctgattcaaaaaataacccaatgggcatgcacccccagtcactcatccggaatccggctggcagcctggcagcccggcagcccatggctcccatgcacagtgcttgagagcttcattgtttcctgtctgctggtgccatcaacagctctggggtggcaggggcagatcttgggctaaaggacagtggccaacagctttgggccaaaaggccacaacaagaccagccagctaagaggaggaatgtcatgtccacagcgaatacctactgcagcaaggctgtaggagactttggagaggaaggaccctgtttccaacaacttgaccatgtttcccatccagggacctctgtgcagagagtggtggtgagcaagtatttccaactgggagcccccacagagtcagtggctggtctgtgcacttgttactggactcctagcactgtgcttggcttgtggtgggtactctacaaatgctgcatgcatatgtgcgtgtgccagtggactccagccttgtgatgtaccttcatctctgtgcccttgatagggcggttccagggttgcctctgcgtgagttcaaccctcgggtatttgagcagcacgtagcctcagcccagcattgtgctggctactggggcaatctaggcagcttataaaggctgggccttgccttgaagaagcttagagatgaggttaggcatttagcacaaatgcacgtctgggctctgaatgccagaggagttcaggagatgggccctcagtgagagcggtttggcactatgggaggggcagggccaccaggtcatcgcttctcaagctcttgatgggctctccttctgtcctgcccacaagagcccagccttgggctccccatctagctgtccagacaggctgggggtggggggctgttggtgaagggagggtgggccagagccatctgctctgcacaggttgggtcacgattctattccaccactttcactggtcccttggtatccaggcacatggcagccactgctccagagagtgaggagaggggctggggggatggagcctcgcaaggagcatggacacctagcacttacgtcatcaccatcggcatctgccttacctggctacctctctgttcagcacacctgggagcagcacccttgcagcccttctcccttgacagagctgtgacattgaaccctgccctggtctggtagctgagggcccagcctccccttgcctcctttgtcccatcagcccaggccatcatgggtacagaaggtagcaatgaagtctcacactcggggtaaccaacatgcaatacttatggaaagactgtgtgatcaagggttgagagaatagtatactgaacccaaatgtacccattacatagtgtgaacaattatcaacatgcagtactcgttgaaagaaaagggatgataaaaatgcactattattgaaagtaagaaagtgtggggtctgttaaacagacaaaggagcccactgagaaagctcccaaaggccaaaactgcaacaatttgagcaacaaaataaataatgtagcattggaacataatatgaagtataaaataaacgagtccatagtgaaagaaatggttgaataaattgagaataaacatctcccatgtagaattccgggtagtttatgcaggtgctctgccttcaaacatatggagcataactccccacttctgtttgttgttttgagacagagtctcacgctgtcgcccaggttggagtgcagtggcacaatctcagctcactgcaacctctgcctcccaggttcaagcgattctcctgcctcagcttctcgagtagctgagattacaggtgtatgccaccacaccaggctaatttttgtgtttttagttgctatggggtttcatcatgttggccaggctggtctcgaactcctgacctcaagtgatccacctgcctcagcctgccaaagtgctgggattacaggcgtgagccacctccccacttcttaagcgtggactgcatatagtagctaccttctaaaggacacattcaagaaagggacaaaaagtaaccttatggaggaacctgacaaactacctcagccaggcgatgaagggtaacatcagcataaacatgatgaagcaggttgatagtatgtatccttgatgtgtgatgagaatggtactttacctctgtggccttcctccaaaaaactgttacgcatggtctgggcacggtggctcatgcctgtaatcatagcactttgggaggccaagggaggatgattgcttaagtctagcagttcaagaccagcctgggcaacatagcaagagcctgcctctaccaaaaaaaaaaaaaaaaaaatgtaattagctgcacatggtggtgtgtgcctgtggtcccacctactcaggaagctgaccaggaggattgcttgagcccaggaggttgaggctgcagtgagccatgatccactgtactctagcctgggcgacagagcaagacactgtctcttggaaaaaaaaaaaaaaacataaacccatctagtcataaggataacatcaaacaaatcccacctgagggatgttctacaaaatacctggccatacttttcaaaactgtcaaagtcatcaaaaacaaggaaagaatgagaaaccgtcaaaaccaagaggagtctaaggagacatgagacatgacagctcagtgtaatgtagtgtcctgggtgggatcttgggacagaaaaaggccattaggtaaaaactaggggaattcaaataaggtatggactttctttagtaatgtatcaaaattggttcattcattatggcaaatgccacctattagtggaagatgttaatagggaaaactgactaatgggtctgtgggaactctgtgtactatctttgcaatttttctgtcaatctcaaactattccaaaatgtttattttttaaaatgctttttttttttttttaagacagggtcttgctgtgtcatccaggctggagtacagtggcataatcatggcttactgcagcctttacttctcaggctcaagtgaccccccatcttagcctcccaagtagctgtgagcacaggtgtgtgccaccgcatccgactaatttttttttttttttttaatttttgtagagacagagtgtggctatgtcgctcaggctggtctcaaactcctgagttcaagtgatcttccagccttggcctcccaaagtgttgggattacagtcatgagccatcacacccgaactaaaaaatacattgtttttttttttttttttgagatggaatttcactcttgttgccaaggctggagtgcaagggtgcaatctcagctcaccacaacctctgcctcctgggttcaagcgattctcctacctaagcctctaagcctcccgagtagctaggattacaggtatgcaccaccatgcgcggctaattttgtatttttagtagagacggggtttctccatgttggtcaggctggtcatgaactcccaaccttaggtgatctgcctgtcttggcctcccaaagtgttgggattacaggcgtgagccaccacacccggccatgcatttttcttattgttattttgtaagcgctgtatttcctcagggggagcagagggcaagggaaagtttccattaagctgggctaatgatgagcgccctgtccctgccctgcctggttttgttcttggatgtgccagagaagcgggagggaggaacgtgaggccacctggccccagttccccagctggtggaaaacagaggcaaggagggttactgcaggaaagtgtgaggatgtgcaggaacctgttagatgtgcctgggccaggttggagaaagctggctgctgtcaggtcagctcctgggaagacggactcatcacggcctcactgagccacacggcatcacactgcactggtgtggccacacacttggtggcaagtggagacctcattagaagggtgaggggcctgccctatttgctgtcaccatccctgacctagtgacagatggcagctggtattcagggcctcagccatccagcctagaggtaaaccaagcatgtttcaccagtgccccctattccccgagacctctcaccttccttcagaggcctgcggtggtggaagggcatgggctttggaggcagcagatacgggctcgggctcaggcaccaccacttgacagctgggaaaccttgggtgatttacgtaagctctccaacctgtttctccagttgtaaaaggcaggtaatacgcctgcttcacccaccttacaaggtgagtcaaggatcaaatgagaggcggtagaacaggagggactgtcttaggggttattgtttgggcagatgaggcaagagtggtcagcactttttaagcagcaggtaaagccttggtcttggggctaattggtggtagagttttgtatatagtcacgccacatcatgttttggttaacaacagaatgcatgtacgacagtggtcccgtgagatcataatactgtatttttactgtaccttttccatgtttagattcacaaatacttaccactgtgttccagttgcctacagtatccagtacggtgacaagctgcacaggtttgtagcctaggagcaacaggctaccccatctagcctaggtgtgcggtagggtaggccatctaggtctgtgtaagtgcactccatgatgttcacacaacgacgagatcacctgactgcttttctcagggtgtatcctcgtcattaagtgacatgactgtattaggttgctttcagttgcaggtaatagtaagtccaactcacattgtctcatataactgaaaatccagaggccacgtgggcctcgggagccatgtgatcagggccatgtttctcagtctcagagcatatgtgtgtgctggcttctcacgctggtttccttctaggtagaaaaatggttataggaggcccaggccacacattctaccatcccctaataggaaagagctgcttttccccgtcatacagtgtccacgacgtctctctctttagactattttaggtcacatgcttgtgctctgaattgatcactggggcaaggacaaatcatgctgactgacttaagcctgagttactcccaacctgaacaaattactggggcaaagagagataaatgaaaattattggcttagccagtcagggcctgggcctggaggtaggagggcatcaagccctggcaaaccttttggctgccacaggtggggaggagtggcatggatgccaacagtgtccctacaggcttctatcccagtaatcactgtttgagagcaatggccatttgcctctctagcatccatttacccctttggcaacaatcctaatttgcatttggagctttgttccttccccgttcccaaaaactacgtgcttctaatgaagcctcatttccctctcaagggagaggcatgtgaccaagactttggccaattggtgcactgtattctccaagccattggactgcttcttggaaaggcacttggtttgattaaagccagtgaaacacaatgatactcgctggaaggaaggctggggtggaaccaagtgtgcctgtctgctgaacctgaccccaacaggatgtagggtctggagctattggtgctgccattttacaaccccatggagagcctgagattgaggctaatgtagaaagatggagggagggtgaggaacctaataggaccagcctaattcctggactctgcagtttgagtcaacagattgcctcttttgcttcaaaagccagtttgggtcaagttttctaccagttgcaatggtgtcttaaatcatattatactttccttcctattcaaaggcagtaaatgccaccaagcagtgcatgtgggcaactagaatgcttggtccaatccttactatttgtcacttgacactaatattacatgaaaagcatcccagtcatgaaaggtatggaagaatgctcaataataccaagaagggagagcagtgtggaactattgtttactggtattattatctcaggggtgtttcccctgattatccatgaggttctctttatgctccgctccctgtagggtctggcaggcttcccaacttatctggtgttcaaggtgggcctaagggtgaaactggagcccacctggatacagagatctgtattagttttgtgtttattgatgggagaaagtatttggggtcatccaccttgaatgctacataaatgtcttctactcaaggagtcacataataaatctctccaaaggtgcggtggctcacacccgtaatctcagcactttgggaggctgaggcaggaagattgcttgagcccaggagctcgagaccagcttgggcaacgtggtgaaaccccatttctataaaaaatacaaaaattagctagctgtggtggtgtgcacctgtggtcctagctacttgggaggctaaggcaggaagatcttctgagcccaggaggtcgaggctgcagtgagccatgattgtgccactgcactccagcctgggtgcatttgagcaagatcctatctcaaatgagtgaatagacaaatctctaggactcaccttgagggctgtcaggaaaccctctggaaaaggatgtctcatggatatgccagtgtaaactctcctgaaataaccctttctcttctctacccagactaactttacctaccctttggggcccaactcagatccctccttcttggtaaaaagccagttcagactgaagcaatcccttctattaaccacattaattattactgcaattaatctcacaataccttgaggctccgagtgctgagaggattttgccttttgttatagtgatggaaaggatgcatttcaatatgttgccttgcagtgcaaacctttgttaacagggcaaaaatagcacagggggcaggaattacattcctggatgtgcatttggcttatttacatggatttgggtgccctctaaggacaccatcttctctcccctccaagagggtcaggccacaggacatccatgttcttggcctcccatgggagagggtctctcgccagaggaagggaaagccaagtggccacagagttccagcctgtccctgtgacagcccctgcctctggccagacatccacccacccttgctaagtcagcctgctctggggctactaggcccagtccttgctgtctgtcggagacagaccatgaagtgcagtgtgtggagggctgggacatagcataccgaattaccccagggagcttggaaaacatctcttcccactctctgttaggcccacggcttcctctactggaggagacggcatgtgaggatggaactcggtcattcctctgtcaccaccgatgtgaacagtctggaatcctgcacacaggagactgacgatccctgagcaacctttagtagctcctaccattgggcattttcttggtacagatcacaaataagagacatcatagaaaatgttattcttttattatttcaaggaggtaatacatagcccaatatggcaaagcaaaagggaattagaggcagcaaatggccaggtttttctaagcgcctcatgctgcatctctgagctcctgtctgcccgcagcccacagctgcttacatgaaggccaggtcagtagacagatggcccaacttgatactccactgactgagaaagggctcaatgtgcagcacagcagaggcactgccaggacccagcacgctgggcggcaccccacgctgccaccaccagctacagaggctagtgccttagtagcagccagtgtgtctagcacttgattttattcctgtgagcctagagtgggcaggacgtgaataaatcctgagtcataagttaaggtgaaagacttagtagtgttaatactcttggtgagaaaagacaacacagtcttggaggagagtgggcttggagtctggtggaagaaagatagaaacccccagaagggcctcggcctgcaggcactgccttgaggccatcagagggggttttcacggtacatgatagggaggagtgaggcaggtgggcactggagggctgtttcctctggcacagttgaactagagggtcactttccactcataattggtttcctaggtctaagtcaccacacctggggctgaagcaagtcttgcctgtgcaccaagcgtggccttggaccctggagagatgcaaggctcagttctccagtgttgaagtggaaggactcccaactgaaggagatctttctctccccacctccagctcttttcccttacaaatgaccagggtgcaagtcgagaggcagaggcacctcctggtgcaactccaccacagtcttacagagaactcatcttggtgggacccaaagcccagccttggcatgaagcagacttattccacccatcggagggcacccagtctggtgactgaatggtggcgtgcaagtgggagtcagcagtggctctggatgccgtaatactcagatgccattcatctctgtgtgatcgtcctggctggagagctggtgaggagggactgcttcctcctggcatgcactgttcaccaaccacaccacgtgggctgatagatttttggtttgacaggtgtggaaagaatttttaaaaccagccactgtgttctccaaacccagagccattggttttgtttgacaagaaagtaccaagagaaccacagctccactgaggctaaggcttgtgtagcacagaatgcagtatgtattgaaacgtataaaccttgtctgactggggagatgggtgagcaaagagctgccgggacccaggtcctctagtcggttgcaggctctgccgatgtctcatccttaagctcctcaaaacctgggactggcttctgtagaaagtatgtagtggcctggatcaccttgtctggtccaatgttgtacactgggtgagtgggctgctgcaaagagaagaaaaggtgccagttaatcaccccggtggtccttgaaaacataacacatcctttgctccatgaaaggcacttctaagaatttagtataaggaatcagagatacacacaaagcccaaaggttcaaaaatggtgtatttgctaaaactatctagtacatgggacacaggttaatatacagccattataaacacgcatttaaatatttaacgatacaggcaaatacttacaacatattatgtgagaaaacagtatgtacaatactatctcaaactgtttttttttttttttttttttttttgagagagtcttgctctgttgcccaggctggagtgcattgacacgatcttagctcactgcaacctctgcctcctgtgttcaagcaattctcctgcctcagcctcctgagtagctgggattacaggtgtgagccaccacgcctgggtaatttttgtattttttttttttttttttgagacggagtctctcgctctgtcgcccaggctggagtgcagtggcgggatctcggctcactgcaagctccgcctcccgggttcacgccattctcctgcctcagcctcccaagtagctgggactacaggcgcccgccactacgcccggctaattttttgtatttttagtagagacggggtttcaccgttttagccgggatggtctcgatctcctgacctcgtgatccgcccgcctcggcctcccaaagtgctgggattatttttgtatttttagtagagacagggtttcaccatgttggtccggctggtctcgaactcctgacctcaggtgatccacccgcctcggcctcccaaagtgctggggttacaggtgtgagccaccacacctggtctcaaactttttaaaaagtgtatttgtacctgtgatgtatataaatagcaaaaattgtacccataccaaaatattaatagtgatatgattgtttttcattttcttttttatattttatgtatcccaattattaaaacaataaacatgtatttacatttataatcaagaaaaagggggccggacgcggtggctcatgcctgtaatcccagcattttgggaggccgaggtggatggatcacccgaggtcaggagttcaagaccagcctggccaagatggtgaaaccccgtctctacaaaaatacaaaaattagccgagcatgatggtgagtgtctgtaatcccagctagttgggaggctgaagcaggagaattgcttgaacccgggaggcggaggttgcagtgagccaagattgtgccactgcactctaacctgggcaacagcgagactctgtctcaaaaaaaaaaaaaaaagaaaaaaggaccacaaccctaatatgtagtaaggctgtcagatcatatttaaatatataaacaaaatttaaatatgaaatttaaattaaatagatgttattctagtacatcacagaaacccaaaagaaactttagatttgacacggcataatcctaggccaatattcaggattctcccactgtgggataatgaagaaggggacacaactgcaggagagattttaaaaattttgagagaatactaggagcaacctcatgctgaaacatacaaaaattcagataaaacaataatttttaaaaaccaggaaaactgccaaaattgacttaaggaatttttaaaggcctacatgaagaaattagtaacaacaattgcttattctgccacccccacataccttaaaagatactagacctagatggtttctcaggcaagtagtatcaaacctacaaagaaacagataatctctgatctatacaaaccttttaaggactgaaaaaaaaaaaggggctagtgcgggggccaggtacaatggctcacacctataatcccagcactttgggtggctgaggtaggatagcttgaggccaagagttcaagaccagactaggcaacatagcaaaaccctgtctctacaaaaaatttaaaaattagcaggttctggtggtgtgcacctgtagtccctgctacttgggaggctaaggcaggaggatagcttgagcccaggagttccaggctgcagtgagctatgatcacagcactgtactccagcatgagtgacagagtgagatcatgtctctgaaaaagaaaagaaaaagaaaaaaggtaagaggtgcaggaagctacccatttaattttatgaggctatgatattatcctgaaacactggaaaaggacaatacaataaaattttagatcaatctttcttatgaatgtacatgcaaaaaaatcctaaataaaagtactaggcaaacatactggcaaactgaatccagcagtatactgaacaaaacacacagacacagacacactgcctctactatgaccaagaagggcttatcctgggaatataaggcttaacatcagaatattaatgaaacatatcatattaaagaagaaaaatcagatgcggagaaagcattcaataaaatttaacactaccttatgactgaaactaacaaaaacaacctagcaaatcaggaataaaagtgaatatcactaacttgatataatgtaactatcacaaccttacagtaaacatcatgcttaatgatcaggttataaaaagccttcccattataatcaggagcaagagacgaatgccctctactacctttagtcagcactatgtggggatcttacccaacaatacaaggcaagaaaaataaaatggaaactaacttagacaaacttaaaactattaaagagttcaacaaggtggctggacacaagatttataaatattattagcatttctatacactagtaacaaacagttacaaaactgaaaataagaaaagattccagtcacaagagacatgaaaactgtaaattagacataactctaaccgaaaaaaaaaaaatgctagtcctttatggaaaaaattataaaaaaaacactgaaagacattaaagaaaagaaaaattatgttcataaatggaagcctaaatattgaaaagaagtcagttctctttgtactcctgggaagacaggaagaaaaaaaaaaaagttggttctctcctattaatctaaaatgtagtgcaattccaataaaaatcccattagaacttgacaggctgatcctacaattcacaggaaaaagcaaaaggcaaagaatagccaaggcaattttgaagaaaaacaacaaggcagacaggacttgcctacctgttttcagacttgcttaaaagagtgcagataggcaaacagaccaaaggaacaaaataagagagtccagaaacagggccccttcatgtatggaaacttgagggtgtggtacacatgagatacacatcagcaggaaaggttgtagacttcagtaaatggtgctggtcaattggttatccatatggaaaaaagataacattatatccaagcctcaccatacacagaaaccaaatccaagagaattaaaaatctagattaaaaaagcaagctttagactatttagaagaagttacacttaatgacttgctgcattgccttgttcattcccttcatagcacgcatcacaatttgtgatgtatttgtttaatgtgtgcctccttttgtctgcttccctcaaaaaatggtagagattccttaagttaatcctcacctaccctcccccaaaaacaaacccctgaatgacagaaaagacaaatagatttgaccacttcaaaattaaaatattaaaatatttttgtggggaaggggtgctgggggcagggtctcactctatctcccagactggagcaaacagagctcactgcagccttgactacctgggctcaagcgattctcccacctcagcctcccaaagtgctaggtttacaggtgcgaaccaccatatctggcctaaaatcttctatttaacaaaaaaacaccaaaaacaaaatgctatggtttggatgtggtttatttgtccccacaaaaattaatgttgaaatctgatccccaagatggctatgttgagaggtggggtttgtggaatgtgtttgggtttgaggggtggatccctcaggagtgccttggtgctgttcttgcagtagtgcgtgagctctcactcttgctctggggagtctggattagtccttgagggaatggattagttcctgcaagggtaggctgttataaagccaggatgctctcaggctctcctctgtttgcatgggttggcttcccctttgatttccacatgttataatgcagcacaacccttgccagaagccagagccatgcccttgaatttctcagtctatagaaccatgagctaaataaacctcttgtctttatacattacctagtctcaggtattctcttatagcaatgcaaatcagagtcacaaaatgaaaagacaagtcacaagctggaagatattcactacacacatgtaactgatagaagattagtattaaaaatatacagagaactacaaatacttaagggaaaacaactgaagttacccatcagtaagaaaatgagcacagaatatgaactggcagacaattcgcagaagacaacacaaatggccaacaaacatttgaaaatattctcaacctcaccagtaatcaggaaaacacaaaatcaaacaaataccacttcacacccatcaaattggcaaaaaggaaaaggtctgactatggatcgattcatcttacacaaccacactggggagcagttacagaggtatctatcaaagatgacaatatgtgtccccttcaacccagcaggtcccctcctggagacattctaacatgtgaacccaatgagacagataccacaacgttcactgcaacactgtaatagcaaaaaattgataactagcaggagaacagagaaacacactggggtacatttatataagggagtatcatataatagttaaaatgaataaactggagcaacacatgtgaacacagataaacctcaaaaatacaatggcaagtggaaaaagcaatgcagaatgactggtacagtaggtaccattacaaaaagtttgaaaacatgcaagcaactgttatattgcttataaaaaactatatattgcttatagatacatatgtatgtagcaatagcacaaaaacatccacaggcatgatacatgtcaaatttgggacagggttacctctggagaaggagggaggaaaaaaaactggaagagggctacataagaggcaaatagggggaaataattagggcctggaaaagctgggtggtggtttttctgattaagaatgaggttgagcatcttttcaactatctattggccatttgtgtttcttccatttgaaatgtttcccaattaaaagaaacaaagatggggccaggcgtggtggctcacacatgtaatcctggcaccttgggaggctgaggcaggcatatcacttgaggccaggagtttgagaccagcctggccaacatggggaaaccctgtctctactaaaaatacaaaaattagctgggtgtggtggtgcatgcctgtaatcccagctactcaggaggctgaggcacgagaattgcttgaacctgggaggtggaggttgcagtgagccaatatcatgccactgtactccagcctgggtgacagagtgagactttgtctcacaaaaaaaaattaaaaattaaaaaaaaaatttttttaaacaaaaaaggaaggttacaatgacacagatgagaaaataaggcagtgacctagatggtagcagcaggccatgtttacactggtggaagtagggcttagtaagagtagggaactgcacacaaaaattcatgacagtctgcatgggccctgtgatttgatcactggggacagtctccattggattcatgtccaggctcacgtctaggctcagagcacctccaggttgtcctcagctggctgcagcagtgagcatcctgccctcatagggctattgttttttcaggaaagcagacaaacacacattaaacaacacaccaccaactgagtaaagtactacaaagaatatgaacaaggcactgaggcagagcattctggggatctcattctctgaagagatggcatctaagctgagcctctgggagagacgcggcaggctgtacagccagtgccgcatggctgcagtgctatcacgagcctgctgggactcacagcctcagagtgacacgtaactgtggcctcctctaggggaagctaataccagcagtgggctaggtcctcagccctgggataaaggcacaacagctctttgacagatcagaccgcccatctggaaccctgagcttgcccagaggtgcgtctcctctgtggtcacatcctcactaacggctgcacagctcgaagggcagagggaccacaagcttccgcctgtccacacaggaaatgcagagccagttctgcttacttggaaagccttctgtccgcgaggtccctgtggagaaggggtgtgaagccctgcacccgtcttaccagagcgttttcgggcacacccaggaccacatcatgcaacatggctccgctgccgaagtgctgggctatggacaggccgctcaggcagtagcaggtgtggtagaaatcacgcgacctgtaaggacaggcagctctgagcaggcgctcctctgctccgcacacatctacaaatgtagccacaccaattcagagaccactggtgcaatcacacgtccccccccatcctccatgtggctagaggaggcatggttttcccagcagtgttatttaaagccccactggctgagcacagtggctcacacccataatcccagcaagcaggaggctgaggcaagagaacggtttgaggccaggagttcaaaaccaacttgggcaacatgggagaccccgtctctacaaaaaattaaaaattagctaggtgtggtggccgatgcctgtaattccagttacttgggaggctgaagcaggaggatcactcgagcccaagaggtgaaggctgcagtgagtcatgattgtgacactgcactccagcctgggtgacagagtgagaccctgtctcaaaaaagtaaaatacaataaaataaaagccccatcctccagccctgcccagcagtgggaactgtattttttttcttttctttctttttttaccttaaactattaaaggaaactgtaattttaaagtcagtctctccagctgtcttctggaaagggctctccaggggcagtactaatgataaattgatacacttctctagaaaaatacctaaatatctagaaatgggccacatccttcctgatacattgtgggaccaggccttcccctggatgccaagagcagcaggacgtgtgctgggatgggggaagacagagggtgggtaacaaaggtgagaggacttattttatttccctttttctaacacataagccatctcagatttgagcttaatcatttaatccactctataatagttgtcatgattacagtctctgtttacaacactgaggggttttaaaatcctgtatcctattctatttagatcagtttttttttgttttttttaaaaaaaagaagagttatctacccagcaatctgtttccctgtctgggggagggggttgcatgcaggctgggggacaagacgggcagctggaggtgccaagatcaatggcctcaaggggtgctcccaactgggtgctttttcccatacaacctagcgctatgcaggtgctgaaggtgacacctctgctcttgagatctggctctgagtaggcctgaggtgcacgcccctctgctctctcctcccctctcccttccctccccagagagaaaacactcacttgccaggtttatccagaagcccccccgcagggcactggcagcacatcaggatgtactcctgcagggcctgctgatggaacatccagtggctcatgctaagggcagggtcacctgttgaagggcaaagggtcagtaagggcccggcagatccagccaagtatcaatgacctaattccactttctcacctgggggaatagtcaaggtttcctgctccccttcctcttccattcattcttggtacaactgctatcttccccatgtcctacgcacagcatgtcccttctcctgaactttgacatgtgtcaaagagcagcaattcaaagtggcactttcactttcttgaaatgcaccctgttaacgtggatggtgatcctcaaccacatctctggcaggcagtgaaccagcctagctgtttagcttaccttcccagactgacctcggtagctgctcccaacttggtccataactctaccctggacttcaagagacattccctctagcatatctctataacttgttaaccagactgattagctcagagaactcttaatgggtaataaagtctgtttcttctacttttctaagcctaaatttaattgatctccaaagggaattctctaacttgtctctcagctcaaagaatttacctaagaaacattactagtaactgccctcctgcatcatatgataccctagcaaaaactgggtattctggtaatactactaaggtactgacaagcaactggacttcttcactctgaagtccaatcactatggtcaaagaattctgtgggccacacagttatcaagtgggaaggagggacaaatcacggacaggtgtgcagaaacatctgcatagaaatcgattaaaaatatatatacatataggatgtacactaagtccttggtcaattttatattttgatacctgggctaaaagatgcctgacaataaatcatttttaaaaaaaagatgcccaacaattggtaaatggcacctgaaagctaattgttctttcttccagtctttttggttctatgcgtttttctacctagttattataactgtgtagcttatgtttttcacttataccactataggcataaattttctattctattacataatctgcatagccatcactgtgaatagccatatagtatttcattaagtggacatataaggtaactgtatcataaaaagaactgagctaaaaatcttatatatatgtcagtatataaattcctatggtgggccaggcacgatggcttatgcctgtaatcccagcactttgggaggctgaggggggttgatcacgaggtcaggagatcgagaccatcccggctaacacggtgaaaccctgtctctactaaaaatacaaaaaaattagccggacatggtggtgggcgcctgtagtcccagctactcaggaggctgaggcaggagaatggcgtgaacccaggaggcggagtttgcagtgagctgagatcacaccactgcactccagcctgggcgacacagcgagactccatctcaaaaaaaaaaaaaaattcctatggtgaaaattataaaagtttatggtatcaataacctttcccattttggagaaaatagcaaaaaagaaaaacgggggaaaagatttctaaaaataaaaatgaaaagtttatgatacagtctataaagagattgaagcaaaatattaaactgttgaatatttcctttttttttttcttttttgagacagagtctcactctgttgcccaggttggagggcaatggcacgatctcggctcactgcaacctccgcctcccgggttcaagcgattgtcctgcctcagcctcccgagtagctgggattacaggcatgcaccaccatgcctggctaattcttgtatttttagtagagacatggtttcactatgttggtcaggctgctctctaactcctgacctcaggtgacccaccctcttttggcctcccaaagtactgggattacaggcatgggccaccgcacccagcctaaattgttgaatatttcaaacagacaataagaatttattaaatttctttaaaaagagacacagaggaaaagggtttccaaggttgagcactaggtgagggacagtggccaggtgacatttagaggccagggacaaaagcttctcgtcttcaaccctgagtcgcactcagccctgaaacacccattaagagacacaggaaactaagtccgacctaaggagaagcatccaatctcccatctcaggctggctgcaggccacatgctttgatacacttgcactattttaattcccttcctttcttttcctcacctgtaagcacagtgaactttgttgtagaagatacatacatatatgatgggacttcactctatcttcttttacttatttccaaggttgtttccagttccttgccattatgaggaatgctggactaaatctttgtcaatattatgtatgcttaagattattttcttcaaatagactgaccacggtggaattattcggttaaagggaataaacattgttaaggcttttaatagatactgataaactgctttaagaatttatagactactctcagcacaatccctgtggagtagccctgctctgcaggagctgtcaaaaataaatatataaataaactaaaaataaaaacaaagactttatatagctaccagcaaaatttaaaattttgctataccacctccagcattagcacctttttgttgttgttgttgagatgctatcttgctctgtcgcccaggctggagtgcagtggtgtgatctcagctcactgcaacctctgcctcccaggttcaagtcattctcctgtctcagcctcctgagtaccttggattacaggtacaagcccccacgcctggctaatttttgcatttttagtagagacagggtttcactatgttgatcaagccagtctcgaactcctaaaatgatctgcccaactcggcttcccaaagtgctaggattacaggcgtgagccaccacgcccggccagctttagttactttttaaaagttatcagcaattaaaatggtaaaaagaaatagtacctgatagtttattttgatttgcatgcctctgattactaattagggtgaaatttttccataacttgtgtttaatatttgcatttccttatgatggtgtctgtttggcctaatcttctgagatccaatagccaattttattaatctagctttttcttatacttgccccttgtctacatcatatgctgcatctattttctcctttttgctcctctgttttggttatgtgagtttaaaactttttaaaatttttaaaatttaattaatgtaaaacatatatatgttttatacttaatattgtaatcatactattgatttttccttcacgatttcctttttaagaaaatatttaatgtgtatggggatttttggggggatgagtgatgaaaatgttctaaaattgtcatgatggttcgcaactgaataggtaagttgtgtggtatgggaattatatctcaacaaagctattatttaaaaaagcatatttattaaactttaggaaactgcattacacatctgtacaaaatgtacatatatttcatatcctataacaaataaaagactattattataaggtaaatgataacctgtggctaaaattagagtctgaaaagaaaacgctatgtttattatataaaaaactatagactgtttcagtgacttcctatattattaaagcatagaagctcaaagttcaaaagctctacaaggagcttccagatatcctgaatttggacaccagcacacataatcacaacaagatgaaagcagatacgattatagggtgataactgcacactggaatccaccttttaaatcctttctacctcttcctgaaattataggtcgccattctaatctcattttgcatttcaaaggttccttttatctaaaaaaatcaaaagtctttccacaccataactgataggtgcagccatctgtagctcaatttcacaggtaggcaagaaaattccagggtatgtccaaaagaacatataagaaaccagtaactaccaagccaagtggaaactcacaggcctgctgctttcttattgctccacaaaacaaaaaaacaaagtaactcactgatttagtcagcacttgagatttcttaagccttttttttttttttttagacggagtcctgccctgttacccaggctggagtgcaacggcgcgatctcagctcactgcaacctccgcctccggggttcaagggattctcctgcctcagcctcctgagtagctgggattacaggcaacgtggcaccatgcctggctaattttttgtatctttagtagagatggggtttcaccatgttggccaggctggtcttgaactcctgagctcatgatccacccacctcggcctcccaaaatgctgggattacaggcttttgtgtttttttgagacaaagtcttgctctgtcgctcaggctggagttgcagtggcactctctgcctgcaacctctgcctcccagactcaagtgatccttctacctcagcctcctgagtagctaggactacaggcatgtgccaccatgtctggttaactgtttttaattttttgtagagacaagctctcactatattgcccaggctggtcttgaactcctgagctcaagaggtcctcctgctttggcctcccaaagtgctgggattatggtcatgaaccaccatgtccagcattttaaggtactaatagtaattccttcttctactcaaatactgtcatttacacatagaaggtagtcaatggcatggagccactgatggtcacttgctgggtcagggcatggcctagacccacgtgctgcactatgtagagcattctttttgctttttagttagcaatatgatcaatgccttttaaaaaatgtatttgtacatttaccaaaataaaattagtaatgcacatggtttttttttttttaaaggcacagtataatacagaaggatagaaaatctaaaaagttggccaggtatggtggctcacgcctgtaatctcagcactttgtgtggccaaggaaggtggatcacttgaggccaggagtttgagaccagccaggccaacatagtcatatcctgtctctactaaaaatagaaaacattggctgggtgtggtggtacacgcctgtaatcccagctacacaggaggctgaggcaagaaaatcaattgaaccgaggaggctacagtgagccgagattgcaccactgcactccagcctcagcaacagagtgagactctgtctcaaaaaaaaaaaaaaaaaaaaaaaaaaatctaaaaagtctccctccttctgtcttctgtctgcttctcttctcccaaaggtacccattgttcaaggggttttgtgtagggttccaggaaaagctgtgtacatctcgggctgtgtgcccaggcactgctccaggccccgcccccttacacttcatgttgtatcttgcagagctttctatatcagcccatggtatgcagctactgtttggagagatttttattatttaacccttaaccttttgataggcacttaggctgctattgaaactccacttcaatatacatcctttgctaatatccctgcaggtaaattcctgacagtgcacttgctgtgttcaaagggtaagtgcccttataatttaaatggatgtctccaaactgccctccaaaaaatgacttaacctatttacatccccactatcaaattacctgttttctcacactctccccaacatagggtatcaagttttttaatctctgccaatccaataataaaaacaaatagtgccactcttttgattagcatttcttttactacaagtgagctaaacaatttttcgttggattaatggccacctactgtggttatgagcagggcagggttcagatgccagctagtctggattcacacaaccacatactaacccttgtgagtgccaatcaggtattataaagcaatcacttaacctcactgtagtttgtttcctcatctgtaaacaatggtacctatttcatagggttgttttgagaattaaatgagaaaacatatgtgaaatgctcagtacagcccctggcatacagtgagggcttgggaagactccgctaccagtagtagtggcagttgtagtagaaaaagtaagaaggacagttctttcactgggacctctttcttcagatcctttgcctgtttttcagttgggttgtccatccatttcttactggtttgtatgattttttttcaaattaaagaaattagccattcatcacttgttataaatatttttcgcacctttttgcttgttttgtttgtagaatttccctgtttctgtaaaataacttttgttgtctttttttatgcaagaaatacctattaactatagaaagattagaaaatacaaacagaagcaaacatcacctgtaacttcacatcctagatactttctatgaattttttgtagtcaactcttcactaaaaatgggattccacacatattgctttgatatgatcacaatatattgtgactatctttctacactgcatccccttttgactcccaaagtcagtattttgccctcctttcaacacacttcccttctttacagactcctgtctgttccaagttcaagagatgccctgtgtctgagaagacaacacaggccttctcccagccaatgaaaaaagctggaagcaccaagattcataggcacccttttccatagacaaagctttgaatgccactaagccccctagaacatgtgctacaagaaacaattaaccagcagcccccctggaagactttgacaggtggtgctcctgttatagctcattccacatttccctgggattgcagaattactgagtcttatccatgccagggacaggtttgtaaaagactgaccattttaccaggggcttgacctcaccagttccaaataaagagatcaccatgaccccaagtttttttctatcttagaaatgttgggccaggcacggtggctcacgcctgtaatcccagcactttgggaggccaaggcggacagatcacctgaggtcaggagttcgagaccagcctgaccaacatggagaaaccctgtctctactaaaaatacaaaattggctgggcgtggtggtgcatgcctataatcccagctatttaggaggctaaggcaggagaattacttgaacccagggggcagaggttgcagtgatccattgcactccggcctgggcaacaagagtgaaactccgtctcaaaaaaaaataatactaaaataaaaaatgtttgacttggggaattcctgacttccctactggtggtcaaggcagagactgtgcaggctccaaagtcagtgcacttgctgacagtgcacttgctgtgttccaagggtaagtgccttatatgccttaatactgacacctaaagcccagtgggcccaggccgggaaaatgggacagaggctctgcttactttaattcagtgtcagaaatggtcacaactcaacaactcaaaggaaattaagaaactaaataatgaggctcagggccgggtgcggtggctcacgcctataatcccagcactttgggaggccgaagtgggcggatcacctgaggtaaggagttcaagaacagcctgtccaacatggtgaaaccctgtctctactaaaaatacaaaaattagccaggtgtggtggcacgcgcctgtagtcccagctactcaggaggctgaggcaggagaattgcttgaacctgggaggtggaggctgcagtgagccaagatcgtgccactgcactccagcctgggagacagagcacgactccatctcgggggcggcggggaggggggaagacggggggtggggggctcagaaacaggaaaaaaaagtatggggaggggcagaaaagaatctcatcttttacatttgagcagttacattatccaactaagtccgaagaacagcttctctttggacccagggatctcattccaaaaacagatcagcaaccagcagggccccatgacttcctctctcccacaggtctactcagagacacctgctctcacatcaagtacaccagaaagatggtgcaggagttagcaggcagactgaggtttcaagagatagagagagaatgttcccagactttttgctcactaactacttcggttttgcgttcccatttgagaccccacagaaacgaacgtggatttctctactccaatggtgcaggtggaacaaactcccatttaggcttattcaatgaatgtaaaataaaacatttctaatagtgacaactctgcagccagtcagacacggcgagtctcttctccatggtgtaggggcaacccacccctacaacccacccctacacatgggttctggttctctacccctttacgcagttgcctttcctgttgctgttgcaacagtgactgttgcaacactgagggttttcagctctgccctgcacccagaggaggtggcaatcaccacagagcccaggacaggagtgggctgctccttccagataacgcagaagcagcgcccacttcctccccgctccccgtagcaatttcaaggaagctcattctgtcgcagccaatttgaagaagcaaagaatgacactaaaccaatgaaactaaatcttactctgcattcgcatgccccacggcatgaggttccacactgggcactcaaaatccaggatagacagagctcatttcaacccctctaaaaaagcacgctgggcttccagactttgtgagtagtggagggaaatcatccagccccaagtgaacagctccccaggctcaccttgggcgtgcagtgcgcggtggagcaggggcaggagccccgcctgccagaaggagtagcagccatccaccagcttgttgcagcggccctgaaatcctccttcaaatcgcatctgccggcttgtcacccattgctgaggagacacagatgggaaaggcagttgtaggctaaaagagacaaaatccagcccgacagaatctccaggagtcaatctgtgggatggagggtttcccatcttgtggcttcttggcactctagttttggtgctctggttttctttccttccctccccacactgccatagacacagagtgaagcatttaagccaacgctgtagaggcatccagcactgatctctgctcaatgcctggcagacaactaccttttcctgggttccaaagcagtgccagtgctgagaagataaagaggccaagctggtttgtaaggagaccttcaaagtctcttaataaacatggcttaagttggaaattgaaggcaagactaccagtagctcatttctcattacttccctgctccggggagtttattaaaagcagataaatggaatttggtactacatttcttttttttttttttttttttttttttttttttgagacggagtctcgctctgtcgcccaggccggactgcggactgcagtggcgcaatctcggctcactgcaagctccgcttcccgggttcacgccattctcctgcctcagcctcccgagtagctgggaccacaggcgcccgccaccgcgcccggctaattttttgtatttttagtagagacggggtttcaccttgttagccaggatggtctcgatctcctgacctcatgatccacccgcctcggcctcccaaagtgctgggattacaggcgtgagccaccgtgcccggcctggtactacatttcatcagatgatctcaaactgctcctgacttttacttggcacctggggaaatttacccaaggtctcttagcaagtcactagcaggcctgaaagcagaagccattcattctaattaccaaatgacaactctgcccagtctgtggctgatataagaaaatcttttactttgaagctgtaaaataggtcttggtcttgatgtcactcagcggtcacacacgataccaccattccttgcttatctacaagttttctaaacacactctactacaaagatcaagatagtcatgggtttggtccctcagaatgagcagaaccaactggctgagcagatatgacatttccatttccctccctagaccacctaggccgttccagccacggacttacagagctgcctcactcaactgaaagggtacaggggagggtacttcctgtttctagagtcttactaggtaaaggtcctgaaaggagccactgggacccttgatggaagtgggggccagccctcccctaaaagctgttgtttagattattccctcttcaaggcaacacctgcccatagagagtcacagtcacaaatgcttaaaagagacagaaaacactgtactgcaggttcaggtactaatatatcctcggttgatcttaaatgaaccagggcttccagcatgtaatggaagtgggctaagcattactcaggcagagagaaagcaggcgctgcagtgggagtcggttcctcatttctacttaccgcagggcttaagtgtttttaagcagactaatttactttttccagtgcctaagcccatggatttgttctgtttccttgggctataggaattcatacttcagatatgggtcctacttctcccaaagcaaatggaagggagtagtctggattagagcaggggtccctaacccccagaccatgccaggctgcacagcaggacatgagtggtgggtgagccagtgaagcttaatctgtatttacagctgctcctcactgctcccattactgcctgagctccacttcctgacagatcagcagcagcattagattctcataggagcgcaaaccctactgtgaaccgtgtatgccaggcttctaggttgcacgctctacatgagagtctaatgcctgatgatctgtcactgtctcccatcacccccaaatgggactgtctagttgaaagaaaacaagctcagggctctcactgattctacattatggtgagttgtataattatttcattatatattacagtgtaataatagaaataaagtacacaataaatgtaatgtacttgaatcatcctgaagccatcaccccccgtcccacccccaaccccaggtccacggaaaaattatctcccacaaaactggtcccttgtgccaaaaagattattactgtgggttagagggacactaacatttattaagtacctactatgtgccaggctgtttataaatgttctctcctttaaccttaaaaaaataaggattgttatccctaccttataaaagaaaaaaatatcaagctaaaagagattagacaatttgcccaaggactcatgtctcaaatgtagtagggacagggttcaaatctagaacactgtctttataactgaggcactccctaatcacattccttatctctgcctgggagatgggacttttttgtttcatgccttattggtgttcagattttaaaacatctgagaaactcttaagttcagcatacaaagttggctgtttcagcatgagccttcaagccttcatgaatctttaaaaagactacaccgggggaggctttctgaaggtggaggcaagacactgctggttacatgtctacagggtacaacagaaactctccaggaagctcacgatgggccgcataacgggaggctggcatctgaactcagggagaggaggtgcatgtcagttgcagctggtttgctttgacgtcatggtcagggggtacatgctccccaaatgacatgacggggaatgccttctccctggtggccgtggaggtgtgtgtgtttgtgcacccactgatcatttaactacaatctagtgactccctgaagctgactgctttctgagtttcttctgaatactggccaggagcgtggggtccagacataaatgttgggctgccttctcaatgcaattagccagctctgcctaaacaactcatttaaatgtaggtactaaatgtttacacagtgcagcaggtaataaaagtttggtttcgaaatgctgcaaagctcttcttgtaacttttcctcttaggaggttctttctataacacacgataacctctaattctacgaaactgaagtataaggaaggtactctgctcacaccagatgtctgcagcacacagtctatgtagtctacacactatgtaaaaagctctaagcaggaagacagaaaggcagaagggggagccaagacagagcagctgctcactccttcctctgtgttggaacagagctaactctcttagcccttcccatagccaaactctcctgaagcctgcatgtctgagtacaatcacatcaccatgacctggggcctgagagggggatggctcaaaagatacttactaataagctcttcaagttcaaggaacgttccctcttgaggattaccagcgcggccaggccacagaaggtatagccaccatgggcttccatccctggtaccccgccaatgccaccttcccagttctgacacctaagaagagattgagaaaagcagaatgagtggccagtgagtggacgtacacaagaccaggaccatcctaggtggcagagaaaaagttcactcagattaaggtgtgaaccatcacaactatgaatgaaaagatgccaactaattaacttttggaaatgtcttttcaaaaaaaaaaaaaaaaaaaagctgggcctggtggcacccatgtgtaatcccagctgctcaggagactaaggcaagaagatcacttgaggcgaggagttcgaggctgcagtgagctatgatcacaccattgtgctccagcccgggtgaaagagtgagactaggtctccaaaaaatgtaagtataataaaaactgtaaaatgttaaaaacccagacacttagaaacagcctacttgtgtaagaaacataataattcaaattattactctttgggaaaaagttataaaatcatacatatacatatatgtacatatatacacatatatatacatatatatatatacacacatatatatacatatatatacatatatatatagtgataaccatcaagttaaaataaaattaaagagtgattgttgattctagtgatcttttatttttgaaacagggtcttaactctgttacctaggttgactgcagatcatggctcactgcagcctcaacctcctggactcaggcaatcctcccacctcagcctcctgagtagctgggactatgggcgtgccccaccatacccggaccattttttgtattttttgtagagatggggcattgccatgttacccaggctggtcttaaatttctggcctcaaggaatcctcccaccccagcatcccaaagcgttgggatgacaggcatgggccaccgcacttggcctctggtgatctttgagtacaggtctactagtaatatttttcctttttgtttttctatttgttcaaaaagtttttataatgaacctgtatactattaaaaaataaacgttatttttaaaaattataattaggccaggtggtgatggcttcttaaacagcctgcagaaccatgagccaaataaacctcttttctttctaagttacccagcctcaggtattcctttatactgacacaaaatggactaacacaagaaggacaagaaataactgacttagtagaatagagaaacctttcctacccaaaggatagggatgggagaggggcaacaaaaagcaaggtgatctgctccaataaaaggctccaggattagagatacagggaacctccacaaagtggaatgcgtctgaaccaagtttgttggttgcaaacttatataagaatcagacctttaagtcccctactcaaatccagcagaagatgggaagtttcagaggtttaatcaaaaggatctgagttccagaatatccaacaagctaagaggaggagggagcactgtaccaaatgtgattacgtgagagtcagtaatctcaacacaatacccccagccccattcctctgtgtatttcacacaaggctgccagtttcataccccaagcaggaatttagaagattcctctctgagggaactgataagcccaagggaaaaaccctacagacactgctttgagaattccccaatgaatggcttgatcctgcccactctcgcagagctccccagcagcttttcagtgctggatccttaaatatgaacagacagctgtagagtaccagacatttgaccacagtctctactatgaaagaggagaccaaaacaaacaaaaataaattggaggaaataagacagggagcaaaagaaaactttttaaagttgtatctttagataaaatattatatgaagtaagactattgagaggacaaaatatccccagaaaagaacaagagagtagataaaaaagtagtcaggaagtaaaagtagtcagggaggaaaactaaaaataggattacaaaaataaaaacaagaggattagaagataaatactaagagaatctctcaaagtataagaagaaggattaagagatggaaacgaaccatgcaatgaaatatttttatttttatttatttatttttgagacagagtctcgctctgatgccgaggctggagtacagtggcacaatcttggctcactgcaacctccgcctcctgggttcaagtgattctcctgcctcagcctcctgagtacgtgggattacaggtgcatgccaccacgcccggctaatttttgtatttttagtaaagacagggtttcaccatgttggtcaggctggtttcgaactcctgacctcgtgatctgcctgccttggcctcccaaagtgctgggattacaggtatgagccactgcacccggcagtattatttttatttatttatttattttgagatggagtctcacactgtcacctgggctggagtgcaatggtgcgatctcggctcactgcaacctctgcctcctgggttcaagcaattctcctgcctcagcctcccgagtagctgggattacaggtacccaccaccacacccggctaatgttttgtatattttgtagaggctgggtttcactatgttggccaagctggtctcgaactcctgacctcgtgatccgcccgcctcagcctcccaaagtgttaggattacaggcgtgagccaccacgcccagcctcaaagtattcttaaaagtcagacaatcaaatgtactaatgggatgtcatatttttaaaaggctggccaggtgcgggggctcatgcctgtaatcccagcactttgggagaccaaggcaggaggatcatttgaggtcaggagtttgagactaacctgatcaacatggcgaaaccccgtaaaaattagctgggtgtcgtggcgcacgcctataatcccagctacttgggaggctgaggcaggagaatcgcttgaacctgggagaaagaggttgcagtgagctggtctgcaccaccgcactccagcctgggcaacagagcaaggcaccatctcaataaataaataaataaataaataaataaataaataaataaataaataaataaataataaataaataaataagaggctgggcatggtggctcacacctgtaatcccagcacttggggaagccgcagcaggaggattacgtcagcccaggagtttgagaccaacctgggcaatgtggtgaggctttgtctctacaaaaatttaaaaaattagcggatggtggatgcctgtagtcacagctactcaggaggctgaggatgatcacttgagcctggaaagtcgaggcaacagtgaaccatgatcgtgtcactgcactccaatctgggagacacataaaacaaaaagagacgtctcaaaaaaaaaaaaaaaaaaaaaaaaaaaaaaaaaaaaaaaaaaagggcccggcgtggtggctcacgcctataatctcagcactttgggaggccgaggcaggcgatcacttgaggtcaggagttcgagaccagcctggccaacatggtaaaaccccatctctactaaaaatacaaaaattagctgggcgtggtcgtgggcttctgtagtcccagctactcaggaggctgaggcaggagaattgctggaacctgagaggcagaggttgcagtgagccgagatcacgccattgcactccagcccgggtaacaacagcaagactccgtctcaaaggaaaaaaaaaaaagagcaaacacagaaaacacaagagaagaaattatcaaagaaatactgtaataaagaatcttggtactaaagtatatgcacttccaaatcgagtgcccagcaaaatgaataaaaataatccacatcaagattcatcatcaagtttccaaacaagaataaacattccaggccaggcgaggtggctcatgtctgtaatcccagtactttgggaggctcaggagggcagatcacttgaggtcaggagtttgagaccagcctggccagtatgacgagaccctgtctctactaaaaatacaaaaattagtcaggcatggtggcaggcacctgaggttgcagtgagctgagattacgccactgcactccaacctgggtgacagagcaagactccatcacacacaaaaagaataaagattccaagccgctaaagaaggacaggatggggatagaaaaagagagacagaagaaaaaaacatacagagaattaagaatcacaatggcactgccaggtagtacagcacagtggaatccatttgatttctctgtatttctgcttaatataaaatttaaaggctgggtgtggtggctcacgcctataatcccagcactttgggaggctgaggcaggcggattgcttaagctcaggggtttaagaccagcctgggcaacatgggaaaaccccgtctctactaaaaacacaaaaattagccaggtgtggtggcatacacctgcagtcctggctacttggaaagctgaagcaggaggatcacttgaacccaggaggtcaaggctgcagtgagccaagatcacgccactgcactccagcctgggtgacgaagtgagaccctctttcaaaaaataaataaattaaattaaattaattaaattcagtatcccaccacttgacatataaggaaactatgacacagagcagtggaataacttgtccaagcacaaagctaattagaaatggcaggctggccatcgtggctcacacctgtaattccaacactttgtggggctgaggcaggaagattgcttgaaaccaggagttcaagaccagcctgggcaacacagtgagactctgtctttacaagacattttaaaaattagctaggtgttgtggtgcacacctgtggtctctgctactcaggaggctgaggtgggaagactgcttgagcccaggaggtcaaggctgcagtgagccgtgatcatatcactgcaatccagccagggcaacaagcaagaccgtgtcttcaaagaaaaaaaaaaaaagctgggcgcagtggctcatgcctgtaatccttgaactttggtaggtcaaggtgggtggatagcctgagcccaggagttcaagccccacctggacaacacagacagatcccatctctacaaattttttttttaaacattagctggttatggtggcacgcgcttgttgtcccagctacttaggaggttgagatgggaggattgcttgagcccaggaggtggtggctgcagcgagctgtgatcacaccactacactccagctcgtgcaacagagcaagactcggtctcaaaaaaagaaagagagaattgaaagacagaggaagaaagaaggaagagaagaggaaagaaagggcaaaactgggattcaaacccaggctgtctgagttccgtatctagtctgtgcctaaccagtcaacccccctgcaaatgacagctgtacactgaacaaaatacaaaaaaacagcttcctgagggttcagctgactgaaaaagggcaggcagattttggtggagtttgaaacttggaacagagaacagcatgcagttagtccctcccttcccccacaactttttctctctggtttgccctcaggatggcagccatagcccagggcggcagcagcaggccaggggtcaggggtcagggcgggcagccaacactctaatgggaagccaaccatccttctggcaggaagatgcaggctgccagaaactgaggacgaatccagaaacaggaaagtcaaagaagaaaaatcccaaattctgcatttaaactcagttcaagtttccacatacgtgctggggaaacaaagcaacttctaagcaagaactgagctctgagctgctgcatgagtgacagtttgtagcttgagtctgaccaagttgactgcctgctaaactgaaaacatcaaccccttttggggcaaaccaacagaatccataccgttctgttgtatgacacctccaccatcatatcacaatgtctaggacacaacacaacatcactcagcacaggaagactcatggagctgacatgccaactccaggacacacagatgtggaaattcccagacaagcaatttaaagcagacattataattccatacttaccacagcaaaatgaagaaaaatgcactcataaagaataaaaagatggaaaatctcagctgagaaacacaaaatataaaagagaaccaaacacaggcagtgcctactctccagctctcaactatagctgccttaccattgagcatgacagtcctcaatgaactctggttactattatcagccttattaacaatgacattggaagccagaagataatgaagcaatgcttacaaaattcagaaagactacagtttataccattgccaagttagaaatctctaaccaaataattaagtgtgagattagaacacagatacatgcaagatattaaaaatgtatctcccaggtacccttttttgggatctgttggagtacaatacttcatgaaaataagaaaaccaagaaaaaggaggacagggacttcaacgaaggagagaaatgaagtgaatttcatgctgaaaggaagcttcgggatgcctgctgtgtagcaagctgagagcaatctgtccagactgaagcaggagggcagagggctccagaaggggcaactcaaaacgcacgtgtgcacagagacaggttacctgaagggtttgactatgtttagagtaattttttatagctctgacagacaatttgggaaggaattcataagtacattcatgatatatccattaactccaggaaaatgaaactcatacaaaaaagtaaacatgatctcagcatatcatctggtatcactgtaaattatatttatatggtaatacatactactttgataaaaataaaatttttttaactaaaacagtatctcagcttggctatcattccatcatagtatatatgtgtctactataccttttgcttctttttttgagatggagtctcgccctgtcgcccaggctggagtgcagtggcgtgatctcggctcactgcaagctccgcctcctgggttcactccattctcctgcctcagcttcccgagtagctgggactacaggcgcccgccaccatgcccagctaattttttgtatttttagtagagacggggtgtcaccatgttagccaggatggtctcgatttcctgacctcatgatccgcttgccctggcctcccaaagtgctggaattacaggcgtgagccaccgcacctggcctgctttttttaaactatgaaatatttggagcatccaggaaagtacagcaaacaaaatatagaacatacacgtatctaagacctagcttagaattagccatatacacttcaggtctttgttgttgttaactattacagctgaagtctcctatgcagacttatctcatttcctttgctctcccctcagcgggaatcactatgctaaatttggtgtttatctttcgtatacatgtttttatattattaccacatgattcttctcagaaacaatacagaattctcttgcatgtttcaaattttaagtaaatgtgctaatctgtatggtttttttgtatttttttcttttcattctttcaactcaacatagagatttttccatattgatacatgtaactctagttcattcattttcactgctacattatattccgatgcaactataccacacttacccatctcgtgcttatgagcactgaatctgctttcagcttttggctcttataaacaagtcctgtgctcctctctcccattcgtgtgtgcaagggtttctgtgggagtggaattactgggtcctacgcaagggcacctttgacatactgtcaaattgctctaaaaactggttaaatcaattcaggctctcactaatattgtttaccaaagttttttatctttgccaatctaaaatataatataacattaaagaaagtttggaaaaaagaagacattttaagtatttaaaaaaatcattagataaccctaatggatctcctgtgatttttgtatttccttccaagtccctctgcattttctttatttttctgaagtagtgtcgtgaccgcctgctctccaagaggccaggagaaaccctggcttctctcaccttgctatccattcagcagtgccctcaaagaggtctggagtgatgatgttggtcagcgaggctacggaggcagcacagtatgcgcttctggaaagacagaaacgggaaacacattaagctctacggaagagctaatgaggctcagtgaactccgcgggcggactgctcgccttgcctagtaagctgtaatcacctcctgtcctcactcttggcacacggtcagtcctcctgggtctccaactgagaggtgtgacattctatttggatagagttgctcacggcatggcttcagtgaaagaacatgacattctattctccctacctccacatggtccaatctacatcagaggaaataacagccatatcaattcatgtcaaaagtggattcagctcttctttcaaagacctataatggttgccataaatctatggtatcattcaggtacttctgatatgctcattcatttggatgttagtactgtttcagagccaggatttctgtttacagccttgacacattaaagattaactatactttttctgcaacagataaactgcaaaacaggccaccaaattgtaatagatcaaacaaggataggaacaggtgagtccactccaatacagtccttaaacctctagagggagaaaagagccttgatttcaaacctctcaccagtacacacacacacacacacacacacacacacacacacacacgttaaatgaaaaaggcgcacgtctatattttttgttttgcttttgttttggtttttattgagacagggtctcactctgtcgcccaggctagagtgcagtggtatgatctcagctcactgcaacctccgcctcctgggttcaagcaattctcctgtatcagcctcccaagtagctgggattacaggcgcatgccaccatgcctggcttatttttctatttttagtggagatggggtttcgccatgttggctaggctggtttcaaactcctgacctcaagcaatccacctgccttggcctcccaaagtgctgggattacaggcataagccaccgcgcccgggctattttttaaaaaagcattattaggctgggcacagttgctcatgcctgtaatcccagcactttgggaggctgaggcaggtggatcacgaggccaggagttcaagaccaacctgaccaatattgcgaaaccccgtctccactaaaaacacaaaaattagctgggcatggtggcgtgtgcccgtagtcccaactacttgggaggctgaggcaggagaaccacttgaacccgggaggcgggggttgcagtgagccaagatcatgccactgcattccagcttgggcaacagagtgagactctgtctcaaaaaaaaaaacaaacacaaaaaattattatacttgatttaggatcattcttgctgttccatcctcccagccctaattcttctcggggcacattttatttcagcttctccctctgtcatggtatacacacacagactgcctttccttcccctctatggttttttcaaatacccggcacagggaagacaaaaatcattggtttgaattctgctcaaaaatccttctcctggccaggcatggtagctcatgcctgtaatcccagcactttgggaggctaaggcaggtggattatttgaggtcaggagttcgagactagcctggccaacatggtgagacctcgtctctactaaaaatacaaaaattagctgggcatggtggcacacgcctgtaatcccagctacttgggagaccgaggcaggagaatcgtttgaaccccagagacagaggttgcagtgagccaagatcccaccactgcgctcctgcctgggcaacagaaagaaactccatctcaaaacaaaacaaacaaaaagtatattcctaagggctcctaagaaacataaaagaagggcctagtttccatcttcttttttttttttaagataggatctcactttgttgcccaggctgcagtgcagtggcgctatcatggctcactgcaacctcaaactcctgggctcaaactgatcttgcctcagcctcctaagcagctgaggctacagatgcatgccaccacacctggctaattttttaaaaattttttgtagagacagggtcttgctgtgttacccaggttggtcttgaactcctggcctcaagtgattctctcatctcagtctctcaaagtgttgagattacagacatgagccactgccgctcggccctggtttccatcttactcagtatagatataacatgaagtcagacttactgaggtattccaaagaagtctctgcagaagctgcatgcattatgatcctaccagcatttttagcagccaaaggcacagtggaagtttagttccaccagcaggcattgggagcacacaagagtcacaagtgccaatgccaaatgtgatcatctaccagcagctaattttgaagatctgtctaatttccttgcaattgtaggcctcttaaagaggctcagatgcatttgctcttgaatcctattgtgacttgtgaggtaggaggcgacctataatacagtttgcctctcacaagtgtgaggactaagaagtgatgacagaagacaggagtcccaggtctcacgctgagatggggaggaaacgtaatacaaccttttcatgtatttctccccctttccctccacccagtcatcgcagctctcaaatttgaatttgtccactaactttccatccttgctgccatcacccaaatccaagccttcttcaacctggatcagtcttcctgctctctctccctccagccctgaaaccagagggcttttattggaacactacagtccatcactgcaattgggaaacttctaagaaaatacaaatcagatcacatcactaaactccagactccataggagatttcagggcctctgtagcctgttcccagcctgtccctccagctccactgctcccctgcccaccaggccatctacacttcaacactgaacttgtcctttcttgagcaacacatgctttctcaccaaacttctgcaaatgctagatccctgcctccaccttatcctcacagaatgatctagattatataacctagaaaggaggtctcctttcttaagaactgagaaaaaatagtgcttgctatgagttcactgtgatttgattttttacaatacactggaactacagacccttgagtaggctcatctctgaaactatcagcagtgtaacagagcagaaagatcatccagagactgctgtctatcccagaagggcagcgagctagtctccagatgtcaaactctcccatcactgctgcttttctccaagtcaaatccacccaaacaagcactcctgaggactggctgatgcttccaggcaaaggacaatgaaagaaatgccaagtgaaaaatgatggaatcggggtactagaaaccaggcaaagcaaggaaaatggatgcaatctgctagcttttctctatcattcatatctttaatcctttatgtaaatagaaagcacgggcacgaatggcagagcatcacccaaagagcaaaggtcagggaagaatatggctacagtgcttggcaggggaaccaagctgccttactggagaagtttcctagcatttatctagaacatataaataaagagcatagggaaaaaaaaagtgctggaatgaataagatagcaaataatcacagctgcaaaaggtatatgataaaataccaaaaggatcttgctatgatttgtttgcttttgcctaataatcttagtaggtttttaaaagctgcgtttcaagactgtgcatattttgggggaatagcaacagaacaggaacgaaaatgtagtgaacacgagggaaaaaaactcttttaacattttccttaagaagaatcaacacatactgatttacctcagtcgttctactggtttcactggtatacacagatcctaatctaatttttttggttggattagacaagttagagatagaagaacatcttgaactaaaggcctttgcagcctgattacctattatctgtaatgtattttatgctccacaatgttcgtggttttttcctcccctatactttcaaaccaatggttaaaccagatgcttaagccagactattaatcaacttgtgtagaagcaaacccatttacacataggcagtaagacagctttgctatagaaacctcacaaaatgtatttctcaactaaataataagaaaatggcataaaatctcaataagccactgtcttagagaaatggcttattcaatgaattccctgtatgcctcataagtaatctgccaggtgaggaagcaacttgcttggtacatcagacacttatggaagaaaataataatttcgagctaactggcaccaatcagttaatgcgattttattgcactgcactctcccggcccacaaggctctctgcacctcccagaaaaactctcatgtgcctcaggaggacctcagggattagacattctcatgatttcatcaaattcactcagaaggtatttactgaggccctgctggactttcccctcccttcctatctcagagaggtgaaggaatacattacaccatacagttatttatattgtggtatatcattttgtaccaaacaaatgtatttttaatttctaaaacaaaagcatttgtttcttatattttcacatttacataaaataagtcaagtgatcatgacacctgaggacatctgcatcacatctgaatgattctgacgtgtcactgacatgtcatcccatgtgtcattctgggacaaagcagcagcttccccatgatgttccttaggcttggcatctctaatggcagatgagctctagagtcaactgatgtggcagcctgtgcaaaaccccactcacctcacatccacctcacctccgacatgcatgagaaaggagccgtcaggttgcttcagggagtacaaatactgaagaagcttctctctgagaaacagggaaagaggtaggagaggcaacagtcagtgcgtgtcagcaggcggggaactcctctaggtttctgtcactgctggctttcactgtacctgttaatgatgtcataggcctcctcggtgccaatgatgcacaatgcattgactgctgcatatgtgggtgcaaggtgtggatactgaccgggtcctcctccaaagccaccttctgggctctgacacagctccaggaactgacacacactaggtacacagccaaagggcaaaaacaaagtcagagagcattcatgtcaaaacaccaaattcccactagattccaggcctttccaatgatcccccactccctcaaaagttgaggggaacctctcctcccacttgttgaatataacctctccccaaagggcttaattctctctccagctatcatcatttctgtctgccctcctctgagtttcgtacttaagcgcttgttggtcatgaagcagggaacacaaggctgggaagaaaccgactttcgtagctatggggtaagagtctcccgtgcttcccacacaaacctttcccagactttccactcaacttgctgccctggacctgtggtaccagcctcctcctccttgcctttgggaacctcccagcctttgaattttgccaaaacatggtgctcaactgcttctttccacactaaccatcctagtcaggatccatcacctaggcctatcatgaacatgtaaatagaggtcttctcactcccattgccacctaagcctctgtgggccactgatttctactccaccagtaagaagcaagttttgtttttttgtttttttttttgaggcggggttgccctcggtcgcccaggctgcagtgcagtggtgtgatctcagctcattgcagcatccgtctcccaggttcaagagattcttttgcctcacccttccaagtagctgggattacaggcgtgcaccatcacgcccagccaattttttgtattttcagtacagacaaggtttcaccatgctggccaggctggtcttgaactacctgacctcaagtgatccacccgccgcagcctctgcaagtgctgggattacaggtgtgagccactgcatccggctgaaaaacacatttttaatggagcctgcttccatggctgggagaacagaagagaggcaggctgctctcatgctcaccttaattgcggtaaacataagaggagctgcactgactcgccgtgagaatgcctcccagtctgcgggttcttggagaattctccacgttaattcaaacaggctcccattccctcactgaggggagctgttttctgagggtttgcctccaagcctggcatcaggctgcccagaggttacagtcttgctttaggtgaaatcaagagagccctatcatcagtccggggtcttccgaagtgcaccagaaagggtgccccaggaaagccctggttatcaagctgtttctccacagctcagcagggtcacagccttcccgccaggagaaacctccatttacaacaagcaaactgtctttgcagtgttcatggggccttctttcctgggcgctttcacctcattatttccttgctactgctgccagaaagactacatagcctactctccaagaagacacaagtttataactgtttgccaacatcacatttaattgctttcgatttcagagttcccattatccgggcagagaaagcaaaagcaaacgctgctgccttgctctgtgagttctgaaacgtcacaggttaaaacaacacatacttctttttgcacctacaattttactgtagaaaacacaaggattgaaactgaagttgaaaacaattatgtggcactatggtttttgtttttgattttgagagagggtcttactctgtcggccaggctgcaggacagcggcataatcacggctcactgcagcctcaacctccccagactcaagctatcctcccacctcagcctcccaagtagctagaattacaggcatgagccaccacgcctggctagtttttgtattttttataaagatggggtttcgccatgttgcccaggctagtcttgaactcctgggctcaagcaatcctcccacctcggactcccaaagtgctgaggtcacaggtgtgagccatcatgcccagcatgtgacacatttttaacagcaattaatttctgtagagaacttgaatttgttccttctttccaaatcgtcatcaattcttatgacatttcccagaaacaaatagttaataagctcatgccctaacaaaggctggctgcactagcataccaaaaggtttctgtaccacaaaaagttttagctgatacaaaacttaacagcacattttttaaaagaaagaaaaagagtcacctggttatccactccctttcccagctcctaagatagaatcgtgccgaacgcaacactactgaccctaaagcctcgaattagttaggatctgaatgtaccagacacaccttgataccatccctccatgccaacctccctcagctgacatgctgcatctgactgtctggggctgtgctagagaactggaggttgggcttctcttgatctcagacacttccgtattacagaacattctgatcccaaggctttccaacttgcaccttaaggaattggcaagttgactatgaactaccagctgtcattcacagacttcttagcaattctgaagaccaaaatgttaatgatacttctacatatttaaaaaaaacaaacaaacaaaaaaaaggagccaggcatagtggcttgtgcctgtaattccagtactttgggaggccaaggcaggaggattgcttgaagccagtagttcaagaccagcctgggcaacacagtgagaccccagctctacaaaaaaatatttttttttcccacaaatgtagggggagaaaaacttatcatagagacaagaagttcaccaataaataaaaaattacaagcaaaaaacattgtacaaacaccaagtggcacattttgtgaaaaacaagtattcacaaaatcattcctttagaatatgactgaaagctgcaatacatcaattttctttaacgtcagcaaggcatttcattctagcttacgtgccaattaccagcaaagtgggaaactatcttctatatcatggatcttcaaacccaaaatgtgtgcatcagaatctgtagaaagctaataaaagaatacagagacccagtcctgctgaggtggaaaagatcctgggcctttgtatttttaccaaattctcaggtgattcagatacatgcaaagcttgagccatcactagtccttgctgcacaactaaaattacttggggggtgttttaaaaaaatcccaacacccaagccacacctaattccaattaaaccggaatcactatgggtgggacccaggtggcagtattttttttaaactccccacgtgattccaatgttcagccaggtatcagtgcttctcaaacttgagttgcatagaaattacctgtggatcttgctaaactgcagctctaattcagtagaactagatgggtctgagagtcctctttttttttttttttaggagatggagtgtccctctgtcgcccaggctggagtgcagttgagcgatctcagctcactgcaagctctgcctcctgggttcaagtgattctcctccctcagcctcccgagtagctgggactacaggtgcatgccgccacgcccagctaatttttgtattttttagtagagtcagggtttcactgtgttgcccaggctggtctcgaactcccgagctcagacaatccgcccgccttggcctcccaaagtgctaggattacaggcgtgagccaccatgcccggctgagagtcctcatttctaataagttcccaggtgatagcaatgctcctggtctggggaccacattttgagtagcaatgagatacatctgtgctgtccaataggcagccactagccacatgaggcaatttaaattctcaattaattaaaatagaaaattcagctcttcagtcacacaagacacatttcaagtactccacaactaactgtggctagtggccaatatagaacacgtatagatgtttatagacacctatagacatttacagaatatagaacattttcattatcacagaaagttctgctggacaccaccacttttatcattccatcattaaagagtatgtaaatcttgtaagagggtcaagttcaaagcagggatatcagcgattgcctctcagccttataaggagtttacttgggactcttaggtgatggctgaggactgatctaaagtgattgattctggccaggcgtggtggctcatgcctgtaatcccagcactttggctgaggtgagggggatcacttgagctcaggagttcaaggccagcctgggcaacatggcaaaaccccatctctacaagaattataaaaattaaccaggcacgttggcacccacctctagccccagctactcaggaggctgaggtgggaggatcacttgagcttggggaagtccaggttgcagtgagctgtgattgtgccactgcattccagcccagacaatagagtgagaccctgtctcaatcaattaatcaatgttgattctaaacaccgtcatcagtttggatgaaggattcaaaggcatgtacagtaaataagcatataatacaaaatgagcagcaaaacaaatcagaaaccaataagaataaaacaaatgcaacaggtacaaatagcaagaattacgcttagagatggcaggggtgggggatgggtaaggcacatgaatatgggaaatgactaggaacatagcaggaaaagaccagtaataagggtccacgagttgtgaagaacaacaataaaaatgcttgttaaaagcatcataaatgcagtattagtcagaactgtatctggctctagcctccattttccacctcaaagggaattcacatgagagttgtaaaaatgactactttttttttttttaagtatttggctgggtgtggtggctcgtgcctgtaatccctagactttgggaggccaaggcaggaggatcacttaaggccaagagtttgagaccagcttaggcaatacagcgagaccttatctctatttttaaaataatataaaaagcttaatattacagacaatcacagtgagaaagctacccagcaaaatacctcaaatatacaaaggataattacataaacattctagtaggtaaaaactgagactaatttgtagcaagaagtatttaggttacataaaaaacttcagcactagactaggctatcatagacagacttaaggcctaggataagttataaaaattatagctatgttctgcacaattgggcaggtttaaaaaaaaaaaaacagaaaaaaagattacagctttggaaataggaacagtcatccatgggcagaacggcttaggaggggatgtaaatgcaagatgcatgagctggcatcacatcaagcttgttctcgtactaactaaaacagcttcagcttgatatagtgaagaggaaatctccttccctaggtagaatatgacaatggacaggtgaagacgggcagcatctcttgttgattccgggtggcctctgctgctcacagagtcagacgtgttatttgactcttcatcaagcaccggcaagtctctggatggctgctgttctggaagaatggtcaggtcgaaagttggctactataggccgggcgcagtggctcacgcctataatcctagcactttgggaggccgacgtgggcggatcacttaaggccaggagtttgagaccagcctggccaacatggtgaaaccccatctctactaaaaatacaaaaattagccaggcatagtggcatgcgcccgtagtcccagctgcttgggaggctgaagcacgagaatcgcttgaacccggaaggtggaagttgcagtgagctgagattgcaccagtgccctccagcctgggggacacagcaagactgcctcaaaggaaaaaaaagttggctactttagagcagagtttctcaactgttgacactggggctcagtaattctttggtgcagggaccgtcctgtagaggatatttagcagcacctctgacctgcacccaccaggtgccaacagcacctggccaggaaaaatgcccaggagacaaaggcctagatatggtgtcctcactgaaaggtaaggaaacatacaaactagacttaaaaattaaaaggaaaaatatttaaggggctattccggggataagctactaacaaccttttgaaagggaaaggataaaacactgaaatagcaaaatttgaatttatctttggaaaaatcttacaagctgaaatgtcctaaaatggtttttaagttaaaggcaatttttaaatcttacagaagctaaaaacataactttaacagtgcgatggtctccctgtgaattttattttgctctgtttcactgaagctgctttcagtaacaaagaatgggattctcattagaggatgcttccttcagtgccaaaaccattaagcaaagcaaatgtacttagtctagttccaaaatattaattcattttagataaacacatataaatgtgtgcatataacctcttaaaagagggaagctaggccgggtgcggtggctcacatctgtaatcccaacactttgggaagccaagacaggtgtatcacctgaggtcaggagttcaagaccagcctggccaacatgttgaaagcctgtctttacaaaatacaaaaattagctgggcgtggtggcacacccctgtaatcctagctacttgggaagctgaggcaggagaatcacttgaacccgggaggtggaggttgcagtgagctgagatcatgccactgcactacagcctggcaacaagagcaaaactccgtctcaaaaaaaaaaaaaaaaggccgggcgcggtggctcatgcctgtaatcccagcactttgggaggctgaggcaggtggatcacctgaggtcaggagttcgagaccaacttggccaacatggtaaaacccaatctctactaaaaatacaaaaattagccgggtgtggtggctcccgcctgtatgcctgtagtcccagctactcgggaggccgaggcaggagaattgcttgaacccaggaggtggaggttgcagtgagccaagatcgtgccactgcactccagtctgggcaacagagcgagactctcaaaaaaaaaagaggcaagctgaagtcctacctatggactgggcatggtggctcacgcctataatcccagtgttttgggaggctaaggcaggaggatcaattgagcccaggagattgagaccagcccaggcaacacagcaaggcactgtctctaccaaaaataaagaaaacattccaggctatgaatacattattcttgaaacctctgataccagcagtaacaacctcgccttgctggctttggtcagcggtcatagcagctgacaaaagtattttgtccactagagggaacccagcttatcatattgttccctaaacaaatagaagcacagcagtgaacaaaataggaaagagaaacctttgtgtaagtgtagggggcgtgtgtgttacatgcaggggaaaagaaggcaggaaaataataaaactgcagagctagactttttgactctaggtcaccttaatatatttgtatgaagaaagaaaactgaacgcatttcaaagcatttcatttccctgtgcaagataaataaaaaggcaatattctatttcagctagtctaaaaaaaatcttctatttatatagaagtccttaagatttatctgtatcttactaaaaataatctatttccttatgggtcagagccagtaggctttgttcataacaagtgttttctgcacctagaagtaaccacctcctaggcacaaagcaaaatacattattgggaagtctaagaaatgtttaaaagttcactaaatcaatgcgtagaagaaccacaggtaaagcttttaaggcatctgtgaagcagaaactctcattaactgtcaagtggtttttgaaataaggacaaatcagcttatttttaaaccattccttttttaattacaaaataataaaagatcattgtagaaacttcagaaaatgcaagtaagcttaaaaaaaatgttttgtttgtttgttttttgagacaacagtctccttctgttacccaggctggagtgcagtggtgtgatctcggctcactgcaacctctgcctcccggattcaagcaattctcctgcttcagtctcccgagtagctgggattacaggtgccagccaccacatctggctattttttgtatttttagtagagacagggtttcaccatgttggccagactggtctcgaactcctgacctcaagtaatccgcctgtctcagcctctcaaagtcctgggattacagccatgagccactacatccagccagaaagttcttctttttctttttctttttttgagatggagtttcactcttgttgcccaggctggagtgcagtggtgcaatcttggctcaccgcaacctccgcctcccgggttcaagcgagtctcctgcctcagcctcctgagtaggagccgggagtgcagtaacagaaggagactcttgtctcaaaaaacaaacaaacagcctcctgagtaggattacaggcatgcgccaccacgcttggctaattttgtatttttagtagagacggggtttctccatgttggccaggctggtctcaaactcccgacctcaggtgatccacccacttcgttctcccaaagtgctgggattacaggtgtgagccaccgcgcctggcctttttttttttttttttttaagacagagtctcactctgtcctccaggctggagtagagtggcatgatcttggctcgtcgcaacgtccacctcccagattcaagcaattctcctgccttagtctcccgagtagctgggattacaggcatacaccaccaagccaggctaatttttatatttttagtagagacaagatttccccatgttggccaggctggtctcgaactcttgatctcaggtgatctgccgaccttggcctccccaagccctgggattacaggtgtgagacaccgtgcccagcccagaaagtttataaaatcacttttaaccccatcgtccagaaataactactacatgtatctttctggttctatctatgcatatcatcatctatatttttaatgtatgtaaattaaatcttttaaactattttcatttcacatctctctatataaatacatatattttaacatacaaatatacacattcatatatttattgagacagggtcttgctctgttgcccaggctggaatgcagtggtgccatcatggctcactgcagcctcaaacccctgaactcctgtctcggcctcctgagcagctagaactagaagtgtgcaccaccacgcccagctatttttatttttatttttgaaatggagtctcactatgtcgcccagactggtcttgaattcctgggccccagtggtcctctgaccgtggcctcccaaagtgctggggttacaggtgtgatcatgcgtggccacatttatacattttttaatggttatatagtatttcacagaatgtactgcaccataaatgacttatgttttattttttaaatttatgtattttatttatttatttttttgagatggagtgtcactctgttgcccggactggagtgcaaaggcgcaatctcgactcactgcaacctccgcctcctaggttcaagcgattctcctgcctcagcctcccgagtagctgggatgacaggcatgcaccaccatgcccagctaatttttgtattttagtagagatggggtttcaccatgttggccaggctggtctcaaactcctgacctcaagtgatccacccacctcaacctcccaaagtgcttgggattacaggcgtgagccaccacacccagctttacatttaaaaaaaattttttttaaacattctctactgttgatatttaatttagattgcttccaatgaaaggccctttaaaggctcctctcttcctatgtgacattgccccagaagcggcgctgacacttcctcagaaaagccttcactataaaacaccaagtacacagcctagaaaaaaactcagtcgattttggctcgagttcttccacctcaggcaccccctgtgattctctcttccagtttttcatgggtctgcggcctcctccatccagcgttcagatccaggctcacagaaatccccattttttctttcttctctcacacccaactttcccattgtgcaagagtgaagggaaaactttccaaatatcctgattgtgtaggagtgaagggaaaacttcccaaacaatccccaggcccccgagctggtatttcaaaaacacacgaggctggatgtggtggctcacacctgttatcccagcactttgggaggccgaggcaggtagatcagctgaggtcaggagttcaagaccagcctggtcaatatggtgaaagcctacctctactaaaaatacaaaaattagccaggcacggtggtgggtgcctgtaatcccagctactcaggaggctgaggcaggagaatcgcttgaacccgggaagcagaggcagcagtgagctgagactgtgccactgcaccccagcctgggtgacagagtgaaactctgtctcaaaaaaaaaaaaaaaaaaaaccacgtgggcctttctttgacaattaaattcctgttactgcagaaactgtgtccaactctccttccagtgctggaagcagccaggcttgcagtggcatcccgatgatcaaaacaatgcacttgcctctccctcagaaagcatcctacgtaccacaagggttaatggcctaattctttattatcttccccatccacattcatcacaagacaccctgcccaggaaggcaagaatgagaggttattgttaagacagaatgaatgagacaatgtgcagttctgttcctctgacctgacaatgtgactgaggcaggggctctgtgaccagagaggggccccggctaggcctctgtgtgtcccagcacagctgcctccttgtgctgtggagaaacaaacctggctcagaagtctctcatcccagatgcttcgacctcaagagcaccagaggaagctgagaaattcgagatgctgcctagagcccatgctgcctctcagtggatctcttggatccaattcctggctgccctttcttattccaggtatccctaggactggagtcatgatcagtcttttcttctttaatatataaatggtgatgagtgtctgggaatgagatgccagatcacgaatgccatctgtacaaggatcttgggaagaagctcagttgcttagatctctaatcatcgatcaggtttaggaaaactgagagtcatggcatttgtatgccacaccagtaacacatccagtcccatcaagagctacatggtcgctccaagcaccgggagcggggaggtacttctatagaggtgcgtaggaaaggcaaaggcatttttgttcactggactggcacgtgcttccccacagaagctgttcaaatgcatactgtactttctggcaaaatcttgtctctcagagttgatgattaagacttttctcaaagaccagagtcaagagccaaaagaaaaggccacagaagaaaccagaatccttctcttggaagttcaaagtcttgttctacccaccagcttacattagttttctaaagtggaggagtttcaggaagttgccggaggtcatgagaagagcaaagatttctttgtggcactgtttttttccattccaaacaaacaaaacagaaacaaaacaaaatcccaaactcaaaatacaatttcagagaacaccccagatttcccaaagacagactcactctgtagccactatctgggggatgggttcatctagcagttccaagctgtgcaggatccaatagcagagccatgggcggctggcatccagacactgggagagagacaggagagaaaacatcccttattcacaatcactccaagacactgctgccaaggctgtatctgtctcactcccagcagcctggcaagggggaggagggcacccttgctcaaacaacaatcagtgaataaaggacactttgctttgtggccttagccaggagctgaaatgaccatctgttaaaaaaaaaaaaaaaaaaaaaaaagataacaaggctgggcgcggtggttcatgcctgtaatcccagcactttgggaggccaaggtgggtggatcatttaaggtcaggagttcaagaccagcctggccaacatggcgaaaccctgtctctattaaaattacaaaaattagctgggcatagtgatgtgcgcctgtaatcccagcgacttgggaggccgaagcaggagaatcacttgaacccgggaggcagaggttgcagtgagccgagatggcaccactgcactccagcctaggcgacagagcaagactccgtctcaaaaaaaaaaaagaaagaaaagaaaaaaaagacaacaggattaaaaaaaagatgaccctgaacccagtggatccctccctggcaggcatctaaggaaggctgagcagaggacttcctacaggccaggaggttaggggctgctattttctcggtatagaaccaaggagatatacattctctgaagagatttcctagcttaactcaatcactgattcaacaaatatttgatagtatctacttgtgccaagcactgtattagacactggggggatgataataaaatttggtttctaccgtttatttttttgagacagggtctcgctctgtcacccaggctagagtgcagtggtatgatctcagctcactgcagcctcaacctcccgggctcaagcaatcctcccacctcagcctcctaagtagctgggactacgggcacacaccactatgcctggctaattttttaagtttttatagagacagcatcccactatgttgcccaggctggtcttgaactcctgggctgaagcaattcacctgcctgagcctcccaaagtgctgagattacaggcattagccaccatgcctgaactggtttctgttcttgagatgcttgggatatagaatgtgtgtggttacctgtaggggaagagagcactggacagacatataagttacctcatgtctttctggaaccaacacgtgtacatatacctggagaaatgctgtaatggacgaaaacagagttttgagggagcacgtggaagagactgactaattctgcctggggagctaggaaaggcttccaaaggcaaaatgcagacggctcttgatcctaattaaaccataaatgattattgagcattcaaggctaggcagggtaggtaggagtactgccccagttttataaattaaaatatataaatgaggtccaaagattaacctttttcagattataaaaatagcaaatgtcagaggtgagacaagaacctaggtttttagagtcaatccagtgttctttccgttggcccaagctgctctcttcaaaactatgctgatatcccaagctgtggctaacccaccacctggaaggtaggctggtgagctactgaagacactgccagggatgcagcttaagtttgaatcccagctcctcatcttactcgctatgtgcctttgagcaaatgacttaattttactatgcccatttcattatctgcaaaaaacaagagattgatctacctcatgtagttacaagatttaaataagagaatgcaactgggcgcagtagctcacgcctgtaaccccagagcctcaggaggctgaggcaggtggatcacttgaggtcaggagctcgagaccagcctggccaatatggtgaaaccctgtctctactaaaaatacaaaaattagccaggcgtgatggtgcacacctgtaatcctggccactcagaaggctgaggcaagagaatcgcttgaacctgaggcggaggttgcagtgactcacgatcatgccactgcactccagcctgggaaatacagcgagactccatctcataaattatgagagaatgcatggtaagctttcagcacactgttcaataaattgttagctgatatggtaccaactgtaacataactattgaggacttgagtcaaggattgaaaattcatagcccacaggccaaatctagcccatggatgtgtattgtttaactggtagtagctgcaacatttgtcaggagagtcacatgaaaacgtgatttccggcttcatttggaggaagaaaaaaaaaaaaggaaacaaagatgatttggcaaccctgggtctgcattcccagatggcagtaatgggcaggaaagaagttaagggcacagggtctccagttagcctcagtctccatgcagcccacttcactgatttatgctgcctgcctgggccctacaggcatttgagttggcaaatcattgccacaaataatcaaatgtggaacccaaataaaaagcagattaaaaatagagatgctgctctgtgttaagcagggcagaaagactggagacttcctgttcacattcaccctttgcctgccgctcagtcccatccaacatctgtcccctccaccgtcacccagtcctgacgttgctctgggaaatattaaagatctactcttaaacagtaatgttaaattgcaaggaccactctctatactggtcctctagtcagtatagaaattagatcttattacaagaaagggttttttgtctctttaatgaagatatgaaaagtaatgtacttactagaaggagtggtgaagttggaaaatttgtaaccatcacgatacagacttaacaggtttggacaatagtcctcaataaatgagcgagaaattagatcagcttatagggcaaagggttaagggtgaacaggtaactggcatttagccagctgtcaaggaggtctagataaagcacgtgaaccccttagtcatcatctagtaacagaagaaagccccatcctatctagggtgctccactcactctggaagagactaggttctgccctttcagggctgagtcccagctctgtgacagcaccctacctcctgccagagccacagagaacaaagagtgactctgcaacaggtcagccccaacagtcttttacgtttaaatagaaaaaggaggaggatttggtggataatttgacagcaagagttcctgggtaatgtgtttacctcataggcatctgtcagttgtcgaaggcctcttttcagataatggaagtgcttctccctctgcaaaacaagcctggaaagacaaacagtttataagcccattctaatagcttatgcttccaccatacacacgtatgtgcacgtacacacacacgggtaaacactcagcttcaggacgtccccctgcaatcactgactggataaccagcaacttctctggttccaaagagcaactaaaccagagaaaagaagctcttgtctgaatgtctctaaagcatctgaaaaccatgccagctgacatttagagtgcgattgtctcctaaaggcagtgactttgggctaacggaaaagccgcaatgagcacacgcagccaggcaatgacagtccacccagaaacttcctccagcatctaagaacagatatctttgtgcctccccatcctataagcaatttaaatctgagcctcgccacttccctgcctcagccgctgtcatttcagtcaccccgtctgggatgacttctccaaggcccataatttactccctgcctgcctctcggttatccaactattattctctccctgaaattccacctcccacgtgtgacccacagccctggccagaggaccgtgttctgcagccagtcgctgtccttggctttcaagtcagcaatactggctttaagatggaatgtgccgcccatggccacctgcacaggccgggcaaagcacagaggctgcacttctttcttggtctggcagaagagcctgtgtgactagggaaggaaacaaaaagcacagattgtcaagatgttccccgtgcttgcagattacagaaacaaaggaaagagaaccattccctttgctaggtagtcaattccacaattgtttatcaaattcccactgtacttggctcagagtaagagccttcatgcagtctttttttttttttttttttttcctgagacggagtctcgctctgtcacccaggctggagtgcagtggtgtgatttcagcttactgcaacctccacctcttgggttcaagctattctcctgcctcagccacctgagtagctgggattacaggcacgtgccaccacacccagctaatttttgtatttttagtggagacgggggtttcaccatgttgcccaggctggtcttgaactcctgacctcaggtaatcccctgccttggcctcccaaaatgctgggattacaggcgtgagccaccgcacccagcccttcatgtagtctttacctcaaaaactcttccaattcagaaatgaggtaagtatatcaatggctacaaggaaagaatgggtaggttttgcaagggaaaaacatactactgaggctcaaaagggaggggatatctcatgaagaaaggaatgatcaggaaagtttgtgtgaaaaaggaggaatgtgcgatgagtggccctggcagaaggagaaaattttaattcaattttaattcaagtttaaatagctgcaggtggctaatggctactctactatgctgcacaggtatcaagtgtacaagaggagtgacaggtgggagaatctgacctcaatacagggatgaaagaggaatgggaggaaagcaggagtactgccccagtttaaaaacaaacaaacaaacaaaaaaacaaggatctgggatgctgactaaggcatttctactcaatttactaggcaaagggaagtcctgaaggtttttgagatgaggaaagaaatgatcagaactgtgctttggagaaacagtaggtagtcagtatgtgtttacaaactgaagtatctgaaaatatcgcagtgggcagacagatggggtggggagacagggttagaagctctgaggagctgacccagttggggctacttagggcccgaactagtgtgtgacccgtgatcagctgacttttggatgtgtgggtcttaggatgctgggactgcattcaggtgatgatgtcaatcaggctgctggacacacacgtgaggctcaggagagggattcaggttacacacacagactacgaagcatttgtctgcacacaagtgacaggtgaagccacagaaggtgagagggcagagagagaagtttggaaacaaaactgtgggaagacccatctctaagggtttggaggagccagtgaaggagagaaacaggagagtttacatatgctagggaagagcaaaggaagtgtcatgtcacaggccatcagggaggagagaatttcaggaaggtgtttaacagtggcagatgctgcagcaagactgaggggaaaagacaacaaaccacagaagggctagagacctccaagagcattcagagcagaggtgaaggcaaattgtaaacaagagaaggccagactcagtttctctttcaggaaagtccactcaggacgcagggagcacccatctgtgtgggcagagtgttgtccagcactggggtagaggctgctctgtaccctagagcgacagtccagaggtggacacacatgtgaaaatgacaagcagagccctgtccaataaacgctgtgatcagccacgggaagagatggagggtcagaaaactcttcccaaagggaagagcattgagtttaaggctggaaagacatgagttaagcaggcaaaatgaagaaaacaccatgacacatttgagttagtttagttcagctggatcaaaagtacaaggcagtaagcagagaaattccacattagaaatgcaaaagctcagaggaaatccatagggaaggtctgtaaagaggatggaggagggctgggatgagggtatagtaggagaggtgagcctggaataaggaaggatgctgcattctttgagcgagaaatgatgggtacgaagctagcgaaatataggtctctgatgtgggaagaaggaaacaggaaagtcaggtgggtcagcctcgattttctcaggaactaggagtcaagatggtgggagagctgtggagtggccacggtggtgggtgtgttagggaatctacatgagacgaataaaaggattataaggcagttagtgaagcgccagtgaaattaagaaatataacatgttggtgaagccagtcagcagcctcaggagaaaccaagcctgctgacaccttggtcttagacttctggcctccagaaatgtgaaaaaataaatctctgtggtttaatgcaccccatctgtgataccgtcttatggcagcccaagctgactaataccctcaccggtccttcattctcaactcacctctatccaaaaatcttttctgtgtaggaagttaagaaagaaaaggtagagctcttcctatttttacctgaacaattcagccccaaaaccattcaattacatggagcagaataagacaggtttcgtgcaggacttgagggggtgcagggtgggatgcaggctgtcagctcaagtggatgaggagggcccccgtctcactgtgcagagggtgacaggagagcaagtgggtaaatctattaaggctatgggaagtcaggtttccactgtctgagaaggaacttacacatctatgtgtactgggtaatgatttaaatagaatttcttatgaggggtgagcccactgggcttccagactcttcacaatgtgcctccacccacactactctccaacctcatctccgcccctgagctctggtcatgctgccttctttgagctccgctcctttcagtctcctggctttagcacatgctgttccctctgcctggaacactctccccatcctttaagttagccacccctattccacctacagattcagcttaaatgtcactttctgtaagaagccttccctaacttcccaatccaaattagattctcccagtgattctctctctcaaattatcccatcggtaactgtatatttgtgttcatttgtttaatgtccacctcccccactagaccaagagcccagcaggggcaggcccagggctagccttgctcactctggcttccctgagcccagcagagtgtcctgtcctttggagactctctagatactgctgctgaaagagaggatcacacaaaggcagcagaatggaatgagagcaaagccacttcctccccccaaacctgggccatcctggaaaacatgcatttgattgtgacagatgagaggacaggggattcagtccattgctggttcctggggactttctaaactcactaaagccaggggcctctctagtcaaaaaataagcacctggcatgtaagcaataaagcaatcgaggaaaggtgaacttatttgtgagaccttggaaagaacaacagtaagaagggaatacatcctctacctgctcaggatctgggaaattctaaaattgtatcacatacaggaatagtagaaaacacgggagctaagctggtgcctgtgagagacctgctttgaggactttaactcagagtattctggcttcagagccattgtcagcacttaacctccagggctctattagcacagggacattatcaatatttctcacttctgaggagcacccgtctccttgcccaggagaaaacaaatttaaaaactacatgtgagcgaggtatctgtgtagtttatgcatttcaggtttcttattaaagccaaggtgataaatgcaaaagggtacattcaaaagggtgtgaaaccgtgacaatacccacagggaagaaaaaatgaattttcatgggaaagcagacatgaataaacaaaaccatgaaaagcatggtcaaaaagctccttgggactgactacctcactccaggtagacagtcccaaccttagagaagaaaatcatttctgggaaggggattaagtatagaatgtactgacattcagctccaggcttgactttcagcccagtctgctattcagctttggccctggaacactgaataggcaaatgcctacttcagcatcatcacaggcatccctggacctgtgcgtggtctgtggtcctgggcatgtgtgtgagtctgtcccatttgatcagcatcatgacctcagacacacaaacaagccctgccatctagatttactgctaacagctaaccatgcacttcagctaacagtgaaggttacttcctgtattaaagtgtcagacttttaaattttgactattaatatgttaaatattgagactgtgataatgatttaaaattctgataaattttctaatttattcttatatcctcgcttattctatgatggtgatgtttgccttcagccttatattgatatgttgaattatatactcagccattcagccaaaatgtatagtatctccaatattaattagcatcctttaaaacactcaatttcataggcaacaatgataaaaacgggtaattgtgaaattcctgaaactaacccagagccctgatatattctatttccacaaggatccgagcccaggaggaacactttttttttcccacccatacttgacctaccagctatgaatcaggggatttcactcctttaatatcatctaccaccactctcaaaaaacaactgcttcctcccagactataacctcccattttccctcatatctcagtgtgaataaaagtctttcttcagctcatgagctaaggaaaaacaaattttaaaaaaggaatgaaagagaccaagggctctatcctgatggtaagtgaaaagggaatgtcaaataatcaaaggttcatgtgagaaacagaggctgtgtgtccccagagcccaggcagtggacagtgactcagcccgatcgggtgagtcatcgggggtacaaccacaacaacaaagcccctccaaaagcaatcacccacaccctcaccattatgaagtcttgtcccctctggggaggctaagcttgaaccagcttgtgcctaggggcagcgaactgccaaggataccattacatttaagagagctcgttctcccaagctatttaaataaatggcgtcatttgctaatctctagctgtatctcatgacaagaggaataattcattttattgaggtcagagcattgggttaatgcagagatttggtttagcagttaagggaaagactatactagtaagctgatatttttcctcctttccttccccag

SEQ ID NO: 735278 - DNA, 71538 bp, Homo sapiens
cggcgaggtcggtcattctgcctgtccggtagcaccacgaaacacctgccactgacacctccccaccagcccccgagggttcgcgcaggcatcccgagccgcgccccctggtccgccgcagccagattccctcccgggcgggttacgcccctaggcgcaaaacggaaccactccgtatgaagaagacaaagtataaccagtcacaccaaagagaggcagcattatttagacagccggctactcccccagagactccacccagtcccctgggcccggcgtccagcgcgcagacggtgcccggctccaggagttccagctccctccacgtgtcctgtcttcccagcagcctcctctgccgcctcgggaggaaaatctcctgacaactcgcggtctgcggactacgactcccaggaggcgccgcgccgcggctctccccgcccccccccgcccccccccccctccccgggacgcgcaggcgccttgggctccgtcaacaagccgggctggcgtcgcctggatgcggtttcttccgggatttgtagtttttctggagctacccgggccgtctgttagagggacaagaactacaagtctcggctgccccagcgctgcgagcctggtcacgtggcgggggccgaccgggcgtgcgtgccgccgttgatccggtgctgcagtgaggagcgtggttcttgcccgtgttgtgtgtgtgtgtgagtgagagagcgagtgagtgagtgagtgagtgtgtgtgtgggggggactcggcttgttgttgtcggtgacttccccctccccttcaccccttcccctccccgccgccgctgcagtggccgctccctgggccgtaggaaatgagcgataacgatgacatcgaggtggagagcgacgctgacaaacgggctcatcataatgcactggaacgaaaacgtagggaccacatcaaagacagctttcacagtttgcgggactcagtcccatcactccaaggagagaaggcatcccgggcccaaatcctagacaaagccacagaatatatccagtatatgcgaaggaaaaaccacacacaccagcaagatattgacgacctcaagcggcagaatgctcttctggagcagcaaggggaaagcgagagctgatcaagttctttgttcctggggaattcacttctcttcctccctcatggaagatgcaagtaaaaggaaatgcaagtaatccgtgcactggagaaggcgaggtcaagtgcccaactgcagaccaactacccctcctcagacaacagcctctacaccaacgccaagggcagcaccatctctgccttcgatgggggctcggactccagctcggagtctgagcctgaagagccccaaagcaggaagaagctccggatggaggccagctaagccactcggggcaggccagcaataaaaactgtctgtctccatcgtctcatcctcctttcagttcgttggtagagccctcagaaccatttaagagactctttatttttctctttctcccttttttttttaaatttttatttttacgtagaagctcttggacaacagctctcgttctccttccccatttccactgtatattttttaatgtattcccttcagggattccctgtccccaacaggaatttttaaaccaaaacaccccaacttggcagctttttctgtggaggacagacggccggccggacctctgagcacatagtgtcctgcccaccctaccagctcctccagccctgccgggcacatgcccgggggacgcctgccctgcccaggtggcctcctggcccgccctcacctctgatagactttgtgaatctgaactgctctactttgagaagatgaccggtttggagtaatcagaatgaaccctcctcctttttaagggttttttttttttcctttttctaaaaagctatgtatcgctcctattgaaagaccagatccttagagaagtttgtggtatagcttctctcagccagctgtttaagcctgcggcgccagcctcacggagggccgtgtgacactctcgtggtatgtatgggagatggcagcagtgaagcagcagccaccagggagtggccatttggggttgggacagggagggtgttttgggtggcatagaggttttgtattgagggccagtgatgatgttttgatatttatttcctgctacttaaatttgaatctgagtgaattgtacctatttctgatgatgtcggtcttgcaaagcgacagattcataaagtaatgatgaaatctttctttcttcccgtgtgtatttctaagaaatagagccaactgattttgtatgtaaataccaagagcaatttacctggtactaaacccgcaccccagtgcggacccttcccagccctcatcccacttcctttcctactgtcctggaacctgtctccattgtgtgatccagccctggttctggctgtggtcagcagatcccagtgaagggttttgtgtgtttaggcctcatttctttgtctttttcctactccgttcctggcatttgctgatttctagtgtatactctgtagtctcagttcgtgtttgattccattccatggaaataaaaagtatgttgtacatactgccgaagaattgtcttgcaagttaaggcttccccctttactataagactataaataaaaacttattttatcctttcttggtggtggtgtcttcttacccttgttaaggccaaggtggttgatgagagacccctctggaagctgttagggcctcaatgtaagtctgagtgagaagtggaggtggcttacccggtcttgcagaaccaggagcagccataagccagagttgcttcccctttctcagctcagcctgagagagtaaatgggtggtgatggctttgttcattggatgaggcttttgaggttcaacagggatgtagccttagctgtggcaacatttctagatctagtttctgctaagcaagtgacctttgggggaattggtagcccagagctgtggttcaggttctcctggtaatgagtgcccagttcagaggtggctgttctccaggacctttcagtttctagatagttccagtttattaagaggaggcagcagagctgccaaggactggaagtcaagaaggctccaactgcaccgagttagctctactcagactgggacccaacaccagcctgaacttgtttgaccttggaagaaaaaggaattatggccagaacgcagctcagtgttggttttcctgtctggctgacaggaaatactgctgttcctagacccagagaggaagtcaagtcaaatcagttcttggatttgtcaccatctttagagtggtggagagcactgtggctcctatcaattgtatgtcaaatccgtaatatctttttttgtttaatgggagctggggcagatgggtcttgtcaatttgaaacatgatcaagcctccaaaggccatgattacattaaggaaaagaaaaatgctgggaaagcaagatcccatttataaaggcacttcttttcaagatagaggaaagaaactgcagtaaggaagaaatggaaatgagaatcagcttattgcctaaagccctcaaggttaacatgctttcctctttttcattgcccttaactatatctctttgtatatctgggcttaagtatacagttggtttgcttagtattggtgttagaagtgagctgtgggtgaagccatgttgatgcagagatggaaggcatgtgaagctggcacccagtagggagatagcaaacaggaaggggcagtcaagccagcatgaggacaggtggtgtccctgagagccagtccctggctccagtgtattggctggacaaaggattgagtttaggcttctctagatttcagtaaaccagttcagacaaggggcacagtggctaggtggctggttcacctaggaaaatccaaaccacctgattgacatggtgagcggactttggcacagggtggaggtaccactggaagcagcttcctgggcaggaacacagggcaggggagctccgcctggaaactgctcagctgaaaaggccaagtcaaagtcacagccaagcaagccccttctggtatgtgtgtctaggaagcgagtgtgagtattccctcaggataccaaagtcggaccatagcttactctctcacagtaatggtaatctctggtttattttttatattactctggacactcacttacacaaaaccagataagctgtagatttgcttggtcactgtggcaggtggcttcactgaggagtctgttaagcgtgctatttccctacctttacagttgccccaagtgcaagggtatttaaaatggcccagtttttaaagttcttgatacgctaaccccattgtaaaacatcaacaacttcttaggtaaagaatctaagctcacagagctgtcatcttagctgagacaggtttaaaaaacaagactgagtagacaataggagccagagccctgaactgggactgaagtaagcagaattctgtttctgatagtatcatgtgtgttttatgcttggcctctgaaagcagactggctgggttcacagtcctgtctctgccactcggtggctgtgttacttctcccagcctcagcatctttatctataaaatgaggataataatagcactagcctcatgagatggttatgaggcttaaatgagataatgcttataatgtgcttgacctcaggaccaagcaagcactgaggtgcctctgctgtcattatctacacaaagcatgtaaccagggctgactcagcaaggtggaaaaagccagctcccagacacctttcctaaagtgagtaagggttgacttcttggtatatcacaaatgcttcccactcctcagagatgtgccccatccttaccaggcacagtgactaaagagagcaaggtgacaccaggactggactgacaaactcttcgagactaaagcagcccctgtgggtacattaattagatctggtgtcaactcgagtgaggctctgcccattccctcccaccacgattcagtggcatctctcaggtttggacacttttggaggcccaggcagaactgctcagaagccccatgtggtgttactcaaagtgggatccttggatcatgcccagggctgcttgttaaaaggattcctgggctctaacccctctaatctaaagtgtgccgtggctcaccagtcagtttaacaagctctttcaggtggtcctcaagtcactcaggtttgactcccaacagtaatataacccggggaaccaaaaggacgctgttggggaagttaggcacagctgagctgaattagcgaagtggttctgaggtcaggatgaaggtgggggaggcgggcttgttaaatagttcaacccttagagctgccttgatgagtctacgtgctcccagcatgcctccaatgctctagggggctggctgagctacccagtttttaaacttgagaaggaagaaagctgagggctgcctacactagcccctttagaagccccaagcaggggtaatgacatggggcagcactcatttctgtagcatgcctaggctggcctctggtccccaggcaggttttataatccagccagagcaagggtctctctcaggcctggtcaccaggatgcattctcaaaagcctctgggaacatgaaactagagcattcctttcttcaaaactgtttctctagcctgaagaggaaacccaggtaggaaaaaagagtttgtcaatgtctacactgctagatagcgaatagagaatttccttcagtgtctagggtttactagggcagcggctaactcatacatccccaaagttcccttgggaagggaataaaaaatagtttctagttaacttcctcagggagaaaaccaatttggctaagccaggcttaactataggtaggactgggtgactgcaccaggcaggcctgtgcatgggttttggaggctctcctggcaaacccttatcaccctgctggtaagtgttgtccttgcttggtgtttcattggggtcggtgttgggaaggagcccagggagcttcagaatgactgccagagcgggtagggctaggggctctgagcccgcctgtctggactgccatgccagctacaacccttacctttggggtgacattgctctggcttcctgtgccattatgtgaggacaataatagcaccaagtgccattgtgaggcttaaaggagtgtgagaagcccatgaattgttcctggcatttaatactcaataaatactgtcaaatcttagatgtgtctgccatcagatgtcctgggtagtgcagccattttttagttttgttaaaatgtggaatgaagctgggcgcagaggctcacacctgtaatatcagcactttgggaagccaaggtgggcggatcacttgaggtcaggagtttgagaccagcctggtcaatgtggtgaaaccccgtctctactaaaaatacaaaaaaattagccgagcatagtgttgcatgcctgtggtcccagctactcgggagactgaggcaggagaatcgcttgaacccaggaggcagaggttgcagtgagccaagatcacgccactgcactccagcctgggtgacacagcaagactccttctcagaaaaaaaaaaatgtggagtgaataaactctccttttcgctgatgtaataagagtttagtatattaaaatccttgaaaggggaggtaaatgtatgttgaatgctaaaaggcagtaaaaatttgcatgttttctgaaagaacttgagcaagaccacaaatctgttaccttttggagaaaaaaaaggagttgaggaatgaaatatacccttgcaggctggctcagagccattaaccattaacatactggcgactttgccctgttcttcattccagtttcagtttgcatttctgcagtgccgggtggcaggcactgtgccaggtgcagatactgcaagtgcatctggtgtctgccccgtgtttcttgcccagggctggttatgacagtggtcagccatcgtttttcagccttccccttcagggaccccttgagcagaatctgcctggtgggtgaggtggagcagatgagcctcatgactgggccgaggggcccgcatgctctagctcactctggatcccatgtgcacgctcgcacacacaacacacccagcaggatgggcgtgtctagaagaatgccgagcaggtggccttggacaattcacaaccagccgagcaggtcccctcctgcgccctgtgctagatgccagctgccccagcaggcctgttgtgactgccaggccccatttaggattgttttcctttgctgtcctttgcagggtggggctcttgtatacccacagcctgctctgggcaaaattatgtagcacggtctctgctattaattttttccagtaaattaaaggctagagaagaagaagaagaaaaatcaaggatccaatattaagaaatctgagcccaaaccttctactccagtgctgaacatggtgaaggattaagcctcctatcaagaaaaacaagcctgacagcctgtagactgatagagggaggtgtgccttctctccagaaagcctacttctgcaggaacccaggagtatggaatgagccatgcaaagtctgattcaaaaaataacccaatgggcatgcacccccagtcactcatccggaatccggctggcagcctggcagcccggcagcccatggctcccatgcacagtgcttgagagcttcattgtttcctgtctgctggtgccatcaacagctctggggtggcaggggcagatcttgggctaaaggacagtggccaacagctttgggccaaaaggccacaacaagaccagccagctaagaggaggaatgtcatgtccacagcgaatacctactgcagcaaggctgtaggagactttggagaggaaggaccctgtttccaacaacttgaccatgtttcccatccagggacctctgtgcagagagtggtggtgagcaagtatttccaactgggagcccccacagagtcagtggctggtctgtgcacttgttactggactcctagcactgtgcttggcttgtggtgggtactctacaaatgctgcatgcatatgtgcgtgtgccagtggactccagccttgtgatgtaccttcatctctgtgcccttgatagggcggttccagggttgcctctgcgtgagttcaaccctcgggtatttgagcagcacgtagcctcagcccagcattgtgctggctactggggcaatctaggcagcttataaaggctgggccttgccttgaagaagcttagagatgaggttaggcatttagcacaaatgcacgtctgggctctgaatgccagaggagttcaggagatgggccctcagtgagagcggtttggcactatgggaggggcagggccaccaggtcatcgcttctcaagctcttgatgggctctccttctgtcctgcccacaagagcccagccttgggctccccatctagctgtccagacaggctgggggtggggggctgttggtgaagggagggtgggccagagccatctgctctgcacaggttgggtcacgattctattccaccactttcactggtcccttggtatccaggcacatggcagccactgctccagagagtgaggagaggggctggggggatggagcctcgcaaggagcatggacacctagcacttacgtcatcaccatcggcatctgccttacctggctacctctctgttcagcacacctgggagcagcacccttgcagcccttctcccttgacagagctgtgacattgaaccctgccctggtctggtagctgagggcccagcctccccttgcctcctttgtcccatcagcccaggccatcatgggtacagaaggtagcaatgaagtctcacactcggggtaaccaacatgcaatacttatggaaagactgtgtgatcaagggttgagagaatagtatactgaacccaaatgtacccattacatagtgtgaacaattatcaacatgcagtactcgttgaaagaaaagggatgataaaaatgcactattattgaaagtaagaaagtgtggggtctgttaaacagacaaaggagcccactgagaaagctcccaaaggccaaaactgcaacaatttgagcaacaaaataaataatgtagcattggaacataatatgaagtataaaataaacgagtccatagtgaaagaaatggttgaataaattgagaataaacatctcccatgtagaattccgggtagtttatgcaggtgctctgccttcaaacatatggagcataactccccacttctgtttgttgttttgagacagagtctcacgctgtcgcccaggttggagtgcagtggcacaatctcagctcactgcaacctctgcctcccaggttcaagcgattctcctgcctcagcttctcgagtagctgagattacaggtgtatgccaccacaccaggctaatttttgtgtttttagttgctatggggtttcatcatgttggccaggctggtctcgaactcctgacctcaagtgatccacctgcctcagcctgccaaagtgctgggattacaggcgtgagccacctccccacttcttaagcgtggactgcatatagtagctaccttctaaaggacacattcaagaaagggacaaaaagtaaccttatggaggaacctgacaaactacctcagccaggcgatgaagggtaacatcagcataaacatgatgaagcaggttgatagtatgtatccttgatgtgtgatgagaatggtactttacctctgtggccttcctccaaaaaactgttacgcatggtctgggcacggtggctcatgcctgtaatcatagcactttgggaggccaagggaggatgattgcttaagtctagcagttcaagaccagcctgggcaacatagcaagagcctgcctctaccaaaaaaaaaaaaaaaaaaatgtaattagctgcacatggtggtgtgtgcctgtggtcccacctactcaggaagctgaccaggaggattgcttgagcccaggaggttgaggctgcagtgagccatgatccactgtactctagcctgggcgacagagcaagacactgtctcttggaaaaaaaaaaaaaaacataaacccatctagtcataaggataacatcaaacaaatcccacctgagggatgttctacaaaatacctggccatacttttcaaaactgtcaaagtcatcaaaaacaaggaaagaatgagaaaccgtcaaaaccaagaggagtctaaggagacatgagacatgacagctcagtgtaatgtagtgtcctgggtgggatcttgggacagaaaaaggccattaggtaaaaactaggggaattcaaataaggtatggactttctttagtaatgtatcaaaattggttcattcattatggcaaatgccacctattagtggaagatgttaatagggaaaactgactaatgggtctgtgggaactctgtgtactatctttgcaatttttctgtcaatctcaaactattccaaaatgtttattttttaaaatgctttttttttttttttaagacagggtcttgctgtgtcatccaggctggagtacagtggcataatcatggcttactgcagcctttacttctcaggctcaagtgaccccccatcttagcctcccaagtagctgtgagcacaggtgtgtgccaccgcatccgactaatttttttttttttttttaatttttgtagagacagagtgtggctatgtcgctcaggctggtctcaaactcctgagttcaagtgatcttccagccttggcctcccaaagtgttgggattacagtcatgagccatcacacccgaactaaaaaatacattgtttttttttttttttttgagatggaatttcactcttgttgccaaggctggagtgcaagggtgcaatctcagctcaccacaacctctgcctcctgggttcaagcgattctcctacctaagcctctaagcctcccgagtagctaggattacaggtatgcaccaccatgcgcggctaattttgtatttttagtagagacggggtttctccatgttggtcaggctggtcatgaactcccaaccttaggtgatctgcctgtcttggcctcccaaagtgttgggattacaggcgtgagccaccacacccggccatgcatttttcttattgttattttgtaagcgctgtatttcctcagggggagcagagggcaagggaaagtttccattaagctgggctaatgatgagcgccctgtccctgccctgcctggttttgttcttggatgtgccagagaagcgggagggaggaacgtgaggccacctggccccagttccccagctggtggaaaacagaggcaaggagggttactgcaggaaagtgtgaggatgtgcaggaacctgttagatgtgcctgggccaggttggagaaagctggctgctgtcaggtcagctcctgggaagacggactcatcacggcctcactgagccacacggcatcacactgcactggtgtggccacacacttggtggcaagtggagacctcattagaagggtgaggggcctgccctatttgctgtcaccatccctgacctagtgacagatggcagctggtattcagggcctcagccatccagcctagaggtaaaccaagcatgtttcaccagtgccccctattccccgagacctctcaccttccttcagaggcctgcggtggtggaagggcatgggctttggaggcagcagatacgggctcgggctcaggcaccaccacttgacagctgggaaaccttgggtgatttacgtaagctctccaacctgtttctccagttgtaaaaggcaggtaatacgcctgcttcacccaccttacaaggtgagtcaaggatcaaatgagaggcggtagaacaggagggactgtcttaggggttattgtttgggcagatgaggcaagagtggtcagcactttttaagcagcaggtaaagccttggtcttggggctaattggtggtagagttttgtatatagtcacgccacatcatgttttggttaacaacagaatgcatgtacgacagtggtcccgtgagatcataatactgtatttttactgtaccttttccatgtttagattcacaaatacttaccactgtgttccagttgcctacagtatccagtacggtgacaagctgcacaggtttgtagcctaggagcaacaggctaccccatctagcctaggtgtgcggtagggtaggccatctaggtctgtgtaagtgcactccatgatgttcacacaacgacgagatcacctgactgcttttctcagggtgtatcctcgtcattaagtgacatgactgtattaggttgctttcagttgcaggtaatagtaagtccaactcacattgtctcatataactgaaaatccagaggccacgtgggcctcgggagccatgtgatcagggccatgtttctcagtctcagagcatatgtgtgtgctggcttctcacgctggtttccttctaggtagaaaaatggttataggaggcccaggccacacattctaccatcccctaataggaaagagctgcttttccccgtcatacagtgtccacgacgtctctctctttagactattttaggtcacatgcttgtgctctgaattgatcactggggcaaggacaaatcatgctgactgacttaagcctgagttactcccaacctgaacaaattactggggcaaagagagataaatgaaaattattggcttagccagtcagggcctgggcctggaggtaggagggcatcaagccctggcaaaccttttggctgccacaggtggggaggagtggcatggatgccaacagtgtccctacaggcttctatcccagtaatcactgtttgagagcaatggccatttgcctctctagcatccatttacccctttggcaacaatcctaatttgcatttggagctttgttccttccccgttcccaaaaactacgtgcttctaatgaagcctcatttccctctcaagggagaggcatgtgaccaagactttggccaattggtgcactgtattctccaagccattggactgcttcttggaaaggcacttggtttgattaaagccagtgaaacacaatgatactcgctggaaggaaggctggggtggaaccaagtgtgcctgtctgctgaacctgaccccaacaggatgtagggtctggagctattggtgctgccattttacaaccccatggagagcctgagattgaggctaatgtagaaagatggagggagggtgaggaacctaataggaccagcctaattcctggactctgcagtttgagtcaacagattgcctcttttgcttcaaaagccagtttgggtcaagttttctaccagttgcaatggtgtcttaaatcatattatactttccttcctattcaaaggcagtaaatgccaccaagcagtgcatgtgggcaactagaatgcttggtccaatccttactatttgtcacttgacactaatattacatgaaaagcatcccagtcatgaaaggtatggaagaatgctcaataataccaagaagggagagcagtgtggaactattgtttactggtattattatctcaggggtgtttcccctgattatccatgaggttctctttatgctccgctccctgtagggtctggcaggcttcccaacttatctggtgttcaaggtgggcctaagggtgaaactggagcccacctggatacagagatctgtattagttttgtgtttattgatgggagaaagtatttggggtcatccaccttgaatgctacataaatgtcttctactcaaggagtcacataataaatctctccaaaggtgcggtggctcacacccgtaatctcagcactttgggaggctgaggcaggaagattgcttgagcccaggagctcgagaccagcttgggcaacgtggtgaaaccccatttctataaaaaatacaaaaattagctagctgtggtggtgtgcacctgtggtcctagctacttgggaggctaaggcaggaagatcttctgagcccaggaggtcgaggctgcagtgagccatgattgtgccactgcactccagcctgggtgcatttgagcaagatcctatctcaaatgagtgaatagacaaatctctaggactcaccttgagggctgtcaggaaaccctctggaaaaggatgtctcatggatatgccagtgtaaactctcctgaaataaccctttctcttctctacccagactaactttacctaccctttggggcccaactcagatccctccttcttggtaaaaagccagttcagactgaagcaatcccttctattaaccacattaattattactgcaattaatctcacaataccttgaggctccgagtgctgagaggattttgccttttgttatagtgatggaaaggatgcatttcaatatgttgccttgcagtgcaaacctttgttaacagggcaaaaatagcacagggggcaggaattacattcctggatgtgcatttggcttatttacatggatttgggtgccctctaaggacaccatcttctctcccctccaagagggtcaggccacaggacatccatgttcttggcctcccatgggagagggtctctcgccagaggaagggaaagccaagtggccacagagttccagcctgtccctgtgacagcccctgcctctggccagacatccacccacccttgctaagtcagcctgctctggggctactaggcccagtccttgctgtctgtcggagacagaccatgaagtgcagtgtgtggagggctgggacatagcataccgaattaccccagggagcttggaaaacatctcttcccactctctgttaggcccacggcttcctctactggaggagacggcatgtgaggatggaactcggtcattcctctgtcaccaccgatgtgaacagtctggaatcctgcacacaggagactgacgatccctgagcaacctttagtagctcctaccattgggcattttcttggtacagatcacaaataagagacatcatagaaaatgttattcttttattatttcaaggaggtaatacatagcccaatatggcaaagcaaaagggaattagaggcagcaaatggccaggtttttctaagcgcctcatgctgcatctctgagctcctgtctgcccgcagcccacagctgcttacatgaaggccaggtcagtagacagatggcccaacttgatactccactgactgagaaagggctcaatgtgcagcacagcagaggcactgccaggacccagcacgctgggcggcaccccacgctgccaccaccagctacagaggctagtgccttagtagcagccagtgtgtctagcacttgattttattcctgtgagcctagagtgggcaggacgtgaataaatcctgagtcataagttaaggtgaaagacttagtagtgttaatactcttggtgagaaaagacaacacagtcttggaggagagtgggcttggagtctggtggaagaaagatagaaacccccagaagggcctcggcctgcaggcactgccttgaggccatcagagggggttttcacggtacatgatagggaggagtgaggcaggtgggcactggagggctgtttcctctggcacagttgaactagagggtcactttccactcataattggtttcctaggtctaagtcaccacacctggggctgaagcaagtcttgcctgtgcaccaagcgtggccttggaccctggagagatgcaaggctcagttctccagtgttgaagtggaaggactcccaactgaaggagatctttctctccccacctccagctcttttcccttacaaatgaccagggtgcaagtcgagaggcagaggcacctcctggtgcaactccaccacagtcttacagagaactcatcttggtgggacccaaagcccagccttggcatgaagcagacttattccacccatcggagggcacccagtctggtgactgaatggtggcgtgcaagtgggagtcagcagtggctctggatgccgtaatactcagatgccattcatctctgtgtgatcgtcctggctggagagctggtgaggagggactgcttcctcctggcatgcactgttcaccaaccacaccacgtgggctgatagatttttggtttgacaggtgtggaaagaatttttaaaaccagccactgtgttctccaaacccagagccattggttttgtttgacaagaaagtaccaagagaaccacagctccactgaggctaaggcttgtgtagcacagaatgcagtatgtattgaaacgtataaaccttgtctgactggggagatgggtgagcaaagagctgccgggacccaggtcctctagtcggttgcaggctctgccgatgtctcatccttaagctcctcaaaacctgggactggcttctgtagaaagtatgtagtggcctggatcaccttgtctggtccaatgttgtacactgggtgagtgggctgctgcaaagagaagaaaaggtgccagttaatcaccccggtggtccttgaaaacataacacatcctttgctccatgaaaggcacttctaagaatttagtataaggaatcagagatacacacaaagcccaaaggttcaaaaatggtgtatttgctaaaactatctagtacatgggacacaggttaatatacagccattataaacacgcatttaaatatttaacgatacaggcaaatacttacaacatattatgtgagaaaacagtatgtacaatactatctcaaactgtttttttttttttttttttttttttgagagagtcttgctctgttgcccaggctggagtgcattgacacgatcttagctcactgcaacctctgcctcctgtgttcaagcaattctcctgcctcagcctcctgagtagctgggattacaggtgtgagccaccacgcctgggtaatttttgtattttttttttttttttttgagacggagtctctcgctctgtcgcccaggctggagtgcagtggcgggatctcggctcactgcaagctccgcctcccgggttcacgccattctcctgcctcagcctcccaagtagctgggactacaggcgcccgccactacgcccggctaattttttgtatttttagtagagacggggtttcaccgttttagccgggatggtctcgatctcctgacctcgtgatccgcccgcctcggcctcccaaagtgctgggattatttttgtatttttagtagagacagggtttcaccatgttggtccggctggtctcgaactcctgacctcaggtgatccacccgcctcggcctcccaaagtgctggggttacaggtgtgagccaccacacctggtctcaaactttttaaaaagtgtatttgtacctgtgatgtatataaatagcaaaaattgtacccataccaaaatattaatagtgatatgattgtttttcattttcttttttatattttatgtatcccaattattaaaacaataaacatgtatttacatttataatcaagaaaaagggggccggacgcggtggctcatgcctgtaatcccagcattttgggaggccgaggtggatggatcacccgaggtcaggagttcaagaccagcctggccaagatggtgaaaccccgtctctacaaaaatacaaaaattagccgagcatgatggtgagtgtctgtaatcccagctagttgggaggctgaagcaggagaattgcttgaacccgggaggcggaggttgcagtgagccaagattgtgccactgcactctaacctgggcaacagcgagactctgtctcaaaaaaaaaaaaaaaagaaaaaaggaccacaaccctaatatgtagtaaggctgtcagatcatatttaaatatataaacaaaatttaaatatgaaatttaaattaaatagatgttattctagtacatcacagaaacccaaaagaaactttagatttgacacggcataatcctaggccaatattcaggattctcccactgtgggataatgaagaaggggacacaactgcaggagagattttaaaaattttgagagaatactaggagcaacctcatgctgaaacatacaaaaattcagataaaacaataatttttaaaaaccaggaaaactgccaaaattgacttaaggaatttttaaaggcctacatgaagaaattagtaacaacaattgcttattctgccacccccacataccttaaaagatactagacctagatggtttctcaggcaagtagtatcaaacctacaaagaaacagataatctctgatctatacaaaccttttaaggactgaaaaaaaaaaaggggctagtgcgggggccaggtacaatggctcacacctataatcccagcactttgggtggctgaggtaggatagcttgaggccaagagttcaagaccagactaggcaacatagcaaaaccctgtctctacaaaaaatttaaaaattagcaggttctggtggtgtgcacctgtagtccctgctacttgggaggctaaggcaggaggatagcttgagcccaggagttccaggctgcagtgagctatgatcacagcactgtactccagcatgagtgacagagtgagatcatgtctctgaaaaagaaaagaaaaagaaaaaaggtaagaggtgcaggaagctacccatttaattttatgaggctatgatattatcctgaaacactggaaaaggacaatacaataaaattttagatcaatctttcttatgaatgtacatgcaaaaaaatcctaaataaaagtactaggcaaacatactggcaaactgaatccagcagtatactgaacaaaacacacagacacagacacactgcctctactatgaccaagaagggcttatcctgggaatataaggcttaacatcagaatattaatgaaacatatcatattaaagaagaaaaatcagatgcggagaaagcattcaataaaatttaacactaccttatgactgaaactaacaaaaacaacctagcaaatcaggaataaaagtgaatatcactaacttgatataatgtaactatcacaaccttacagtaaacatcatgcttaatgatcaggttataaaaagccttcccattataatcaggagcaagagacgaatgccctctactacctttagtcagcactatgtggggatcttacccaacaatacaaggcaagaaaaataaaatggaaactaacttagacaaacttaaaactattaaagagttcaacaaggtggctggacacaagatttataaatattattagcatttctatacactagtaacaaacagttacaaaactgaaaataagaaaagattccagtcacaagagacatgaaaactgtaaattagacataactctaaccgaaaaaaaaaaaatgctagtcctttatggaaaaaattataaaaaaaacactgaaagacattaaagaaaagaaaaattatgttcataaatggaagcctaaatattgaaaagaagtcagttctctttgtactcctgggaagacaggaagaaaaaaaaaaaagttggttctctcctattaatctaaaatgtagtgcaattccaataaaaatcccattagaacttgacaggctgatcctacaattcacaggaaaaagcaaaaggcaaagaatagccaaggcaattttgaagaaaaacaacaaggcagacaggacttgcctacctgttttcagacttgcttaaaagagtgcagataggcaaacagaccaaaggaacaaaataagagagtccagaaacagggccccttcatgtatggaaacttgagggtgtggtacacatgagatacacatcagcaggaaaggttgtagacttcagtaaatggtgctggtcaattggttatccatatggaaaaaagataacattatatccaagcctcaccatacacagaaaccaaatccaagagaattaaaaatctagattaaaaaagcaagctttagactatttagaagaagttacacttaatgacttgctgcattgccttgttcattcccttcatagcacgcatcacaatttgtgatgtatttgtttaatgtgtgcctccttttgtctgcttccctcaaaaaatggtagagattccttaagttaatcctcacctaccctcccccaaaaacaaacccctgaatgacagaaaagacaaatagatttgaccacttcaaaattaaaatattaaaatatttttgtggggaaggggtgctgggggcagggtctcactctatctcccagactggagcaaacagagctcactgcagccttgactacctgggctcaagcgattctcccacctcagcctcccaaagtgctaggtttacaggtgcgaaccaccatatctggcctaaaatcttctatttaacaaaaaaacaccaaaaacaaaatgctatggtttggatgtggtttatttgtccccacaaaaattaatgttgaaatctgatccccaagatggctatgttgagaggtggggtttgtggaatgtgtttgggtttgaggggtggatccctcaggagtgccttggtgctgttcttgcagtagtgcgtgagctctcactcttgctctggggagtctggattagtccttgagggaatggattagttcctgcaagggtaggctgttataaagccaggatgctctcaggctctcctctgtttgcatgggttggcttcccctttgatttccacatgttataatgcagcacaacccttgccagaagccagagccatgcccttgaatttctcagtctatagaaccatgagctaaataaacctcttgtctttatacattacctagtctcaggtattctcttatagcaatgcaaatcagagtcacaaaatgaaaagacaagtcacaagctggaagatattcactacacacatgtaactgatagaagattagtattaaaaatatacagagaactacaaatacttaagggaaaacaactgaagttacccatcagtaagaaaatgagcacagaatatgaactggcagacaattcgcagaagacaacacaaatggccaacaaacatttgaaaatattctcaacctcaccagtaatcaggaaaacacaaaatcaaacaaataccacttcacacccatcaaattggcaaaaaggaaaaggtctgactatggatcgattcatcttacacaaccacactggggagcagttacagaggtatctatcaaagatgacaatatgtgtccccttcaacccagcaggtcccctcctggagacattctaacatgtgaacccaatgagacagataccacaacgttcactgcaacactgtaatagcaaaaaattgataactagcaggagaacagagaaacacactggggtacatttatataagggagtatcatataatagttaaaatgaataaactggagcaacacatgtgaacacagataaacctcaaaaatacaatggcaagtggaaaaagcaatgcagaatgactggtacagtaggtaccattacaaaaagtttgaaaacatgcaagcaactgttatattgcttataaaaaactatatattgcttatagatacatatgtatgtagcaatagcacaaaaacatccacaggcatgatacatgtcaaatttgggacagggttacctctggagaaggagggaggaaaaaaaactggaagagggctacataagaggcaaatagggggaaataattagggcctggaaaagctgggtggtggtttttctgattaagaatgaggttgagcatcttttcaactatctattggccatttgtgtttcttccatttgaaatgtttcccaattaaaagaaacaaagatggggccaggcgtggtggctcacacatgtaatcctggcaccttgggaggctgaggcaggcatatcacttgaggccaggagtttgagaccagcctggccaacatggggaaaccctgtctctactaaaaatacaaaaattagctgggtgtggtggtgcatgcctgtaatcccagctactcaggaggctgaggcacgagaattgcttgaacctgggaggtggaggttgcagtgagccaatatcatgccactgtactccagcctgggtgacagagtgagactttgtctcacaaaaaaaaattaaaaattaaaaaaaaaatttttttaaacaaaaaaggaaggttacaatgacacagatgagaaaataaggcagtgacctagatggtagcagcaggccatgtttacactggtggaagtagggcttagtaagagtagggaactgcacacaaaaattcatgacagtctgcatgggccctgtgatttgatcactggggacagtctccattggattcatgtccaggctcacgtctaggctcagagcacctccaggttgtcctcagctggctgcagcagtgagcatcctgccctcatagggctattgttttttcaggaaagcagacaaacacacattaaacaacacaccaccaactgagtaaagtactacaaagaatatgaacaaggcactgaggcagagcattctggggatctcattctctgaagagatggcatctaagctgagcctctgggagagacgcggcaggctgtacagccagtgccgcatggctgcagtgctatcacgagcctgctgggactcacagcctcagagtgacacgtaactgtggcctcctctaggggaagctaataccagcagtgggctaggtcctcagccctgggataaaggcacaacagctctttgacagatcagaccgcccatctggaaccctgagcttgcccagaggtgcgtctcctctgtggtcacatcctcactaacggctgcacagctcgaagggcagagggaccacaagcttccgcctgtccacacaggaaatgcagagccagttctgcttacttggaaagccttctgtccgcgaggtccctgtggagaaggggtgtgaagccctgcacccgtcttaccagagcgttttcgggcacacccaggaccacatcatgcaacatggctccgctgccgaagtgctgggctatggacaggccgctcaggcagtagcaggtgtggtagaaatcacgcgacctgtaaggacaggcagctctgagcaggcgctcctctgctccgcacacatctacaaatgtagccacaccaattcagagaccactggtgcaatcacacgtccccccccatcctccatgtggctagaggaggcatggttttcccagcagtgttatttaaagccccactggctgagcacagtggctcacacccataatcccagcaagcaggaggctgaggcaagagaacggtttgaggccaggagttcaaaaccaacttgggcaacatgggagaccccgtctctacaaaaaattaaaaattagctaggtgtggtggccgatgcctgtaattccagttacttgggaggctgaagcaggaggatcactcgagcccaagaggtgaaggctgcagtgagtcatgattgtgacactgcactccagcctgggtgacagagtgagaccctgtctcaaaaaagtaaaatacaataaaataaaagccccatcctccagccctgcccagcagtgggaactgtattttttttcttttctttctttttttaccttaaactattaaaggaaactgtaattttaaagtcagtctctccagctgtcttctggaaagggctctccaggggcagtactaatgataaattgatacacttctctagaaaaatacctaaatatctagaaatgggccacatccttcctgatacattgtgggaccaggccttcccctggatgccaagagcagcaggacgtgtgctgggatgggggaagacagagggtgggtaacaaaggtgagaggacttattttatttccctttttctaacacataagccatctcagatttgagcttaatcatttaatccactctataatagttgtcatgattacagtctctgtttacaacactgaggggttttaaaatcctgtatcctattctatttagatcagtttttttttgttttttttaaaaaaaagaagagttatctacccagcaatctgtttccctgtctgggggagggggttgcatgcaggctgggggacaagacgggcagctggaggtgccaagatcaatggcctcaaggggtgctcccaactgggtgctttttcccatacaacctagcgctatgcaggtgctgaaggtgacacctctgctcttgagatctggctctgagtaggcctgaggtgcacgcccctctgctctctcctcccctctcccttccctccccagagagaaaacactcacttgccaggtttatccagaagcccccccgcagggcactggcagcacatcaggatgtactcctgcagggcctgctgatggaacatccagtggctcatgctaagggcagggtcacctgttgaagggcaaagggtcagtaagggcccggcagatccagccaagtatcaatgacctaattccactttctcacctgggggaatagtcaaggtttcctgctccccttcctcttccattcattcttggtacaactgctatcttccccatgtcctacgcacagcatgtcccttctcctgaactttgacatgtgtcaaagagcagcaattcaaagtggcactttcactttcttgaaatgcaccctgttaacgtggatggtgatcctcaaccacatctctggcaggcagtgaaccagcctagctgtttagcttaccttcccagactgacctcggtagctgctcccaacttggtccataactctaccctggacttcaagagacattccctctagcatatctctataacttgttaaccagactgattagctcagagaactcttaatgggtaataaagtctgtttcttctacttttctaagcctaaatttaattgatctccaaagggaattctctaacttgtctctcagctcaaagaatttacctaagaaacattactagtaactgccctcctgcatcatatgataccctagcaaaaactgggtattctggtaatactactaaggtactgacaagcaactggacttcttcactctgaagtccaatcactatggtcaaagaattctgtgggccacacagttatcaagtgggaaggagggacaaatcacggacaggtgtgcagaaacatctgcatagaaatcgattaaaaatatatatacatataggatgtacactaagtccttggtcaattttatattttgatacctgggctaaaagatgcctgacaataaatcatttttaaaaaaaagatgcccaacaattggtaaatggcacctgaaagctaattgttctttcttccagtctttttggttctatgcgtttttctacctagttattataactgtgtagcttatgtttttcacttataccactataggcataaattttctattctattacataatctgcatagccatcactgtgaatagccatatagtatttcattaagtggacatataaggtaactgtatcataaaaagaactgagctaaaaatcttatatatatgtcagtatataaattcctatggtgggccaggcacgatggcttatgcctgtaatcccagcactttgggaggctgaggggggttgatcacgaggtcaggagatcgagaccatcccggctaacacggtgaaaccctgtctctactaaaaatacaaaaaaattagccggacatggtggtgggcgcctgtagtcccagctactcaggaggctgaggcaggagaatggcgtgaacccaggaggcggagtttgcagtgagctgagatcacaccactgcactccagcctgggcgacacagcgagactccatctcaaaaaaaaaaaaaaattcctatggtgaaaattataaaagtttatggtatcaataacctttcccattttggagaaaatagcaaaaaagaaaaacgggggaaaagatttctaaaaataaaaatgaaaagtttatgatacagtctataaagagattgaagcaaaatattaaactgttgaatatttcctttttttttttcttttttgagacagagtctcactctgttgcccaggttggagggcaatggcacgatctcggctcactgcaacctccgcctcccgggttcaagcgattgtcctgcctcagcctcccgagtagctgggattacaggcatgcaccaccatgcctggctaattcttgtatttttagtagagacatggtttcactatgttggtcaggctgctctctaactcctgacctcaggtgacccaccctcttttggcctcccaaagtactgggattacaggcatgggccaccgcacccagcctaaattgttgaatatttcaaacagacaataagaatttattaaatttctttaaaaagagacacagaggaaaagggtttccaaggttgagcactaggtgagggacagtggccaggtgacatttagaggccagggacaaaagcttctcgtcttcaaccctgagtcgcactcagccctgaaacacccattaagagacacaggaaactaagtccgacctaaggagaagcatccaatctcccatctcaggctggctgcaggccacatgctttgatacacttgcactattttaattcccttcctttcttttcctcacctgtaagcacagtgaactttgttgtagaagatacatacatatatgatgggacttcactctatcttcttttacttatttccaaggttgtttccagttccttgccattatgaggaatgctggactaaatctttgtcaatattatgtatgcttaagattattttcttcaaatagactgaccacggtggaattattcggttaaagggaataaacattgttaaggcttttaatagatactgataaactgctttaagaatttatagactactctcagcacaatccctgtggagtagccctgctctgcaggagctgtcaaaaataaatatataaataaactaaaaataaaaacaaagactttatatagctaccagcaaaatttaaaattttgctataccacctccagcattagcacctttttgttgttgttgttgagatgctatcttgctctgtcgcccaggctggagtgcagtggtgtgatctcagctcactgcaacctctgcctcccaggttcaagtcattctcctgtctcagcctcctgagtaccttggattacaggtacaagcccccacgcctggctaatttttgcatttttagtagagacagggtttcactatgttgatcaagccagtctcgaactcctaaaatgatctgcccaactcggcttcccaaagtgctaggattacaggcgtgagccaccacgcccggccagctttagttactttttaaaagttatcagcaattaaaatggtaaaaagaaatagtacctgatagtttattttgatttgcatgcctctgattactaattagggtgaaatttttccataacttgtgtttaatatttgcatttccttatgatggtgtctgtttggcctaatcttctgagatccaatagccaattttattaatctagctttttcttatacttgccccttgtctacatcatatgctgcatctattttctcctttttgctcctctgttttggttatgtgagtttaaaactttttaaaatttttaaaatttaattaatgtaaaacatatatatgttttatacttaatattgtaatcatactattgatttttccttcacgatttcctttttaagaaaatatttaatgtgtatggggatttttggggggatgagtgatgaaaatgttctaaaattgtcatgatggttcgcaactgaataggtaagttgtgtggtatgggaattatatctcaacaaagctattatttaaaaaagcatatttattaaactttaggaaactgcattacacatctgtacaaaatgtacatatatttcatatcctataacaaataaaagactattattataaggtaaatgataacctgtggctaaaattagagtctgaaaagaaaacgctatgtttattatataaaaaactatagactgtttcagtgacttcctatattattaaagcatagaagctcaaagttcaaaagctctacaaggagcttccagatatcctgaatttggacaccagcacacataatcacaacaagatgaaagcagatacgattatagggtgataactgcacactggaatccaccttttaaatcctttctacctcttcctgaaattataggtcgccattctaatctcattttgcatttcaaaggttccttttatctaaaaaaatcaaaagtctttccacaccataactgataggtgcagccatctgtagctcaatttcacaggtaggcaagaaaattccagggtatgtccaaaagaacatataagaaaccagtaactaccaagccaagtggaaactcacaggcctgctgctttcttattgctccacaaaacaaaaaaacaaagtaactcactgatttagtcagcacttgagatttcttaagccttttttttttttttttagacggagtcctgccctgttacccaggctggagtgcaacggcgcgatctcagctcactgcaacctccgcctccggggttcaagggattctcctgcctcagcctcctgagtagctgggattacaggcaacgtggcaccatgcctggctaattttttgtatctttagtagagatggggtttcaccatgttggccaggctggtcttgaactcctgagctcatgatccacccacctcggcctcccaaaatgctgggattacaggcttttgtgtttttttgagacaaagtcttgctctgtcgctcaggctggagttgcagtggcactctctgcctgcaacctctgcctcccagactcaagtgatccttctacctcagcctcctgagtagctaggactacaggcatgtgccaccatgtctggttaactgtttttaattttttgtagagacaagctctcactatattgcccaggctggtcttgaactcctgagctcaagaggtcctcctgctttggcctcccaaagtgctgggattatggtcatgaaccaccatgtccagcattttaaggtactaatagtaattccttcttctactcaaatactgtcatttacacatagaaggtagtcaatggcatggagccactgatggtcacttgctgggtcagggcatggcctagacccacgtgctgcactatgtagagcattctttttgctttttagttagcaatatgatcaatgccttttaaaaaatgtatttgtacatttaccaaaataaaattagtaatgcacatggtttttttttttttaaaggcacagtataatacagaaggatagaaaatctaaaaagttggccaggtatggtggctcacgcctgtaatctcagcactttgtgtggccaaggaaggtggatcacttgaggccaggagtttgagaccagccaggccaacatagtcatatcctgtctctactaaaaatagaaaacattggctgggtgtggtggtacacgcctgtaatcccagctacacaggaggctgaggcaagaaaatcaattgaaccgaggaggctacagtgagccgagattgcaccactgcactccagcctcagcaacagagtgagactctgtctcaaaaaaaaaaaaaaaaaaaaaaaaaaatctaaaaagtctccctccttctgtcttctgtctgcttctcttctcccaaaggtacccattgttcaaggggttttgtgtagggttccaggaaaagctgtgtacatctcgggctgtgtgcccaggcactgctccaggccccgcccccttacacttcatgttgtatcttgcagagctttctatatcagcccatggtatgcagctactgtttggagagatttttattatttaacccttaaccttttgataggcacttaggctgctattgaaactccacttcaatatacatcctttgctaatatccctgcaggtaaattcctgacagtgcacttgctgtgttcaaagggtaagtgcccttataatttaaatggatgtctccaaactgccctccaaaaaatgacttaacctatttacatccccactatcaaattacctgttttctcacactctccccaacatagggtatcaagttttttaatctctgccaatccaataataaaaacaaatagtgccactcttttgattagcatttcttttactacaagtgagctaaacaatttttcgttggattaatggccacctactgtggttatgagcagggcagggttcagatgccagctagtctggattcacacaaccacatactaacccttgtgagtgccaatcaggtattataaagcaatcacttaacctcactgtagtttgtttcctcatctgtaaacaatggtacctatttcatagggttgttttgagaattaaatgagaaaacatatgtgaaatgctcagtacagcccctggcatacagtgagggcttgggaagactccgctaccagtagtagtggcagttgtagtagaaaaagtaagaaggacagttctttcactgggacctctttcttcagatcctttgcctgtttttcagttgggttgtccatccatttcttactggtttgtatgattttttttcaaattaaagaaattagccattcatcacttgttataaatatttttcgcacctttttgcttgttttgtttgtagaatttccctgtttctgtaaaataacttttgttgtctttttttatgcaagaaatacctattaactatagaaagattagaaaatacaaacagaagcaaacatcacctgtaacttcacatcctagatactttctatgaattttttgtagtcaactcttcactaaaaatgggattccacacatattgctttgatatgatcacaatatattgtgactatctttctacactgcatccccttttgactcccaaagtcagtattttgccctcctttcaacacacttcccttctttacagactcctgtctgttccaagttcaagagatgccctgtgtctgagaagacaacacaggccttctcccagccaatgaaaaaagctggaagcaccaagattcataggcacccttttccatagacaaagctttgaatgccactaagccccctagaacatgtgctacaagaaacaattaaccagcagcccccctggaagactttgacaggtggtgctcctgttatagctcattccacatttccctgggattgcagaattactgagtcttatccatgccagggacaggtttgtaaaagactgaccattttaccaggggcttgacctcaccagttccaaataaagagatcaccatgaccccaagtttttttctatcttagaaatgttgggccaggcacggtggctcacgcctgtaatcccagcactttgggaggccaaggcggacagatcacctgaggtcaggagttcgagaccagcctgaccaacatggagaaaccctgtctctactaaaaatacaaaattggctgggcgtggtggtgcatgcctataatcccagctatttaggaggctaaggcaggagaattacttgaacccagggggcagaggttgcagtgatccattgcactccggcctgggcaacaagagtgaaactccgtctcaaaaaaaaataatactaaaataaaaaatgtttgacttggggaattcctgacttccctactggtggtcaaggcagagactgtgcaggctccaaagtcagtgcacttgctgacagtgcacttgctgtgttccaagggtaagtgccttatatgccttaatactgacacctaaagcccagtgggcccaggccgggaaaatgggacagaggctctgcttactttaattcagtgtcagaaatggtcacaactcaacaactcaaaggaaattaagaaactaaataatgaggctcagggccgggtgcggtggctcacgcctataatcccagcactttgggaggccgaagtgggcggatcacctgaggtaaggagttcaagaacagcctgtccaacatggtgaaaccctgtctctactaaaaatacaaaaattagccaggtgtggtggcacgcgcctgtagtcccagctactcaggaggctgaggcaggagaattgcttgaacctgggaggtggaggctgcagtgagccaagatcgtgccactgcactccagcctgggagacagagcacgactccatctcgggggcggcggggaggggggaagacggggggtggggggctcagaaacaggaaaaaaaagtatggggaggggcagaaaagaatctcatcttttacatttgagcagttacattatccaactaagtccgaagaacagcttctctttggacccagggatctcattccaaaaacagatcagcaaccagcagggccccatgacttcctctctcccacaggtctactcagagacacctgctctcacatcaagtacaccagaaagatggtgcaggagttagcaggcagactgaggtttcaagagatagagagagaatgttcccagactttttgctcactaactacttcggttttgcgttcccatttgagaccccacagaaacgaacgtggatttctctactccaatggtgcaggtggaacaaactcccatttaggcttattcaatgaatgtaaaataaaacatttctaatagtgacaactctgcagccagtcagacacggcgagtctcttctccatggtgtaggggcaacccacccctacaacccacccctacacatgggttctggttctctacccctttacgcagttgcctttcctgttgctgttgcaacagtgactgttgcaacactgagggttttcagctctgccctgcacccagaggaggtggcaatcaccacagagcccaggacaggagtgggctgctccttccagataacgcagaagcagcgcccacttcctccccgctccccgtagcaatttcaaggaagctcattctgtcgcagccaatttgaagaagcaaagaatgacactaaaccaatgaaactaaatcttactctgcattcgcatgccccacggcatgaggttccacactgggcactcaaaatccaggatagacagagctcatttcaacccctctaaaaaagcacgctgggcttccagactttgtgagtagtggagggaaatcatccagccccaagtgaacagctccccaggctcaccttgggcgtgcagtgcgcggtggagcaggggcaggagccccgcctgccagaaggagtagcagccatccaccagcttgttgcagcggccctgaaatcctccttcaaatcgcatctgccggcttgtcacccattgctgaggagacacagatgggaaaggcagttgtaggctaaaagagacaaaatccagcccgacagaatctccaggagtcaatctgtgggatggagggtttcccatcttgtggcttcttggcactctagttttggtgctctggttttctttccttccctccccacactgccatagacacagagtgaagcatttaagccaacgctgtagaggcatccagcactgatctctgctcaatgcctggcagacaactaccttttcctgggttccaaagcagtgccagtgctgagaagataaagaggccaagctggtttgtaaggagaccttcaaagtctcttaataaacatggcttaagttggaaattgaaggcaagactaccagtagctcatttctcattacttccctgctccggggagtttattaaaagcagataaatggaatttggtactacatttcttttttttttttttttttttttttttttttttgagacggagtctcgctctgtcgcccaggccggactgcggactgcagtggcgcaatctcggctcactgcaagctccgcttcccgggttcacgccattctcctgcctcagcctcccgagtagctgggaccacaggcgcccgccaccgcgcccggctaattttttgtatttttagtagagacggggtttcaccttgttagccaggatggtctcgatctcctgacctcatgatccacccgcctcggcctcccaaagtgctgggattacaggcgtgagccaccgtgcccggcctggtactacatttcatcagatgatctcaaactgctcctgacttttacttggcacctggggaaatttacccaaggtctcttagcaagtcactagcaggcctgaaagcagaagccattcattctaattaccaaatgacaactctgcccagtctgtggctgatataagaaaatcttttactttgaagctgtaaaataggtcttggtcttgatgtcactcagcggtcacacacgataccaccattccttgcttatctacaagttttctaaacacactctactacaaagatcaagatagtcatgggtttggtccctcagaatgagcagaaccaactggctgagcagatatgacatttccatttccctccctagaccacctaggccgttccagccacggacttacagagctgcctcactcaactgaaagggtacaggggagggtacttcctgtttctagagtcttactaggtaaaggtcctgaaaggagccactgggacccttgatggaagtgggggccagccctcccctaaaagctgttgtttagattattccctcttcaaggcaacacctgcccatagagagtcacagtcacaaatgcttaaaagagacagaaaacactgtactgcaggttcaggtactaatatatcctcggttgatcttaaatgaaccagggcttccagcatgtaatggaagtgggctaagcattactcaggcagagagaaagcaggcgctgcagtgggagtcggttcctcatttctacttaccgcagggcttaagtgtttttaagcagactaatttactttttccagtgcctaagcccatggatttgttctgtttccttgggctataggaattcatacttcagatatgggtcctacttctcccaaagcaaatggaagggagtagtctggattagagcaggggtccctaacccccagaccatgccaggctgcacagcaggacatgagtggtgggtgagccagtgaagcttaatctgtatttacagctgctcctcactgctcccattactgcctgagctccacttcctgacagatcagcagcagcattagattctcataggagcgcaaaccctactgtgaaccgtgtatgccaggcttctaggttgcacgctctacatgagagtctaatgcctgatgatctgtcactgtctcccatcacccccaaatgggactgtctagttgaaagaaaacaagctcagggctctcactgattctacattatggtgagttgtataattatttcattatatattacagtgtaataatagaaataaagtacacaataaatgtaatgtacttgaatcatcctgaagccatcaccccccgtcccacccccaaccccaggtccacggaaaaattatctcccacaaaactggtcccttgtgccaaaaagattattactgtgggttagagggacactaacatttattaagtacctactatgtgccaggctgtttataaatgttctctcctttaaccttaaaaaaataaggattgttatccctaccttataaaagaaaaaaatatcaagctaaaagagattagacaatttgcccaaggactcatgtctcaaatgtagtagggacagggttcaaatctagaacactgtctttataactgaggcactccctaatcacattccttatctctgcctgggagatgggacttttttgtttcatgccttattggtgttcagattttaaaacatctgagaaactcttaagttcagcatacaaagttggctgtttcagcatgagccttcaagccttcatgaatctttaaaaagactacaccgggggaggctttctgaaggtggaggcaagacactgctggttacatgtctacagggtacaacagaaactctccaggaagctcacgatgggccgcataacgggaggctggcatctgaactcagggagaggaggtgcatgtcagttgcagctggtttgctttgacgtcatggtcagggggtacatgctccccaaatgacatgacggggaatgccttctccctggtggccgtggaggtgtgtgtgtttgtgcacccactgatcatttaactacaatctagtgactccctgaagctgactgctttctgagtttcttctgaatactggccaggagcgtggggtccagacataaatgttgggctgccttctcaatgcaattagccagctctgcctaaacaactcatttaaatgtaggtactaaatgtttacacagtgcagcaggtaataaaagtttggtttcgaaatgctgcaaagctcttcttgtaacttttcctcttaggaggttctttctataacacacgataacctctaattctacgaaactgaagtataaggaaggtactctgctcacaccagatgtctgcagcacacagtctatgtagtctacacactatgtaaaaagctctaagcaggaagacagaaaggcagaagggggagccaagacagagcagctgctcactccttcctctgtgttggaacagagctaactctcttagcccttcccatagccaaactctcctgaagcctgcatgtctgagtacaatcacatcaccatgacctggggcctgagagggggatggctcaaaagatacttactaataagctcttcaagttcaaggaacgttccctcttgaggattaccagcgcggccaggccacagaaggtatagccaccatgggcttccatccctggtaccccgccaatgccaccttcccagttctgacacctaagaagagattgagaaaagcagaatgagtggccagtgagtggacgtacacaagaccaggaccatcctaggtggcagagaaaaagttcactcagattaaggtgtgaaccatcacaactatgaatgaaaagatgccaactaattaacttttggaaatgtcttttcaaaaaaaaaaaaaaaaaaaagctgggcctggtggcacccatgtgtaatcccagctgctcaggagactaaggcaagaagatcacttgaggcgaggagttcgaggctgcagtgagctatgatcacaccattgtgctccagcccgggtgaaagagtgagactaggtctccaaaaaatgtaagtataataaaaactgtaaaatgttaaaaacccagacacttagaaacagcctacttgtgtaagaaacataataattcaaattattactctttgggaaaaagttataaaatcatacatatacatatatgtacatatatacacatatatatacatatatatatatacacacatatatatacatatatatacatatatatatagtgataaccatcaagttaaaataaaattaaagagtgattgttgattctagtgatcttttatttttgaaacagggtcttaactctgttacctaggttgactgcagatcatggctcactgcagcctcaacctcctggactcaggcaatcctcccacctcagcctcctgagtagctgggactatgggcgtgccccaccatacccggaccattttttgtattttttgtagagatggggcattgccatgttacccaggctggtcttaaatttctggcctcaaggaatcctcccaccccagcatcccaaagcgttgggatgacaggcatgggccaccgcacttggcctctggtgatctttgagtacaggtctactagtaatatttttcctttttgtttttctatttgttcaaaaagtttttataatgaacctgtatactattaaaaaataaacgttatttttaaaaattataattaggccaggtggtgatggcttcttaaacagcctgcagaaccatgagccaaataaacctcttttctttctaagttacccagcctcaggtattcctttatactgacacaaaatggactaacacaagaaggacaagaaataactgacttagtagaatagagaaacctttcctacccaaaggatagggatgggagaggggcaacaaaaagcaaggtgatctgctccaataaaaggctccaggattagagatacagggaacctccacaaagtggaatgcgtctgaaccaagtttgttggttgcaaacttatataagaatcagacctttaagtcccctactcaaatccagcagaagatgggaagtttcagaggtttaatcaaaaggatctgagttccagaatatccaacaagctaagaggaggagggagcactgtaccaaatgtgattacgtgagagtcagtaatctcaacacaatacccccagccccattcctctgtgtatttcacacaaggctgccagtttcataccccaagcaggaatttagaagattcctctctgagggaactgataagcccaagggaaaaaccctacagacactgctttgagaattccccaatgaatggcttgatcctgcccactctcgcagagctccccagcagcttttcagtgctggatccttaaatatgaacagacagctgtagagtaccagacatttgaccacagtctctactatgaaagaggagaccaaaacaaacaaaaataaattggaggaaataagacagggagcaaaagaaaactttttaaagttgtatctttagataaaatattatatgaagtaagactattgagaggacaaaatatccccagaaaagaacaagagagtagataaaaaagtagtcaggaagtaaaagtagtcagggaggaaaactaaaaataggattacaaaaataaaaacaagaggattagaagataaatactaagagaatctctcaaagtataagaagaaggattaagagatggaaacgaaccatgcaatgaaatatttttatttttatttatttatttttgagacagagtctcgctctgatgccgaggctggagtacagtggcacaatcttggctcactgcaacctccgcctcctgggttcaagtgattctcctgcctcagcctcctgagtacgtgggattacaggtgcatgccaccacgcccggctaatttttgtatttttagtaaagacagggtttcaccatgttggtcaggctggtttcgaactcctgacctcgtgatctgcctgccttggcctcccaaagtgctgggattacaggtatgagccactgcacccggcagtattatttttatttatttatttattttgagatggagtctcacactgtcacctgggctggagtgcaatggtgcgatctcggctcactgcaacctctgcctcctgggttcaagcaattctcctgcctcagcctcccgagtagctgggattacaggtacccaccaccacacccggctaatgttttgtatattttgtagaggctgggtttcactatgttggccaagctggtctcgaactcctgacctcgtgatccgcccgcctcagcctcccaaagtgttaggattacaggcgtgagccaccacgcccagcctcaaagtattcttaaaagtcagacaatcaaatgtactaatgggatgtcatatttttaaaaggctggccaggtgcgggggctcatgcctgtaatcccagcactttgggagaccaaggcaggaggatcatttgaggtcaggagtttgagactaacctgatcaacatggcgaaaccccgtaaaaattagctgggtgtcgtggcgcacgcctataatcccagctacttgggaggctgaggcaggagaatcgcttgaacctgggagaaagaggttgcagtgagctggtctgcaccaccgcactccagcctgggcaacagagcaaggcaccatctcaataaataaataaataaataaataaataaataaataaataaataaataaataaataataaataaataaataagaggctgggcatggtggctcacacctgtaatcccagcacttggggaagccgcagcaggaggattacgtcagcccaggagtttgagaccaacctgggcaatgtggtgaggctttgtctctacaaaaatttaaaaaattagcggatggtggatgcctgtagtcacagctactcaggaggctgaggatgatcacttgagcctggaaagtcgaggcaacagtgaaccatgatcgtgtcactgcactccaatctgggagacacataaaacaaaaagagacgtctcaaaaaaaaaaaaaaaaaaaaaaaaaaaaaaaaaaaaaaaaaaagggcccggcgtggtggctcacgcctataatctcagcactttgggaggccgaggcaggcgatcacttgaggtcaggagttcgagaccagcctggccaacatggtaaaaccccatctctactaaaaatacaaaaattagctgggcgtggtcgtgggcttctgtagtcccagctactcaggaggctgaggcaggagaattgctggaacctgagaggcagaggttgcagtgagccgagatcacgccattgcactccagcccgggtaacaacagcaagactccgtctcaaaggaaaaaaaaaaaagagcaaacacagaaaacacaagagaagaaattatcaaagaaatactgtaataaagaatcttggtactaaagtatatgcacttccaaatcgagtgcccagcaaaatgaataaaaataatccacatcaagattcatcatcaagtttccaaacaagaataaacattccaggccaggcgaggtggctcatgtctgtaatcccagtactttgggaggctcaggagggcagatcacttgaggtcaggagtttgagaccagcctggccagtatgacgagaccctgtctctactaaaaatacaaaaattagtcaggcatggtggcaggcacctgaggttgcagtgagctgagattacgccactgcactccaacctgggtgacagagcaagactccatcacacacaaaaagaataaagattccaagccgctaaagaaggacaggatggggatagaaaaagagagacagaagaaaaaaacatacagagaattaagaatcacaatggcactgccaggtagtacagcacagtggaatccatttgatttctctgtatttctgcttaatataaaatttaaaggctgggtgtggtggctcacgcctataatcccagcactttgggaggctgaggcaggcggattgcttaagctcaggggtttaagaccagcctgggcaacatgggaaaaccccgtctctactaaaaacacaaaaattagccaggtgtggtggcatacacctgcagtcctggctacttggaaagctgaagcaggaggatcacttgaacccaggaggtcaaggctgcagtgagccaagatcacgccactgcactccagcctgggtgacgaagtgagaccctctttcaaaaaataaataaattaaattaaattaattaaattcagtatcccaccacttgacatataaggaaactatgacacagagcagtggaataacttgtccaagcacaaagctaattagaaatggcaggctggccatcgtggctcacacctgtaattccaacactttgtggggctgaggcaggaagattgcttgaaaccaggagttcaagaccagcctgggcaacacagtgagactctgtctttacaagacattttaaaaattagctaggtgttgtggtgcacacctgtggtctctgctactcaggaggctgaggtgggaagactgcttgagcccaggaggtcaaggctgcagtgagccgtgatcatatcactgcaatccagccagggcaacaagcaagaccgtgtcttcaaagaaaaaaaaaaaaagctgggcgcagtggctcatgcctgtaatccttgaactttggtaggtcaaggtgggtggatagcctgagcccaggagttcaagccccacctggacaacacagacagatcccatctctacaaattttttttttaaacattagctggttatggtggcacgcgcttgttgtcccagctacttaggaggttgagatgggaggattgcttgagcccaggaggtggtggctgcagcgagctgtgatcacaccactacactccagctcgtgcaacagagcaagactcggtctcaaaaaaagaaagagagaattgaaagacagaggaagaaagaaggaagagaagaggaaagaaagggcaaaactgggattcaaacccaggctgtctgagttccgtatctagtctgtgcctaaccagtcaacccccctgcaaatgacagctgtacactgaacaaaatacaaaaaaacagcttcctgagggttcagctgactgaaaaagggcaggcagattttggtggagtttgaaacttggaacagagaacagcatgcagttagtccctcccttcccccacaactttttctctctggtttgccctcaggatggcagccatagcccagggcggcagcagcaggccaggggtcaggggtcagggcgggcagccaacactctaatgggaagccaaccatccttctggcaggaagatgcaggctgccagaaactgaggacgaatccagaaacaggaaagtcaaagaagaaaaatcccaaattctgcatttaaactcagttcaagtttccacatacgtgctggggaaacaaagcaacttctaagcaagaactgagctctgagctgctgcatgagtgacagtttgtagcttgagtctgaccaagttgactgcctgctaaactgaaaacatcaaccccttttggggcaaaccaacagaatccataccgttctgttgtatgacacctccaccatcatatcacaatgtctaggacacaacacaacatcactcagcacaggaagactcatggagctgacatgccaactccaggacacacagatgtggaaattcccagacaagcaatttaaagcagacattataattccatacttaccacagcaaaatgaagaaaaatgcactcataaagaataaaaagatggaaaatctcagctgagaaacacaaaatataaaagagaaccaaacacaggcagtgcctactctccagctctcaactatagctgccttaccattgagcatgacagtcctcaatgaactctggttactattatcagccttattaacaatgacattggaagccagaagataatgaagcaatgcttacaaaattcagaaagactacagtttataccattgccaagttagaaatctctaaccaaataattaagtgtgagattagaacacagatacatgcaagatattaaaaatgtatctcccaggtacccttttttgggatctgttggagtacaatacttcatgaaaataagaaaaccaagaaaaaggaggacagggacttcaacgaaggagagaaatgaagtgaatttcatgctgaaaggaagcttcgggatgcctgctgtgtagcaagctgagagcaatctgtccagactgaagcaggagggcagagggctccagaaggggcaactcaaaacgcacgtgtgcacagagacaggttacctgaagggtttgactatgtttagagtaattttttatagctctgacagacaatttgggaaggaattcataagtacattcatgatatatccattaactccaggaaaatgaaactcatacaaaaaagtaaacatgatctcagcatatcatctggtatcactgtaaattatatttatatggtaatacatactactttgataaaaataaaatttttttaactaaaacagtatctcagcttggctatcattccatcatagtatatatgtgtctactataccttttgcttctttttttgagatggagtctcgccctgtcgcccaggctggagtgcagtggcgtgatctcggctcactgcaagctccgcctcctgggttcactccattctcctgcctcagcttcccgagtagctgggactacaggcgcccgccaccatgcccagctaattttttgtatttttagtagagacggggtgtcaccatgttagccaggatggtctcgatttcctgacctcatgatccgcttgccctggcctcccaaagtgctggaattacaggcgtgagccaccgcacctggcctgctttttttaaactatgaaatatttggagcatccaggaaagtacagcaaacaaaatatagaacatacacgtatctaagacctagcttagaattagccatatacacttcaggtctttgttgttgttaactattacagctgaagtctcctatgcagacttatctcatttcctttgctctcccctcagcgggaatcactatgctaaatttggtgtttatctttcgtatacatgtttttatattattaccacatgattcttctcagaaacaatacagaattctcttgcatgtttcaaattttaagtaaatgtgctaatctgtatggtttttttgtatttttttcttttcattctttcaactcaacatagagatttttccatattgatacatgtaactctagttcattcattttcactgctacattatattccgatgcaactataccacacttacccatctcgtgcttatgagcactgaatctgctttcagcttttggctcttataaacaagtcctgtgctcctctctcccattcgtgtgtgcaagggtttctgtgggagtggaattactgggtcctacgcaagggcacctttgacatactgtcaaattgctctaaaaactggttaaatcaattcaggctctcactaatattgtttaccaaagttttttatctttgccaatctaaaatataatataacattaaagaaagtttggaaaaaagaagacattttaagtatttaaaaaaatcattagataaccctaatggatctcctgtgatttttgtatttccttccaagtccctctgcattttctttatttttctgaagtagtgtcgtgaccgcctgctctccaagaggccaggagaaaccctggcttctctcaccttgctatccattcagcagtgccctcaaagaggtctggagtgatgatgttggtcagcgaggctacggaggcagcacagtatgcgcttctggaaagacagaaacgggaaacacattaagctctacggaagagctaatgaggctcagtgaactccgcgggcggactgctcgccttgcctagtaagctgtaatcacctcctgtcctcactcttggcacacggtcagtcctcctgggtctccaactgagaggtgtgacattctatttggatagagttgctcacggcatggcttcagtgaaagaacatgacattctattctccctacctccacatggtccaatctacatcagaggaaataacagccatatcaattcatgtcaaaagtggattcagctcttctttcaaagacctataatggttgccataaatctatggtatcattcaggtacttctgatatgctcattcatttggatgttagtactgtttcagagccaggatttctgtttacagccttgacacattaaagattaactatactttttctgcaacagataaactgcaaaacaggccaccaaattgtaatagatcaaacaaggataggaacaggtgagtccactccaatacagtccttaaacctctagagggagaaaagagccttgatttcaaacctctcaccagtacacacacacacacacacacacacacacacacacacacacgttaaatgaaaaaggcgcacgtctatattttttgttttgcttttgttttggtttttattgagacagggtctcactctgtcgcccaggctagagtgcagtggtatgatctcagctcactgcaacctccgcctcctgggttcaagcaattctcctgtatcagcctcccaagtagctgggattacaggcgcatgccaccatgcctggcttatttttctatttttagtggagatggggtttcgccatgttggctaggctggtttcaaactcctgacctcaagcaatccacctgccttggcctcccaaagtgctgggattacaggcataagccaccgcgcccgggctattttttaaaaaagcattattaggctgggcacagttgctcatgcctgtaatcccagcactttgggaggctgaggcaggtggatcacgaggccaggagttcaagaccaacctgaccaatattgcgaaaccccgtctccactaaaaacacaaaaattagctgggcatggtggcgtgtgcccgtagtcccaactacttgggaggctgaggcaggagaaccacttgaacccgggaggcgggggttgcagtgagccaagatcatgccactgcattccagcttgggcaacagagtgagactctgtctcaaaaaaaaaaacaaacacaaaaaattattatacttgatttaggatcattcttgctgttccatcctcccagccctaattcttctcggggcacattttatttcagcttctccctctgtcatggtatacacacacagactgcctttccttcccctctatggttttttcaaatacccggcacagggaagacaaaaatcattggtttgaattctgctcaaaaatccttctcctggccaggcatggtagctcatgcctgtaatcccagcactttgggaggctaaggcaggtggattatttgaggtcaggagttcgagactagcctggccaacatggtgagacctcgtctctactaaaaatacaaaaattagctgggcatggtggcacacgcctgtaatcccagctacttgggagaccgaggcaggagaatcgtttgaaccccagagacagaggttgcagtgagccaagatcccaccactgcgctcctgcctgggcaacagaaagaaactccatctcaaaacaaaacaaacaaaaagtatattcctaagggctcctaagaaacataaaagaagggcctagtttccatcttcttttttttttttaagataggatctcactttgttgcccaggctgcagtgcagtggcgctatcatggctcactgcaacctcaaactcctgggctcaaactgatcttgcctcagcctcctaagcagctgaggctacagatgcatgccaccacacctggctaattttttaaaaattttttgtagagacagggtcttgctgtgttacccaggttggtcttgaactcctggcctcaagtgattctctcatctcagtctctcaaagtgttgagattacagacatgagccactgccgctcggccctggtttccatcttactcagtatagatataacatgaagtcagacttactgaggtattccaaagaagtctctgcagaagctgcatgcattatgatcctaccagcatttttagcagccaaaggcacagtggaagtttagttccaccagcaggcattgggagcacacaagagtcacaagtgccaatgccaaatgtgatcatctaccagcagctaattttgaagatctgtctaatttccttgcaattgtaggcctcttaaagaggctcagatgcatttgctcttgaatcctattgtgacttgtgaggtaggaggcgacctataatacagtttgcctctcacaagtgtgaggactaagaagtgatgacagaagacaggagtcccaggtctcacgctgagatggggaggaaacgtaatacaaccttttcatgtatttctccccctttccctccacccagtcatcgcagctctcaaatttgaatttgtccactaactttccatccttgctgccatcacccaaatccaagccttcttcaacctggatcagtcttcctgctctctctccctccagccctgaaaccagagggcttttattggaacactacagtccatcactgcaattgggaaacttctaagaaaatacaaatcagatcacatcactaaactccagactccataggagatttcagggcctctgtagcctgttcccagcctgtccctccagctccactgctcccctgcccaccaggccatctacacttcaacactgaacttgtcctttcttgagcaacacatgctttctcaccaaacttctgcaaatgctagatccctgcctccaccttatcctcacagaatgatctagattatataacctagaaaggaggtctcctttcttaagaactgagaaaaaatagtgcttgctatgagttcactgtgatttgattttttacaatacactggaactacagacccttgagtaggctcatctctgaaactatcagcagtgtaacagagcagaaagatcatccagagactgctgtctatcccagaagggcagcgagctagtctccagatgtcaaactctcccatcactgctgcttttctccaagtcaaatccacccaaacaagcactcctgaggactggctgatgcttccaggcaaaggacaatgaaagaaatgccaagtgaaaaatgatggaatcggggtactagaaaccaggcaaagcaaggaaaatggatgcaatctgctagcttttctctatcattcatatctttaatcctttatgtaaatagaaagcacgggcacgaatggcagagcatcacccaaagagcaaaggtcagggaagaatatggctacagtgcttggcaggggaaccaagctgccttactggagaagtttcctagcatttatctagaacatataaataaagagcatagggaaaaaaaaagtgctggaatgaataagatagcaaataatcacagctgcaaaaggtatatgataaaataccaaaaggatcttgctatgatttgtttgcttttgcctaataatcttagtaggtttttaaaagctgcgtttcaagactgtgcatattttgggggaatagcaacagaacaggaacgaaaatgtagtgaacacgagggaaaaaaactcttttaacattttccttaagaagaatcaacacatactgatttacctcagtcgttctactggtttcactggtatacacagatcctaatctaatttttttggttggattagacaagttagagatagaagaacatcttgaactaaaggcctttgcagcctgattacctattatctgtaatgtattttatgctccacaatgttcgtggttttttcctcccctatactttcaaaccaatggttaaaccagatgcttaagccagactattaatcaacttgtgtagaagcaaacccatttacacataggcagtaagacagctttgctatagaaacctcacaaaatgtatttctcaactaaataataagaaaatggcataaaatctcaataagccactgtcttagagaaatggcttattcaatgaattccctgtatgcctcataagtaatctgccaggtgaggaagcaacttgcttggtacatcagacacttatggaagaaaataataatttcgagctaactggcaccaatcagttaatgcgattttattgcactgcactctcccggcccacaaggctctctgcacctcccagaaaaactctcatgtgcctcaggaggacctcagggattagacattctcatgatttcatcaaattcactcagaaggtatttactgaggccctgctggactttcccctcccttcctatctcagagaggtgaaggaatacattacaccatacagttatttatattgtggtatatcattttgtaccaaacaaatgtatttttaatttctaaaacaaaagcatttgtttcttatattttcacatttacataaaataagtcaagtgatcatgacacctgaggacatctgcatcacatctgaatgattctgacgtgtcactgacatgtcatcccatgtgtcattctgggacaaagcagcagcttccccatgatgttccttaggcttggcatctctaatggcagatgagctctagagtcaactgatgtggcagcctgtgcaaaaccccactcacctcacatccacctcacctccgacatgcatgagaaaggagccgtcaggttgcttcagggagtacaaatactgaagaagcttctctctgagaaacagggaaagaggtaggagaggcaacagtcagtgcgtgtcagcaggcggggaactcctctaggtttctgtcactgctggctttcactgtacctgttaatgatgtcataggcctcctcggtgccaatgatgcacaatgcattgactgctgcatatgtgggtgcaaggtgtggatactgaccgggtcctcctccaaagccaccttctgggctctgacacagctccaggaactgacacacactaggtacacagccaaagggcaaaaacaaagtcagagagcattcatgtcaaaacaccaaattcccactagattccaggcctttccaatgatcccccactccctcaaaagttgaggggaacctctcctcccacttgttgaatataacctctccccaaagggcttaattctctctccagctatcatcatttctgtctgccctcctctgagtttcgtacttaagcgcttgttggtcatgaagcagggaacacaaggctgggaagaaaccgactttcgtagctatggggtaagagtctcccgtgcttcccacacaaacctttcccagactttccactcaacttgctgccctggacctgtggtaccagcctcctcctccttgcctttgggaacctcccagcctttgaattttgccaaaacatggtgctcaactgcttctttccacactaaccatcctagtcaggatccatcacctaggcctatcatgaacatgtaaatagaggtcttctcactcccattgccacctaagcctctgtgggccactgatttctactccaccagtaagaagcaagttttgtttttttgtttttttttttgaggcggggttgccctcggtcgcccaggctgcagtgcagtggtgtgatctcagctcattgcagcatccgtctcccaggttcaagagattcttttgcctcacccttccaagtagctgggattacaggcgtgcaccatcacgcccagccaattttttgtattttcagtacagacaaggtttcaccatgctggccaggctggtcttgaactacctgacctcaagtgatccacccgccgcagcctctgcaagtgctgggattacaggtgtgagccactgcatccggctgaaaaacacatttttaatggagcctgcttccatggctgggagaacagaagagaggcaggctgctctcatgctcaccttaattgcggtaaacataagaggagctgcactgactcgccgtgagaatgcctcccagtctgcgggttcttggagaattctccacgttaattcaaacaggctcccattccctcactgaggggagctgttttctgagggtttgcctccaagcctggcatcaggctgcccagaggttacagtcttgctttaggtgaaatcaagagagccctatcatcagtccggggtcttccgaagtgcaccagaaagggtgccccaggaaagccctggttatcaagctgtttctccacagctcagcagggtcacagccttcccgccaggagaaacctccatttacaacaagcaaactgtctttgcagtgttcatggggccttctttcctgggcgctttcacctcattatttccttgctactgctgccagaaagactacatagcctactctccaagaagacacaagtttataactgtttgccaacatcacatttaattgctttcgatttcagagttcccattatccgggcagagaaagcaaaagcaaacgctgctgccttgctctgtgagttctgaaacgtcacaggttaaaacaacacatacttctttttgcacctacaattttactgtagaaaacacaaggattgaaactgaagttgaaaacaattatgtggcactatggtttttgtttttgattttgagagagggtcttactctgtcggccaggctgcaggacagcggcataatcacggctcactgcagcctcaacctccccagactcaagctatcctcccacctcagcctcccaagtagctagaattacaggcatgagccaccacgcctggctagtttttgtattttttataaagatggggtttcgccatgttgcccaggctagtcttgaactcctgggctcaagcaatcctcccacctcggactcccaaagtgctgaggtcacaggtgtgagccatcatgcccagcatgtgacacatttttaacagcaattaatttctgtagagaacttgaatttgttccttctttccaaatcgtcatcaattcttatgacatttcccagaaacaaatagttaataagctcatgccctaacaaaggctggctgcactagcataccaaaaggtttctgtaccacaaaaagttttagctgatacaaaacttaacagcacattttttaaaagaaagaaaaagagtcacctggttatccactccctttcccagctcctaagatagaatcgtgccgaacgcaacactactgaccctaaagcctcgaattagttaggatctgaatgtaccagacacaccttgataccatccctccatgccaacctccctcagctgacatgctgcatctgactgtctggggctgtgctagagaactggaggttgggcttctcttgatctcagacacttccgtattacagaacattctgatcccaaggctttccaacttgcaccttaaggaattggcaagttgactatgaactaccagctgtcattcacagacttcttagcaattctgaagaccaaaatgttaatgatacttctacatatttaaaaaaaacaaacaaacaaaaaaaaggagccaggcatagtggcttgtgcctgtaattccagtactttgggaggccaaggcaggaggattgcttgaagccagtagttcaagaccagcctgggcaacacagtgagaccccagctctacaaaaaaatatttttttttcccacaaatgtagggggagaaaaacttatcatagagacaagaagttcaccaataaataaaaaattacaagcaaaaaacattgtacaaacaccaagtggcacattttgtgaaaaacaagtattcacaaaatcattcctttagaatatgactgaaagctgcaatacatcaattttctttaacgtcagcaaggcatttcattctagcttacgtgccaattaccagcaaagtgggaaactatcttctatatcatggatcttcaaacccaaaatgtgtgcatcagaatctgtagaaagctaataaaagaatacagagacccagtcctgctgaggtggaaaagatcctgggcctttgtatttttaccaaattctcaggtgattcagatacatgcaaagcttgagccatcactagtccttgctgcacaactaaaattacttggggggtgttttaaaaaaatcccaacacccaagccacacctaattccaattaaaccggaatcactatgggtgggacccaggtggcagtattttttttaaactccccacgtgattccaatgttcagccaggtatcagtgcttctcaaacttgagttgcatagaaattacctgtggatcttgctaaactgcagctctaattcagtagaactagatgggtctgagagtcctctttttttttttttttaggagatggagtgtccctctgtcgcccaggctggagtgcagttgagcgatctcagctcactgcaagctctgcctcctgggttcaagtgattctcctccctcagcctcccgagtagctgggactacaggtgcatgccgccacgcccagctaatttttgtattttttagtagagtcagggtttcactgtgttgcccaggctggtctcgaactcccgagctcagacaatccgcccgccttggcctcccaaagtgctaggattacaggcgtgagccaccatgcccggctgagagtcctcatttctaataagttcccaggtgatagcaatgctcctggtctggggaccacattttgagtagcaatgagatacatctgtgctgtccaataggcagccactagccacatgaggcaatttaaattctcaattaattaaaatagaaaattcagctcttcagtcacacaagacacatttcaagtactccacaactaactgtggctagtggccaatatagaacacgtatagatgtttatagacacctatagacatttacagaatatagaacattttcattatcacagaaagttctgctggacaccaccacttttatcattccatcattaaagagtatgtaaatcttgtaagagggtcaagttcaaagcagggatatcagcgattgcctctcagccttataaggagtttacttgggactcttaggtgatggctgaggactgatctaaagtgattgattctggccaggcgtggtggctcatgcctgtaatcccagcactttggctgaggtgagggggatcacttgagctcaggagttcaaggccagcctgggcaacatggcaaaaccccatctctacaagaattataaaaattaaccaggcacgttggcacccacctctagccccagctactcaggaggctgaggtgggaggatcacttgagcttggggaagtccaggttgcagtgagctgtgattgtgccactgcattccagcccagacaatagagtgagaccctgtctcaatcaattaatcaatgttgattctaaacaccgtcatcagtttggatgaaggattcaaaggcatgtacagtaaataagcatataatacaaaatgagcagcaaaacaaatcagaaaccaataagaataaaacaaatgcaacaggtacaaatagcaagaattacgcttagagatggcaggggtgggggatgggtaaggcacatgaatatgggaaatgactaggaacatagcaggaaaagaccagtaataagggtccacgagttgtgaagaacaacaataaaaatgcttgttaaaagcatcataaatgcagtattagtcagaactgtatctggctctagcctccattttccacctcaaagggaattcacatgagagttgtaaaaatgactactttttttttttttaagtatttggctgggtgtggtggctcgtgcctgtaatccctagactttgggaggccaaggcaggaggatcacttaaggccaagagtttgagaccagcttaggcaatacagcgagaccttatctctatttttaaaataatataaaaagcttaatattacagacaatcacagtgagaaagctacccagcaaaatacctcaaatatacaaaggataattacataaacattctagtaggtaaaaactgagactaatttgtagcaagaagtatttaggttacataaaaaacttcagcactagactaggctatcatagacagacttaaggcctaggataagttataaaaattatagctatgttctgcacaattgggcaggtttaaaaaaaaaaaaacagaaaaaaagattacagctttggaaataggaacagtcatccatgggcagaacggcttaggaggggatgtaaatgcaagatgcatgagctggcatcacatcaagcttgttctcgtactaactaaaacagcttcagcttgatatagtgaagaggaaatctccttccctaggtagaatatgacaatggacaggtgaagacgggcagcatctcttgttgattccgggtggcctctgctgctcacagagtcagacgtgttatttgactcttcatcaagcaccggcaagtctctggatggctgctgttctggaagaatggtcaggtcgaaagttggctactataggccgggcgcagtggctcacgcctataatcctagcactttgggaggccgacgtgggcggatcacttaaggccaggagtttgagaccagcctggccaacatggtgaaaccccatctctactaaaaatacaaaaattagccaggcatagtggcatgcgcccgtagtcccagctgcttgggaggctgaagcacgagaatcgcttgaacccggaaggtggaagttgcagtgagctgagattgcaccagtgccctccagcctgggggacacagcaagactgcctcaaaggaaaaaaaagttggctactttagagcagagtttctcaactgttgacactggggctcagtaattctttggtgcagggaccgtcctgtagaggatatttagcagcacctctgacctgcacccaccaggtgccaacagcacctggccaggaaaaatgcccaggagacaaaggcctagatatggtgtcctcactgaaaggtaaggaaacatacaaactagacttaaaaattaaaaggaaaaatatttaaggggctattccggggataagctactaacaaccttttgaaagggaaaggataaaacactgaaatagcaaaatttgaatttatctttggaaaaatcttacaagctgaaatgtcctaaaatggtttttaagttaaaggcaatttttaaatcttacagaagctaaaaacataactttaacagtgcgatggtctccctgtgaattttattttgctctgtttcactgaagctgctttcagtaacaaagaatgggattctcattagaggatgcttccttcagtgccaaaaccattaagcaaagcaaatgtacttagtctagttccaaaatattaattcattttagataaacacatataaatgtgtgcatataacctcttaaaagagggaagctaggccgggtgcggtggctcacatctgtaatcccaacactttgggaagccaagacaggtgtatcacctgaggtcaggagttcaagaccagcctggccaacatgttgaaagcctgtctttacaaaatacaaaaattagctgggcgtggtggcacacccctgtaatcctagctacttgggaagctgaggcaggagaatcacttgaacccgggaggtggaggttgcagtgagctgagatcatgccactgcactacagcctggcaacaagagcaaaactccgtctcaaaaaaaaaaaaaaaaggccgggcgcggtggctcatgcctgtaatcccagcactttgggaggctgaggcaggtggatcacctgaggtcaggagttcgagaccaacttggccaacatggtaaaacccaatctctactaaaaatacaaaaattagccgggtgtggtggctcccgcctgtatgcctgtagtcccagctactcgggaggccgaggcaggagaattgcttgaacccaggaggtggaggttgcagtgagccaagatcgtgccactgcactccagtctgggcaacagagcgagactctcaaaaaaaaaagaggcaagctgaagtcctacctatggactgggcatggtggctcacgcctataatcccagtgttttgggaggctaaggcaggaggatcaattgagcccaggagattgagaccagcccaggcaacacagcaaggcactgtctctaccaaaaataaagaaaacattccaggctatgaatacattattcttgaaacctctgataccagcagtaacaacctcgccttgctggctttggtcagcggtcatagcagctgacaaaagtattttgtccactagagggaacccagcttatcatattgttccctaaacaaatagaagcacagcagtgaacaaaataggaaagagaaacctttgtgtaagtgtagggggcgtgtgtgttacatgcaggggaaaagaaggcaggaaaataataaaactgcagagctagactttttgactctaggtcaccttaatatatttgtatgaagaaagaaaactgaacgcatttcaaagcatttcatttccctgtgcaagataaataaaaaggcaatattctatttcagctagtctaaaaaaaatcttctatttatatagaagtccttaagatttatctgtatcttactaaaaataatctatttccttatgggtcagagccagtaggctttgttcataacaagtgttttctgcacctagaagtaaccacctcctaggcacaaagcaaaatacattattgggaagtctaagaaatgtttaaaagttcactaaatcaatgcgtagaagaaccacaggtaaagcttttaaggcatctgtgaagcagaaactctcattaactgtcaagtggtttttgaaataaggacaaatcagcttatttttaaaccattccttttttaattacaaaataataaaagatcattgtagaaacttcagaaaatgcaagtaagcttaaaaaaaatgttttgtttgtttgttttttgagacaacagtctccttctgttacccaggctggagtgcagtggtgtgatctcggctcactgcaacctctgcctcccggattcaagcaattctcctgcttcagtctcccgagtagctgggattacaggtgccagccaccacatctggctattttttgtatttttagtagagacagggtttcaccatgttggccagactggtctcgaactcctgacctcaagtaatccgcctgtctcagcctctcaaagtcctgggattacagccatgagccactacatccagccagaaagttcttctttttctttttctttttttgagatggagtttcactcttgttgcccaggctggagtgcagtggtgcaatcttggctcaccgcaacctccgcctcccgggttcaagcgagtctcctgcctcagcctcctgagtaggagccgggagtgcagtaacagaaggagactcttgtctcaaaaaacaaacaaacagcctcctgagtaggattacaggcatgcgccaccacgcttggctaattttgtatttttagtagagacggggtttctccatgttggccaggctggtctcaaactcccgacctcaggtgatccacccacttcgttctcccaaagtgctgggattacaggtgtgagccaccgcgcctggcctttttttttttttttttttaagacagagtctcactctgtcctccaggctggagtagagtggcatgatcttggctcgtcgcaacgtccacctcccagattcaagcaattctcctgccttagtctcccgagtagctgggattacaggcatacaccaccaagccaggctaatttttatatttttagtagagacaagatttccccatgttggccaggctggtctcgaactcttgatctcaggtgatctgccgaccttggcctccccaagccctgggattacaggtgtgagacaccgtgcccagcccagaaagtttataaaatcacttttaaccccatcgtccagaaataactactacatgtatctttctggttctatctatgcatatcatcatctatatttttaatgtatgtaaattaaatcttttaaactattttcatttcacatctctctatataaatacatatattttaacatacaaatatacacattcatatatttattgagacagggtcttgctctgttgcccaggctggaatgcagtggtgccatcatggctcactgcagcctcaaacccctgaactcctgtctcggcctcctgagcagctagaactagaagtgtgcaccaccacgcccagctatttttatttttatttttgaaatggagtctcactatgtcgcccagactggtcttgaattcctgggccccagtggtcctctgaccgtggcctcccaaagtgctggggttacaggtgtgatcatgcgtggccacatttatacattttttaatggttatatagtatttcacagaatgtactgcaccataaatgacttatgttttattttttaaatttatgtattttatttatttatttttttgagatggagtgtcactctgttgcccggactggagtgcaaaggcgcaatctcgactcactgcaacctccgcctcctaggttcaagcgattctcctgcctcagcctcccgagtagctgggatgacaggcatgcaccaccatgcccagctaatttttgtattttagtagagatggggtttcaccatgttggccaggctggtctcaaactcctgacctcaagtgatccacccacctcaacctcccaaagtgcttgggattacaggcgtgagccaccacacccagctttacatttaaaaaaaattttttttaaacattctctactgttgatatttaatttagattgcttccaatgaaaggccctttaaaggctcctctcttcctatgtgacattgccccagaagcggcgctgacacttcctcagaaaagccttcactataaaacaccaagtacacagcctagaaaaaaactcagtcgattttggctcgagttcttccacctcaggcaccccctgtgattctctcttccagtttttcatgggtctgcggcctcctccatccagcgttcagatccaggctcacagaaatccccattttttctttcttctctcacacccaactttcccattgtgcaagagtgaagggaaaactttccaaatatcctgattgtgtaggagtgaagggaaaacttcccaaacaatccccaggcccccgagctggtatttcaaaaacacacgaggctggatgtggtggctcacacctgttatcccagcactttgggaggccgaggcaggtagatcagctgaggtcaggagttcaagaccagcctggtcaatatggtgaaagcctacctctactaaaaatacaaaaattagccaggcacggtggtgggtgcctgtaatcccagctactcaggaggctgaggcaggagaatcgcttgaacccgggaagcagaggcagcagtgagctgagactgtgccactgcaccccagcctgggtgacagagtgaaactctgtctcaaaaaaaaaaaaaaaaaaaaccacgtgggcctttctttgacaattaaattcctgttactgcagaaactgtgtccaactctccttccagtgctggaagcagccaggcttgcagtggcatcccgatgatcaaaacaatgcacttgcctctccctcagaaagcatcctacgtaccacaagggttaatggcctaattctttattatcttccccatccacattcatcacaagacaccctgcccaggaaggcaagaatgagaggttattgttaagacagaatgaatgagacaatgtgcagttctgttcctctgacctgacaatgtgactgaggcaggggctctgtgaccagagaggggccccggctaggcctctgtgtgtcccagcacagctgcctccttgtgctgtggagaaacaaacctggctcagaagtctctcatcccagatgcttcgacctcaagagcaccagaggaagctgagaaattcgagatgctgcctagagcccatgctgcctctcagtggatctcttggatccaattcctggctgccctttcttattccaggtatccctaggactggagtcatgatcagtcttttcttctttaatatataaatggtgatgagtgtctgggaatgagatgccagatcacgaatgccatctgtacaaggatcttgggaagaagctcagttgcttagatctctaatcatcgatcaggtttaggaaaactgagagtcatggcatttgtatgccacaccagtaacacatccagtcccatcaagagctacatggtcgctccaagcaccgggagcggggaggtacttctatagaggtgcgtaggaaaggcaaaggcatttttgttcactggactggcacgtgcttccccacagaagctgttcaaatgcatactgtactttctggcaaaatcttgtctctcagagttgatgattaagacttttctcaaagaccagagtcaagagccaaaagaaaaggccacagaagaaaccagaatccttctcttggaagttcaaagtcttgttctacccaccagcttacattagttttctaaagtggaggagtttcaggaagttgccggaggtcatgagaagagcaaagatttctttgtggcactgtttttttccattccaaacaaacaaaacagaaacaaaacaaaatcccaaactcaaaatacaatttcagagaacaccccagatttcccaaagacagactcactctgtagccactatctgggggatgggttcatctagcagttccaagctgtgcaggatccaatagcagagccatgggcggctggcatccagacactgggagagagacaggagagaaaacatcccttattcacaatcactccaagacactgctgccaaggctgtatctgtctcactcccagcagcctggcaagggggaggagggcacccttgctcaaacaacaatcagtgaataaaggacactttgctttgtggccttagccaggagctgaaatgaccatctgttaaaaaaaaaaaaaaaaaaaaaaaagataacaaggctgggcgcggtggttcatgcctgtaatcccagcactttgggaggccaaggtgggtggatcatttaaggtcaggagttcaagaccagcctggccaacatggcgaaaccctgtctctattaaaattacaaaaattagctgggcatagtgatgtgcgcctgtaatcccagcgacttgggaggccgaagcaggagaatcacttgaacccgggaggcagaggttgcagtgagccgagatggcaccactgcactccagcctaggcgacagagcaagactccgtctcaaaaaaaaaaaagaaagaaaagaaaaaaaagacaacaggattaaaaaaaagatgaccctgaacccagtggatccctccctggcaggcatctaaggaaggctgagcagaggacttcctacaggccaggaggttaggggctgctattttctcggtatagaaccaaggagatatacattctctgaagagatttcctagcttaactcaatcactgattcaacaaatatttgatagtatctacttgtgccaagcactgtattagacactggggggatgataataaaatttggtttctaccgtttatttttttgagacagggtctcgctctgtcacccaggctagagtgcagtggtatgatctcagctcactgcagcctcaacctcccgggctcaagcaatcctcccacctcagcctcctaagtagctgggactacgggcacacaccactatgcctggctaattttttaagtttttatagagacagcatcccactatgttgcccaggctggtcttgaactcctgggctgaagcaattcacctgcctgagcctcccaaagtgctgagattacaggcattagccaccatgcctgaactggtttctgttcttgagatgcttgggatatagaatgtgtgtggttacctgtaggggaagagagcactggacagacatataagttacctcatgtctttctggaaccaacacgtgtacatatacctggagaaatgctgtaatggacgaaaacagagttttgagggagcacgtggaagagactgactaattctgcctggggagctaggaaaggcttccaaaggcaaaatgcagacggctcttgatcctaattaaaccataaatgattattgagcattcaaggctaggcagggtaggtaggagtactgccccagttttataaattaaaatatataaatgaggtccaaagattaacctttttcagattataaaaatagcaaatgtcagaggtgagacaagaacctaggtttttagagtcaatccagtgttctttccgttggcccaagctgctctcttcaaaactatgctgatatcccaagctgtggctaacccaccacctggaaggtaggctggtgagctactgaagacactgccagggatgcagcttaagtttgaatcccagctcctcatcttactcgctatgtgcctttgagcaaatgacttaattttactatgcccatttcattatctgcaaaaaacaagagattgatctacctcatgtagttacaagatttaaataagagaatgcaactgggcgcagtagctcacgcctgtaaccccagagcctcaggaggctgaggcaggtggatcacttgaggtcaggagctcgagaccagcctggccaatatggtgaaaccctgtctctactaaaaatacaaaaattagccaggcgtgatggtgcacacctgtaatcctggccactcagaaggctgaggcaagagaatcgcttgaacctgaggcggaggttgcagtgactcacgatcatgccactgcactccagcctgggaaatacagcgagactccatctcataaattatgagagaatgcatggtaagctttcagcacactgttcaataaattgttagctgatatggtaccaactgtaacataactattgaggacttgagtcaaggattgaaaattcatagcccacaggccaaatctagcccatggatgtgtattgtttaactggtagtagctgcaacatttgtcaggagagtcacatgaaaacgtgatttccggcttcatttggaggaagaaaaaaaaaaaaggaaacaaagatgatttggcaaccctgggtctgcattcccagatggcagtaatgggcaggaaagaagttaagggcacagggtctccagttagcctcagtctccatgcagcccacttcactgatttatgctgcctgcctgggccctacaggcatttgagttggcaaatcattgccacaaataatcaaatgtggaacccaaataaaaagcagattaaaaatagagatgctgctctgtgttaagcagggcagaaagactggagacttcctgttcacattcaccctttgcctgccgctcagtcccatccaacatctgtcccctccaccgtcacccagtcctgacgttgctctgggaaatattaaagatctactcttaaacagtaatgttaaattgcaaggaccactctctatactggtcctctagtcagtatagaaattagatcttattacaagaaagggttttttgtctctttaatgaagatatgaaaagtaatgtacttactagaaggagtggtgaagttggaaaatttgtaaccatcacgatacagacttaacaggtttggacaatagtcctcaataaatgagcgagaaattagatcagcttatagggcaaagggttaagggtgaacaggtaactggcatttagccagctgtcaaggaggtctagataaagcacgtgaaccccttagtcatcatctagtaacagaagaaagccccatcctatctagggtgctccactcactctggaagagactaggttctgccctttcagggctgagtcccagctctgtgacagcaccctacctcctgccagagccacagagaacaaagagtgactctgcaacaggtcagccccaacagtcttttacgtttaaatagaaaaaggaggaggatttggtggataatttgacagcaagagttcctgggtaatgtgtttacctcataggcatctgtcagttgtcgaaggcctcttttcagataatggaagtgcttctccctctgcaaaacaagcctggaaagacaaacagtttataagcccattctaatagcttatgcttccaccatacacacgtatgtgcacgtacacacacacgggtaaacactcagcttcaggacgtccccctgcaatcactgactggataaccagcaacttctctggttccaaagagcaactaaaccagagaaaagaagctcttgtctgaatgtctctaaagcatctgaaaaccatgccagctgacatttagagtgcgattgtctcctaaaggcagtgactttgggctaacggaaaagccgcaatgagcacacgcagccaggcaatgacagtccacccagaaacttcctccagcatctaagaacagatatctttgtgcctccccatcctataagcaatttaaatctgagcctcgccacttccctgcctcagccgctgtcatttcagtcaccccgtctgggatgacttctccaaggcccataatttactccctgcctgcctctcggttatccaactattattctctccctgaaattccacctcccacgtgtgacccacagccctggccagaggaccgtgttctgcagccagtcgctgtccttggctttcaagtcagcaatactggctttaagatggaatgtgccgcccatggccacctgcacaggccgggcaaagcacagaggctgcacttctttcttggtctggcagaagagcctgtgtgactagggaaggaaacaaaaagcacagattgtcaagatgttccccgtgcttgcagattacagaaacaaaggaaagagaaccattccctttgctaggtagtcaattccacaattgtttatcaaattcccactgtacttggctcagagtaagagccttcatgcagtctttttttttttttttttttttcctgagacggagtctcgctctgtcacccaggctggagtgcagtggtgtgatttcagcttactgcaacctccacctcttgggttcaagctattctcctgcctcagccacctgagtagctgggattacaggcacgtgccaccacacccagctaatttttgtatttttagtggagacgggggtttcaccatgttgcccaggctggtcttgaactcctgacctcaggtaatcccctgccttggcctcccaaaatgctgggattacaggcgtgagccaccgcacccagcccttcatgtagtctttacctcaaaaactcttccaattcagaaatgaggtaagtatatcaatggctacaaggaaagaatgggtaggttttgcaagggaaaaacatactactgaggctcaaaagggaggggatatctcatgaagaaaggaatgatcaggaaagtttgtgtgaaaaaggaggaatgtgcgatgagtggccctggcagaaggagaaaattttaattcaattttaattcaagtttaaatagctgcaggtggctaatggctactctactatgctgcacaggtatcaagtgtacaagaggagtgacaggtgggagaatctgacctcaatacagggatgaaagaggaatgggaggaaagcaggagtactgccccagtttaaaaacaaacaaacaaacaaaaaaacaaggatctgggatgctgactaaggcatttctactcaatttactaggcaaagggaagtcctgaaggtttttgagatgaggaaagaaatgatcagaactgtgctttggagaaacagtaggtagtcagtatgtgtttacaaactgaagtatctgaaaatatcgcagtgggcagacagatggggtggggagacagggttagaagctctgaggagctgacccagttggggctacttagggcccgaactagtgtgtgacccgtgatcagctgacttttggatgtgtgggtcttaggatgctgggactgcattcaggtgatgatgtcaatcaggctgctggacacacacgtgaggctcaggagagggattcaggttacacacacagactacgaagcatttgtctgcacacaagtgacaggtgaagccacagaaggtgagagggcagagagagaagtttggaaacaaaactgtgggaagacccatctctaagggtttggaggagccagtgaaggagagaaacaggagagtttacatatgctagggaagagcaaaggaagtgtcatgtcacaggccatcagggaggagagaatttcaggaaggtgtttaacagtggcagatgctgcagcaagactgaggggaaaagacaacaaaccacagaagggctagagacctccaagagcattcagagcagaggtgaaggcaaattgtaaacaagagaaggccagactcagtttctctttcaggaaagtccactcaggacgcagggagcacccatctgtgtgggcagagtgttgtccagcactggggtagaggctgctctgtaccctagagcgacagtccagaggtggacacacatgtgaaaatgacaagcagagccctgtccaataaacgctgtgatcagccacgggaagagatggagggtcagaaaactcttcccaaagggaagagcattgagtttaaggctggaaagacatgagttaagcaggcaaaatgaagaaaacaccatgacacatttgagttagtttagttcagctggatcaaaagtacaaggcagtaagcagagaaattccacattagaaatgcaaaagctcagaggaaatccatagggaaggtctgtaaagaggatggaggagggctgggatgagggtatagtaggagaggtgagcctggaataaggaaggatgctgcattctttgagcgagaaatgatgggtacgaagctagcgaaatataggtctctgatgtgggaagaaggaaacaggaaagtcaggtgggtcagcctcgattttctcaggaactaggagtcaagatggtgggagagctgtggagtggccacggtggtgggtgtgttagggaatctacatgagacgaataaaaggattataaggcagttagtgaagcgccagtgaaattaagaaatataacatgttggtgaagccagtcagcagcctcaggagaaaccaagcctgctgacaccttggtcttagacttctggcctccagaaatgtgaaaaaataaatctctgtggtttaatgcaccccatctgtgataccgtcttatggcagcccaagctgactaataccctcaccggtccttcattctcaactcacctctatccaaaaatcttttctgtgtaggaagttaagaaagaaaaggtagagctcttcctatttttacctgaacaattcagccccaaaaccattcaattacatggagcagaataagacaggtttcgtgcaggacttgagggggtgcagggtgggatgcaggctgtcagctcaagtggatgaggagggcccccgtctcactgtgcagagggtgacaggagagcaagtgggtaaatctattaaggctatgggaagtcaggtttccactgtctgagaaggaacttacacatctatgtgtactgggtaatgatttaaatagaatttcttatgaggggtgagcccactgggcttccagactcttcacaatgtgcctccacccacactactctccaacctcatctccgcccctgagctctggtcatgctgccttctttgagctccgctcctttcagtctcctggctttagcacatgctgttccctctgcctggaacactctccccatcctttaagttagccacccctattccacctacagattcagcttaaatgtcactttctgtaagaagccttccctaacttcccaatccaaattagattctcccagtgattctctctctcaaattatcccatcggtaactgtatatttgtgttcatttgtttaatgtccacctcccccactagaccaagagcccagcaggggcaggcccagggctagccttgctcactctggcttccctgagcccagcagagtgtcctgtcctttggagactctctagatactgctgctgaaagagaggatcacacaaaggcagcagaatggaatgagagcaaagccacttcctccccccaaacctgggccatcctggaaaacatgcatttgattgtgacagatgagaggacaggggattcagtccattgctggttcctggggactttctaaactcactaaagccaggggcctctctagtcaaaaaataagcacctggcatgtaagcaataaagcaatcgaggaaaggtgaacttatttgtgagaccttggaaagaacaacagtaagaagggaatacatcctctacctgctcaggatctgggaaattctaaaattgtatcacatacaggaatagtagaaaacacgggagctaagctggtgcctgtgagagacctgctttgaggactttaactcagagtattctggcttcagagccattgtcagcacttaacctccagggctctattagcacagggacattatcaatatttctcacttctgaggagcacccgtctccttgcccaggagaaaacaaatttaaaaactacatgtgagcgaggtatctgtgtagtttatgcatttcaggtttcttattaaagccaaggtgataaatgcaaaagggtacattcaaaagggtgtgaaaccgtgacaatacccacagggaagaaaaaatgaattttcatgggaaagcagacatgaataaacaaaaccatgaaaagcatggtcaaaaagctccttgggactgactacctcactccaggtagacagtcccaaccttagagaagaaaatcatttctgggaaggggattaagtatagaatgtactgacattcagctccaggcttgactttcagcccagtctgctattcagctttggccctggaacactgaataggcaaatgcctacttcagcatcatcacaggcatccctggacctgtgcgtggtctgtggtcctgggcatgtgtgtgagtctgtcccatttgatcagcatcatgacctcagacacacaaacaagccctgccatctagatttactgctaacagctaaccatgcacttcagctaacagtgaaggttacttcctgtattaaagtgtcagacttttaaattttgactattaatatgttaaatattgagactgtgataatgatttaaaattctgataaattttctaatttattcttatatcctcgcttattctatgatggtgatgtttgccttcagccttatattgatatgttgaattatatactcagccattcagccaaaatgtatagtatctccaatattaattagcatcctttaaaacactcaatttcataggcaacaatgataaaaacgggtaattgtgaaattcctgaaactaacccagagccctgatatattctatttccacaaggatccgagcccaggaggaacactttttttttcccacccatacttgacctaccagctatgaatcaggggatttcactcctttaatatcatctaccaccactctcaaaaaacaactgcttcctcccagactataacctcccattttccctcatatctcagtgtgaataaaagtctttcttcagctcatgagctaaggaaaaacaaattttaaaaaaggaatgaaagagaccaagggctctatcctgatggtaagtgaaaagggaatgtcaaataatcaaaggttcatgtgagaaacagaggctgtgtgtccccagagcccaggcagtggacagtgactcagcccgatcgggtgagtcatcgggggtacaaccacaacaacaaagcccctccaaaagcaatcacccacaccctcaccattatgaagtcttgtcccctctggggaggctaagcttgaaccagcttgtgcctaggggcagcgaactgccaaggataccattacatttaagagagctcgttctcccaagctatttaaataaatggcgtcatttgctaatctctagctgtatctcatgacaagaggaataattcattttattgaggtcagagcattgggttaatgcagagatttggtttagcagttaagggaaagactatactagtaagctgatatttttcctcctttccttccccag

SEQ ID NO: 735279 - DNA, 2027 bp, Homo sapiens
cggcgaggtcggtcattctgcctgtccggtagcaccacgaaacacctgccactgacacctccccaccagcccccgagggttcgcgcaggcatcccgagccgcgccccctggtccgccgcagccagattccctcccgggcgggttacgcccctaggcgcaaaacggaaccactccgtatgaagaagacaaagtataaccagtcacaccaaagagaggcagcattatttagacagccggctactcccccagagactccacccagtcccctgggcccggcgtccagcgcgcagacggtgcccggctccaggagttccagctccctccacgtgtcctgtcttcccagcagcctcctctgccgcctcgggaggaaaatctcctgacaactcgcggtctgcggactacgactcccaggaggcgccgcgccgcggctctccccgcccccccccgcccccccccccctccccgggacgcgcaggcgccttgggctccgtcaacaagccgggctggcgtcgcctggatgcggtttcttccgggatttgtagtttttctggagctacccgggccgtctgttagagggacaagaactacaagtctcggctgccccagcgctgcgagcctggtcacgtggcgggggccgaccgggcgtgcgtgccgccgttgatccggtgctgcagtgaggagcgtggttcttgcccgtgttgtgtgtgtgtgtgagtgagagagcgagtgagtgagtgagtgagtgtgtgtgtgggggggactcggcttgttgttgtcggtgacttccccctccccttcaccccttcccctccccgccgccgctgcagtggccgctccctgggccgtaggaaatgagcgataacgatgacatcgaggtggagagcgacgctgacaaacgggctcatcataatgcactggaacgaaaacgtagggaccacatcaaagacagctttcacagtttgcgggactcagtcccatcactccaaggagagaaggcatcccgggcccaaatcctagacaaagccacagaatatatccagtatatgcgaaggaaaaaccacacacaccagcaagatattgacgacctcaagcggcagaatgctcttctggagcagcaaggggaaagcgagagctgatcaagttctttgttcctggggaattcacttctcttcctccctcatggaagatgcaagtaaaaggaaatgcaagtaatccgtgcactggagaaggcgaggtcaagtgcccaactgcagaccaactacccctcctcagacaacagcctctacaccaacgccaagggcagcaccatctctgccttcgatgggggctcggactccagctcggagtctgagcctgaagagccccaaagcaggaagaagctccggatggaggccagctaagccactcggggcaggccagcaataaaaactgtctgtctccatcgtctcatcctcctttcagttcgttggtagagccctcagaaccatttaagagactctttatttttctctttctcccttttttttttaaatttttatttttacgtagaagctcttggacaacagctctcgttctccttccccatttccactgtatattttttaatgtattcccttcagggattccctgtccccaacaggaatttttaaaccaaaacaccccaacttggcagctttttctgtggaggacagacggccggccggacctctgagcacatagtgtcctgcccaccctaccagctcctccagccctgccgggcacatgcccgggggacgcctgccctgcccaggtggcctcctggcccgccctcacctctgatagactttgtgaatctgaactgctctactttgagaagatgaccggtttggagtaatcagaatgaaccctcctcctttttaagggttttttttttttcctttttctaaaaagctatgtatcgctcctattgaaagaccagatccttagagaagtttgtggtataaaaggaagtggggacgaatagtttactcgtaaagcgggatcctcag

SEQ ID NO: 735280 - DNA, 70684 bp, Homo sapiens
cggcgaggtcggtcattctgcctgtccggtagcaccacgaaacacctgccactgacacctccccaccagcccccgagggttcgcgcaggcatcccgagccgcgccccctggtccgccgcagccagattccctcccgggcgggttacgcccctaggcgcaaaacggaaccactccgtatgaagaagacaaagtataaccagtcacaccaaagagaggcagcattatttagacagccggctactcccccagagactccacccagtcccctgggcccggcgtccagcgcgcagacggtgcccggctccaggagttccagctccctccacgtgtcctgtcttcccagcagcctcctctgccgcctcgggaggaaaatctcctgacaactcgcggtctgcggactacgactcccaggaggcgccgcgccgcggctctccccgcccccccccgcccccccccccctccccgggacgcgcaggcgccttgggctccgtcaacaagccgggctggcgtcgcctggatgcggtttcttccgggatttgtagtttttctggagctacccgggccgtctgttagagggacaagaactacaagtctcggctgccccagcgctgcgagcctggtcacgtggcgggggccgaccgggcgtgcgtgccgccgttgatccggtgctgcagtgaggagcgtggttcttgcccgtgttgtgtgtgtgtgtgagtgagagagcgagtgagtgagtgagtgagtgtgtgtgtgggggggactcggcttgttgttgtcggtgacttccccctccccttcaccccttcccctccccgccgccgctgcagtggccgctccctgggccgtaggaaatgagcgataacgatgacatcgaggtggagagcgacgctgacaaacgggctcatcataatgcactggaacgaaaacgtagggaccacatcaaagacagctttcacagtttgcgggactcagtcccatcactccaaggagagaaggcatcccgggcccaaatcctagacaaagccacagaatatatccagtatatgcgaaggaaaaaccacacacaccagcaagatattgacgacctcaagcggcagaatgctcttctggagcagcaaggggaaagcgagagctgatcaagttctttgttcctggggaattcacttctcttcctccctcatggaagatgcaagtaaaaggaaatgcaagtaatccgtgcactggagaaggcgaggtcaatggccatttggggttgggacagggagggtgttttgggtggcatagaggttttgtattgagggccagtgatgatgttttgatatttatttcctgctacttaaatttgaatctgagtgaattgtacctatttctgatgatgtcggtcttgcaaagcgacagattcataaagtaatgatgaaatctttctttcttcccgtgtgtatttctaagaaatagagccaactgattttgtatgtaaataccaagagcaatttacctggtactaaacccgcaccccagtgcggacccttcccagccctcatcccacttcctttcctactgtcctggaacctgtctccattgtgtgatccagccctggttctggctgtggtcagcagatcccagtgaagggttttgtgtgtttaggcctcatttctttgtctttttcctactccgttcctggcatttgctgatttctagtgtatactctgtagtctcagttcgtgtttgattccattccatggaaataaaaagtatgttgtacatactgccgaagaattgtcttgcaagttaaggcttccccctttactataagactataaataaaaacttattttatcctttcttggtggtggtgtcttcttacccttgttaaggccaaggtggttgatgagagacccctctggaagctgttagggcctcaatgtaagtctgagtgagaagtggaggtggcttacccggtcttgcagaaccaggagcagccataagccagagttgcttcccctttctcagctcagcctgagagagtaaatgggtggtgatggctttgttcattggatgaggcttttgaggttcaacagggatgtagccttagctgtggcaacatttctagatctagtttctgctaagcaagtgacctttgggggaattggtagcccagagctgtggttcaggttctcctggtaatgagtgcccagttcagaggtggctgttctccaggacctttcagtttctagatagttccagtttattaagaggaggcagcagagctgccaaggactggaagtcaagaaggctccaactgcaccgagttagctctactcagactgggacccaacaccagcctgaacttgtttgaccttggaagaaaaaggaattatggccagaacgcagctcagtgttggttttcctgtctggctgacaggaaatactgctgttcctagacccagagaggaagtcaagtcaaatcagttcttggatttgtcaccatctttagagtggtggagagcactgtggctcctatcaattgtatgtcaaatccgtaatatctttttttgtttaatgggagctggggcagatgggtcttgtcaatttgaaacatgatcaagcctccaaaggccatgattacattaaggaaaagaaaaatgctgggaaagcaagatcccatttataaaggcacttcttttcaagatagaggaaagaaactgcagtaaggaagaaatggaaatgagaatcagcttattgcctaaagccctcaaggttaacatgctttcctctttttcattgcccttaactatatctctttgtatatctgggcttaagtatacagttggtttgcttagtattggtgttagaagtgagctgtgggtgaagccatgttgatgcagagatggaaggcatgtgaagctggcacccagtagggagatagcaaacaggaaggggcagtcaagccagcatgaggacaggtggtgtccctgagagccagtccctggctccagtgtattggctggacaaaggattgagtttaggcttctctagatttcagtaaaccagttcagacaaggggcacagtggctaggtggctggttcacctaggaaaatccaaaccacctgattgacatggtgagcggactttggcacagggtggaggtaccactggaagcagcttcctgggcaggaacacagggcaggggagctccgcctggaaactgctcagctgaaaaggccaagtcaaagtcacagccaagcaagccccttctggtatgtgtgtctaggaagcgagtgtgagtattccctcaggataccaaagtcggaccatagcttactctctcacagtaatggtaatctctggtttattttttatattactctggacactcacttacacaaaaccagataagctgtagatttgcttggtcactgtggcaggtggcttcactgaggagtctgttaagcgtgctatttccctacctttacagttgccccaagtgcaagggtatttaaaatggcccagtttttaaagttcttgatacgctaaccccattgtaaaacatcaacaacttcttaggtaaagaatctaagctcacagagctgtcatcttagctgagacaggtttaaaaaacaagactgagtagacaataggagccagagccctgaactgggactgaagtaagcagaattctgtttctgatagtatcatgtgtgttttatgcttggcctctgaaagcagactggctgggttcacagtcctgtctctgccactcggtggctgtgttacttctcccagcctcagcatctttatctataaaatgaggataataatagcactagcctcatgagatggttatgaggcttaaatgagataatgcttataatgtgcttgacctcaggaccaagcaagcactgaggtgcctctgctgtcattatctacacaaagcatgtaaccagggctgactcagcaaggtggaaaaagccagctcccagacacctttcctaaagtgagtaagggttgacttcttggtatatcacaaatgcttcccactcctcagagatgtgccccatccttaccaggcacagtgactaaagagagcaaggtgacaccaggactggactgacaaactcttcgagactaaagcagcccctgtgggtacattaattagatctggtgtcaactcgagtgaggctctgcccattccctcccaccacgattcagtggcatctctcaggtttggacacttttggaggcccaggcagaactgctcagaagccccatgtggtgttactcaaagtgggatccttggatcatgcccagggctgcttgttaaaaggattcctgggctctaacccctctaatctaaagtgtgccgtggctcaccagtcagtttaacaagctctttcaggtggtcctcaagtcactcaggtttgactcccaacagtaatataacccggggaaccaaaaggacgctgttggggaagttaggcacagctgagctgaattagcgaagtggttctgaggtcaggatgaaggtgggggaggcgggcttgttaaatagttcaacccttagagctgccttgatgagtctacgtgctcccagcatgcctccaatgctctagggggctggctgagctacccagtttttaaacttgagaaggaagaaagctgagggctgcctacactagcccctttagaagccccaagcaggggtaatgacatggggcagcactcatttctgtagcatgcctaggctggcctctggtccccaggcaggttttataatccagccagagcaagggtctctctcaggcctggtcaccaggatgcattctcaaaagcctctgggaacatgaaactagagcattcctttcttcaaaactgtttctctagcctgaagaggaaacccaggtaggaaaaaagagtttgtcaatgtctacactgctagatagcgaatagagaatttccttcagtgtctagggtttactagggcagcggctaactcatacatccccaaagttcccttgggaagggaataaaaaatagtttctagttaacttcctcagggagaaaaccaatttggctaagccaggcttaactataggtaggactgggtgactgcaccaggcaggcctgtgcatgggttttggaggctctcctggcaaacccttatcaccctgctggtaagtgttgtccttgcttggtgtttcattggggtcggtgttgggaaggagcccagggagcttcagaatgactgccagagcgggtagggctaggggctctgagcccgcctgtctggactgccatgccagctacaacccttacctttggggtgacattgctctggcttcctgtgccattatgtgaggacaataatagcaccaagtgccattgtgaggcttaaaggagtgtgagaagcccatgaattgttcctggcatttaatactcaataaatactgtcaaatcttagatgtgtctgccatcagatgtcctgggtagtgcagccattttttagttttgttaaaatgtggaatgaagctgggcgcagaggctcacacctgtaatatcagcactttgggaagccaaggtgggcggatcacttgaggtcaggagtttgagaccagcctggtcaatgtggtgaaaccccgtctctactaaaaatacaaaaaaattagccgagcatagtgttgcatgcctgtggtcccagctactcgggagactgaggcaggagaatcgcttgaacccaggaggcagaggttgcagtgagccaagatcacgccactgcactccagcctgggtgacacagcaagactccttctcagaaaaaaaaaaatgtggagtgaataaactctccttttcgctgatgtaataagagtttagtatattaaaatccttgaaaggggaggtaaatgtatgttgaatgctaaaaggcagtaaaaatttgcatgttttctgaaagaacttgagcaagaccacaaatctgttaccttttggagaaaaaaaaggagttgaggaatgaaatatacccttgcaggctggctcagagccattaaccattaacatactggcgactttgccctgttcttcattccagtttcagtttgcatttctgcagtgccgggtggcaggcactgtgccaggtgcagatactgcaagtgcatctggtgtctgccccgtgtttcttgcccagggctggttatgacagtggtcagccatcgtttttcagccttccccttcagggaccccttgagcagaatctgcctggtgggtgaggtggagcagatgagcctcatgactgggccgaggggcccgcatgctctagctcactctggatcccatgtgcacgctcgcacacacaacacacccagcaggatgggcgtgtctagaagaatgccgagcaggtggccttggacaattcacaaccagccgagcaggtcccctcctgcgccctgtgctagatgccagctgccccagcaggcctgttgtgactgccaggccccatttaggattgttttcctttgctgtcctttgcagggtggggctcttgtatacccacagcctgctctgggcaaaattatgtagcacggtctctgctattaattttttccagtaaattaaaggctagagaagaagaagaagaaaaatcaaggatccaatattaagaaatctgagcccaaaccttctactccagtgctgaacatggtgaaggattaagcctcctatcaagaaaaacaagcctgacagcctgtagactgatagagggaggtgtgccttctctccagaaagcctacttctgcaggaacccaggagtatggaatgagccatgcaaagtctgattcaaaaaataacccaatgggcatgcacccccagtcactcatccggaatccggctggcagcctggcagcccggcagcccatggctcccatgcacagtgcttgagagcttcattgtttcctgtctgctggtgccatcaacagctctggggtggcaggggcagatcttgggctaaaggacagtggccaacagctttgggccaaaaggccacaacaagaccagccagctaagaggaggaatgtcatgtccacagcgaatacctactgcagcaaggctgtaggagactttggagaggaaggaccctgtttccaacaacttgaccatgtttcccatccagggacctctgtgcagagagtggtggtgagcaagtatttccaactgggagcccccacagagtcagtggctggtctgtgcacttgttactggactcctagcactgtgcttggcttgtggtgggtactctacaaatgctgcatgcatatgtgcgtgtgccagtggactccagccttgtgatgtaccttcatctctgtgcccttgatagggcggttccagggttgcctctgcgtgagttcaaccctcgggtatttgagcagcacgtagcctcagcccagcattgtgctggctactggggcaatctaggcagcttataaaggctgggccttgccttgaagaagcttagagatgaggttaggcatttagcacaaatgcacgtctgggctctgaatgccagaggagttcaggagatgggccctcagtgagagcggtttggcactatgggaggggcagggccaccaggtcatcgcttctcaagctcttgatgggctctccttctgtcctgcccacaagagcccagccttgggctccccatctagctgtccagacaggctgggggtggggggctgttggtgaagggagggtgggccagagccatctgctctgcacaggttgggtcacgattctattccaccactttcactggtcccttggtatccaggcacatggcagccactgctccagagagtgaggagaggggctggggggatggagcctcgcaaggagcatggacacctagcacttacgtcatcaccatcggcatctgccttacctggctacctctctgttcagcacacctgggagcagcacccttgcagcccttctcccttgacagagctgtgacattgaaccctgccctggtctggtagctgagggcccagcctccccttgcctcctttgtcccatcagcccaggccatcatgggtacagaaggtagcaatgaagtctcacactcggggtaaccaacatgcaatacttatggaaagactgtgtgatcaagggttgagagaatagtatactgaacccaaatgtacccattacatagtgtgaacaattatcaacatgcagtactcgttgaaagaaaagggatgataaaaatgcactattattgaaagtaagaaagtgtggggtctgttaaacagacaaaggagcccactgagaaagctcccaaaggccaaaactgcaacaatttgagcaacaaaataaataatgtagcattggaacataatatgaagtataaaataaacgagtccatagtgaaagaaatggttgaataaattgagaataaacatctcccatgtagaattccgggtagtttatgcaggtgctctgccttcaaacatatggagcataactccccacttctgtttgttgttttgagacagagtctcacgctgtcgcccaggttggagtgcagtggcacaatctcagctcactgcaacctctgcctcccaggttcaagcgattctcctgcctcagcttctcgagtagctgagattacaggtgtatgccaccacaccaggctaatttttgtgtttttagttgctatggggtttcatcatgttggccaggctggtctcgaactcctgacctcaagtgatccacctgcctcagcctgccaaagtgctgggattacaggcgtgagccacctccccacttcttaagcgtggactgcatatagtagctaccttctaaaggacacattcaagaaagggacaaaaagtaaccttatggaggaacctgacaaactacctcagccaggcgatgaagggtaacatcagcataaacatgatgaagcaggttgatagtatgtatccttgatgtgtgatgagaatggtactttacctctgtggccttcctccaaaaaactgttacgcatggtctgggcacggtggctcatgcctgtaatcatagcactttgggaggccaagggaggatgattgcttaagtctagcagttcaagaccagcctgggcaacatagcaagagcctgcctctaccaaaaaaaaaaaaaaaaaaatgtaattagctgcacatggtggtgtgtgcctgtggtcccacctactcaggaagctgaccaggaggattgcttgagcccaggaggttgaggctgcagtgagccatgatccactgtactctagcctgggcgacagagcaagacactgtctcttggaaaaaaaaaaaaaaacataaacccatctagtcataaggataacatcaaacaaatcccacctgagggatgttctacaaaatacctggccatacttttcaaaactgtcaaagtcatcaaaaacaaggaaagaatgagaaaccgtcaaaaccaagaggagtctaaggagacatgagacatgacagctcagtgtaatgtagtgtcctgggtgggatcttgggacagaaaaaggccattaggtaaaaactaggggaattcaaataaggtatggactttctttagtaatgtatcaaaattggttcattcattatggcaaatgccacctattagtggaagatgttaatagggaaaactgactaatgggtctgtgggaactctgtgtactatctttgcaatttttctgtcaatctcaaactattccaaaatgtttattttttaaaatgctttttttttttttttaagacagggtcttgctgtgtcatccaggctggagtacagtggcataatcatggcttactgcagcctttacttctcaggctcaagtgaccccccatcttagcctcccaagtagctgtgagcacaggtgtgtgccaccgcatccgactaatttttttttttttttttaatttttgtagagacagagtgtggctatgtcgctcaggctggtctcaaactcctgagttcaagtgatcttccagccttggcctcccaaagtgttgggattacagtcatgagccatcacacccgaactaaaaaatacattgtttttttttttttttttgagatggaatttcactcttgttgccaaggctggagtgcaagggtgcaatctcagctcaccacaacctctgcctcctgggttcaagcgattctcctacctaagcctctaagcctcccgagtagctaggattacaggtatgcaccaccatgcgcggctaattttgtatttttagtagagacggggtttctccatgttggtcaggctggtcatgaactcccaaccttaggtgatctgcctgtcttggcctcccaaagtgttgggattacaggcgtgagccaccacacccggccatgcatttttcttattgttattttgtaagcgctgtatttcctcagggggagcagagggcaagggaaagtttccattaagctgggctaatgatgagcgccctgtccctgccctgcctggttttgttcttggatgtgccagagaagcgggagggaggaacgtgaggccacctggccccagttccccagctggtggaaaacagaggcaaggagggttactgcaggaaagtgtgaggatgtgcaggaacctgttagatgtgcctgggccaggttggagaaagctggctgctgtcaggtcagctcctgggaagacggactcatcacggcctcactgagccacacggcatcacactgcactggtgtggccacacacttggtggcaagtggagacctcattagaagggtgaggggcctgccctatttgctgtcaccatccctgacctagtgacagatggcagctggtattcagggcctcagccatccagcctagaggtaaaccaagcatgtttcaccagtgccccctattccccgagacctctcaccttccttcagaggcctgcggtggtggaagggcatgggctttggaggcagcagatacgggctcgggctcaggcaccaccacttgacagctgggaaaccttgggtgatttacgtaagctctccaacctgtttctccagttgtaaaaggcaggtaatacgcctgcttcacccaccttacaaggtgagtcaaggatcaaatgagaggcggtagaacaggagggactgtcttaggggttattgtttgggcagatgaggcaagagtggtcagcactttttaagcagcaggtaaagccttggtcttggggctaattggtggtagagttttgtatatagtcacgccacatcatgttttggttaacaacagaatgcatgtacgacagtggtcccgtgagatcataatactgtatttttactgtaccttttccatgtttagattcacaaatacttaccactgtgttccagttgcctacagtatccagtacggtgacaagctgcacaggtttgtagcctaggagcaacaggctaccccatctagcctaggtgtgcggtagggtaggccatctaggtctgtgtaagtgcactccatgatgttcacacaacgacgagatcacctgactgcttttctcagggtgtatcctcgtcattaagtgacatgactgtattaggttgctttcagttgcaggtaatagtaagtccaactcacattgtctcatataactgaaaatccagaggccacgtgggcctcgggagccatgtgatcagggccatgtttctcagtctcagagcatatgtgtgtgctggcttctcacgctggtttccttctaggtagaaaaatggttataggaggcccaggccacacattctaccatcccctaataggaaagagctgcttttccccgtcatacagtgtccacgacgtctctctctttagactattttaggtcacatgcttgtgctctgaattgatcactggggcaaggacaaatcatgctgactgacttaagcctgagttactcccaacctgaacaaattactggggcaaagagagataaatgaaaattattggcttagccagtcagggcctgggcctggaggtaggagggcatcaagccctggcaaaccttttggctgccacaggtggggaggagtggcatggatgccaacagtgtccctacaggcttctatcccagtaatcactgtttgagagcaatggccatttgcctctctagcatccatttacccctttggcaacaatcctaatttgcatttggagctttgttccttccccgttcccaaaaactacgtgcttctaatgaagcctcatttccctctcaagggagaggcatgtgaccaagactttggccaattggtgcactgtattctccaagccattggactgcttcttggaaaggcacttggtttgattaaagccagtgaaacacaatgatactcgctggaaggaaggctggggtggaaccaagtgtgcctgtctgctgaacctgaccccaacaggatgtagggtctggagctattggtgctgccattttacaaccccatggagagcctgagattgaggctaatgtagaaagatggagggagggtgaggaacctaataggaccagcctaattcctggactctgcagtttgagtcaacagattgcctcttttgcttcaaaagccagtttgggtcaagttttctaccagttgcaatggtgtcttaaatcatattatactttccttcctattcaaaggcagtaaatgccaccaagcagtgcatgtgggcaactagaatgcttggtccaatccttactatttgtcacttgacactaatattacatgaaaagcatcccagtcatgaaaggtatggaagaatgctcaataataccaagaagggagagcagtgtggaactattgtttactggtattattatctcaggggtgtttcccctgattatccatgaggttctctttatgctccgctccctgtagggtctggcaggcttcccaacttatctggtgttcaaggtgggcctaagggtgaaactggagcccacctggatacagagatctgtattagttttgtgtttattgatgggagaaagtatttggggtcatccaccttgaatgctacataaatgtcttctactcaaggagtcacataataaatctctccaaaggtgcggtggctcacacccgtaatctcagcactttgggaggctgaggcaggaagattgcttgagcccaggagctcgagaccagcttgggcaacgtggtgaaaccccatttctataaaaaatacaaaaattagctagctgtggtggtgtgcacctgtggtcctagctacttgggaggctaaggcaggaagatcttctgagcccaggaggtcgaggctgcagtgagccatgattgtgccactgcactccagcctgggtgcatttgagcaagatcctatctcaaatgagtgaatagacaaatctctaggactcaccttgagggctgtcaggaaaccctctggaaaaggatgtctcatggatatgccagtgtaaactctcctgaaataaccctttctcttctctacccagactaactttacctaccctttggggcccaactcagatccctccttcttggtaaaaagccagttcagactgaagcaatcccttctattaaccacattaattattactgcaattaatctcacaataccttgaggctccgagtgctgagaggattttgccttttgttatagtgatggaaaggatgcatttcaatatgttgccttgcagtgcaaacctttgttaacagggcaaaaatagcacagggggcaggaattacattcctggatgtgcatttggcttatttacatggatttgggtgccctctaaggacaccatcttctctcccctccaagagggtcaggccacaggacatccatgttcttggcctcccatgggagagggtctctcgccagaggaagggaaagccaagtggccacagagttccagcctgtccctgtgacagcccctgcctctggccagacatccacccacccttgctaagtcagcctgctctggggctactaggcccagtccttgctgtctgtcggagacagaccatgaagtgcagtgtgtggagggctgggacatagcataccgaattaccccagggagcttggaaaacatctcttcccactctctgttaggcccacggcttcctctactggaggagacggcatgtgaggatggaactcggtcattcctctgtcaccaccgatgtgaacagtctggaatcctgcacacaggagactgacgatccctgagcaacctttagtagctcctaccattgggcattttcttggtacagatcacaaataagagacatcatagaaaatgttattcttttattatttcaaggaggtaatacatagcccaatatggcaaagcaaaagggaattagaggcagcaaatggccaggtttttctaagcgcctcatgctgcatctctgagctcctgtctgcccgcagcccacagctgcttacatgaaggccaggtcagtagacagatggcccaacttgatactccactgactgagaaagggctcaatgtgcagcacagcagaggcactgccaggacccagcacgctgggcggcaccccacgctgccaccaccagctacagaggctagtgccttagtagcagccagtgtgtctagcacttgattttattcctgtgagcctagagtgggcaggacgtgaataaatcctgagtcataagttaaggtgaaagacttagtagtgttaatactcttggtgagaaaagacaacacagtcttggaggagagtgggcttggagtctggtggaagaaagatagaaacccccagaagggcctcggcctgcaggcactgccttgaggccatcagagggggttttcacggtacatgatagggaggagtgaggcaggtgggcactggagggctgtttcctctggcacagttgaactagagggtcactttccactcataattggtttcctaggtctaagtcaccacacctggggctgaagcaagtcttgcctgtgcaccaagcgtggccttggaccctggagagatgcaaggctcagttctccagtgttgaagtggaaggactcccaactgaaggagatctttctctccccacctccagctcttttcccttacaaatgaccagggtgcaagtcgagaggcagaggcacctcctggtgcaactccaccacagtcttacagagaactcatcttggtgggacccaaagcccagccttggcatgaagcagacttattccacccatcggagggcacccagtctggtgactgaatggtggcgtgcaagtgggagtcagcagtggctctggatgccgtaatactcagatgccattcatctctgtgtgatcgtcctggctggagagctggtgaggagggactgcttcctcctggcatgcactgttcaccaaccacaccacgtgggctgatagatttttggtttgacaggtgtggaaagaatttttaaaaccagccactgtgttctccaaacccagagccattggttttgtttgacaagaaagtaccaagagaaccacagctccactgaggctaaggcttgtgtagcacagaatgcagtatgtattgaaacgtataaaccttgtctgactggggagatgggtgagcaaagagctgccgggacccaggtcctctagtcggttgcaggctctgccgatgtctcatccttaagctcctcaaaacctgggactggcttctgtagaaagtatgtagtggcctggatcaccttgtctggtccaatgttgtacactgggtgagtgggctgctgcaaagagaagaaaaggtgccagttaatcaccccggtggtccttgaaaacataacacatcctttgctccatgaaaggcacttctaagaatttagtataaggaatcagagatacacacaaagcccaaaggttcaaaaatggtgtatttgctaaaactatctagtacatgggacacaggttaatatacagccattataaacacgcatttaaatatttaacgatacaggcaaatacttacaacatattatgtgagaaaacagtatgtacaatactatctcaaactgtttttttttttttttttttttttttgagagagtcttgctctgttgcccaggctggagtgcattgacacgatcttagctcactgcaacctctgcctcctgtgttcaagcaattctcctgcctcagcctcctgagtagctgggattacaggtgtgagccaccacgcctgggtaatttttgtattttttttttttttttttgagacggagtctctcgctctgtcgcccaggctggagtgcagtggcgggatctcggctcactgcaagctccgcctcccgggttcacgccattctcctgcctcagcctcccaagtagctgggactacaggcgcccgccactacgcccggctaattttttgtatttttagtagagacggggtttcaccgttttagccgggatggtctcgatctcctgacctcgtgatccgcccgcctcggcctcccaaagtgctgggattatttttgtatttttagtagagacagggtttcaccatgttggtccggctggtctcgaactcctgacctcaggtgatccacccgcctcggcctcccaaagtgctggggttacaggtgtgagccaccacacctggtctcaaactttttaaaaagtgtatttgtacctgtgatgtatataaatagcaaaaattgtacccataccaaaatattaatagtgatatgattgtttttcattttcttttttatattttatgtatcccaattattaaaacaataaacatgtatttacatttataatcaagaaaaagggggccggacgcggtggctcatgcctgtaatcccagcattttgggaggccgaggtggatggatcacccgaggtcaggagttcaagaccagcctggccaagatggtgaaaccccgtctctacaaaaatacaaaaattagccgagcatgatggtgagtgtctgtaatcccagctagttgggaggctgaagcaggagaattgcttgaacccgggaggcggaggttgcagtgagccaagattgtgccactgcactctaacctgggcaacagcgagactctgtctcaaaaaaaaaaaaaaaagaaaaaaggaccacaaccctaatatgtagtaaggctgtcagatcatatttaaatatataaacaaaatttaaatatgaaatttaaattaaatagatgttattctagtacatcacagaaacccaaaagaaactttagatttgacacggcataatcctaggccaatattcaggattctcccactgtgggataatgaagaaggggacacaactgcaggagagattttaaaaattttgagagaatactaggagcaacctcatgctgaaacatacaaaaattcagataaaacaataatttttaaaaaccaggaaaactgccaaaattgacttaaggaatttttaaaggcctacatgaagaaattagtaacaacaattgcttattctgccacccccacataccttaaaagatactagacctagatggtttctcaggcaagtagtatcaaacctacaaagaaacagataatctctgatctatacaaaccttttaaggactgaaaaaaaaaaaggggctagtgcgggggccaggtacaatggctcacacctataatcccagcactttgggtggctgaggtaggatagcttgaggccaagagttcaagaccagactaggcaacatagcaaaaccctgtctctacaaaaaatttaaaaattagcaggttctggtggtgtgcacctgtagtccctgctacttgggaggctaaggcaggaggatagcttgagcccaggagttccaggctgcagtgagctatgatcacagcactgtactccagcatgagtgacagagtgagatcatgtctctgaaaaagaaaagaaaaagaaaaaaggtaagaggtgcaggaagctacccatttaattttatgaggctatgatattatcctgaaacactggaaaaggacaatacaataaaattttagatcaatctttcttatgaatgtacatgcaaaaaaatcctaaataaaagtactaggcaaacatactggcaaactgaatccagcagtatactgaacaaaacacacagacacagacacactgcctctactatgaccaagaagggcttatcctgggaatataaggcttaacatcagaatattaatgaaacatatcatattaaagaagaaaaatcagatgcggagaaagcattcaataaaatttaacactaccttatgactgaaactaacaaaaacaacctagcaaatcaggaataaaagtgaatatcactaacttgatataatgtaactatcacaaccttacagtaaacatcatgcttaatgatcaggttataaaaagccttcccattataatcaggagcaagagacgaatgccctctactacctttagtcagcactatgtggggatcttacccaacaatacaaggcaagaaaaataaaatggaaactaacttagacaaacttaaaactattaaagagttcaacaaggtggctggacacaagatttataaatattattagcatttctatacactagtaacaaacagttacaaaactgaaaataagaaaagattccagtcacaagagacatgaaaactgtaaattagacataactctaaccgaaaaaaaaaaaatgctagtcctttatggaaaaaattataaaaaaaacactgaaagacattaaagaaaagaaaaattatgttcataaatggaagcctaaatattgaaaagaagtcagttctctttgtactcctgggaagacaggaagaaaaaaaaaaaagttggttctctcctattaatctaaaatgtagtgcaattccaataaaaatcccattagaacttgacaggctgatcctacaattcacaggaaaaagcaaaaggcaaagaatagccaaggcaattttgaagaaaaacaacaaggcagacaggacttgcctacctgttttcagacttgcttaaaagagtgcagataggcaaacagaccaaaggaacaaaataagagagtccagaaacagggccccttcatgtatggaaacttgagggtgtggtacacatgagatacacatcagcaggaaaggttgtagacttcagtaaatggtgctggtcaattggttatccatatggaaaaaagataacattatatccaagcctcaccatacacagaaaccaaatccaagagaattaaaaatctagattaaaaaagcaagctttagactatttagaagaagttacacttaatgacttgctgcattgccttgttcattcccttcatagcacgcatcacaatttgtgatgtatttgtttaatgtgtgcctccttttgtctgcttccctcaaaaaatggtagagattccttaagttaatcctcacctaccctcccccaaaaacaaacccctgaatgacagaaaagacaaatagatttgaccacttcaaaattaaaatattaaaatatttttgtggggaaggggtgctgggggcagggtctcactctatctcccagactggagcaaacagagctcactgcagccttgactacctgggctcaagcgattctcccacctcagcctcccaaagtgctaggtttacaggtgcgaaccaccatatctggcctaaaatcttctatttaacaaaaaaacaccaaaaacaaaatgctatggtttggatgtggtttatttgtccccacaaaaattaatgttgaaatctgatccccaagatggctatgttgagaggtggggtttgtggaatgtgtttgggtttgaggggtggatccctcaggagtgccttggtgctgttcttgcagtagtgcgtgagctctcactcttgctctggggagtctggattagtccttgagggaatggattagttcctgcaagggtaggctgttataaagccaggatgctctcaggctctcctctgtttgcatgggttggcttcccctttgatttccacatgttataatgcagcacaacccttgccagaagccagagccatgcccttgaatttctcagtctatagaaccatgagctaaataaacctcttgtctttatacattacctagtctcaggtattctcttatagcaatgcaaatcagagtcacaaaatgaaaagacaagtcacaagctggaagatattcactacacacatgtaactgatagaagattagtattaaaaatatacagagaactacaaatacttaagggaaaacaactgaagttacccatcagtaagaaaatgagcacagaatatgaactggcagacaattcgcagaagacaacacaaatggccaacaaacatttgaaaatattctcaacctcaccagtaatcaggaaaacacaaaatcaaacaaataccacttcacacccatcaaattggcaaaaaggaaaaggtctgactatggatcgattcatcttacacaaccacactggggagcagttacagaggtatctatcaaagatgacaatatgtgtccccttcaacccagcaggtcccctcctggagacattctaacatgtgaacccaatgagacagataccacaacgttcactgcaacactgtaatagcaaaaaattgataactagcaggagaacagagaaacacactggggtacatttatataagggagtatcatataatagttaaaatgaataaactggagcaacacatgtgaacacagataaacctcaaaaatacaatggcaagtggaaaaagcaatgcagaatgactggtacagtaggtaccattacaaaaagtttgaaaacatgcaagcaactgttatattgcttataaaaaactatatattgcttatagatacatatgtatgtagcaatagcacaaaaacatccacaggcatgatacatgtcaaatttgggacagggttacctctggagaaggagggaggaaaaaaaactggaagagggctacataagaggcaaatagggggaaataattagggcctggaaaagctgggtggtggtttttctgattaagaatgaggttgagcatcttttcaactatctattggccatttgtgtttcttccatttgaaatgtttcccaattaaaagaaacaaagatggggccaggcgtggtggctcacacatgtaatcctggcaccttgggaggctgaggcaggcatatcacttgaggccaggagtttgagaccagcctggccaacatggggaaaccctgtctctactaaaaatacaaaaattagctgggtgtggtggtgcatgcctgtaatcccagctactcaggaggctgaggcacgagaattgcttgaacctgggaggtggaggttgcagtgagccaatatcatgccactgtactccagcctgggtgacagagtgagactttgtctcacaaaaaaaaattaaaaattaaaaaaaaaatttttttaaacaaaaaaggaaggttacaatgacacagatgagaaaataaggcagtgacctagatggtagcagcaggccatgtttacactggtggaagtagggcttagtaagagtagggaactgcacacaaaaattcatgacagtctgcatgggccctgtgatttgatcactggggacagtctccattggattcatgtccaggctcacgtctaggctcagagcacctccaggttgtcctcagctggctgcagcagtgagcatcctgccctcatagggctattgttttttcaggaaagcagacaaacacacattaaacaacacaccaccaactgagtaaagtactacaaagaatatgaacaaggcactgaggcagagcattctggggatctcattctctgaagagatggcatctaagctgagcctctgggagagacgcggcaggctgtacagccagtgccgcatggctgcagtgctatcacgagcctgctgggactcacagcctcagagtgacacgtaactgtggcctcctctaggggaagctaataccagcagtgggctaggtcctcagccctgggataaaggcacaacagctctttgacagatcagaccgcccatctggaaccctgagcttgcccagaggtgcgtctcctctgtggtcacatcctcactaacggctgcacagctcgaagggcagagggaccacaagcttccgcctgtccacacaggaaatgcagagccagttctgcttacttggaaagccttctgtccgcgaggtccctgtggagaaggggtgtgaagccctgcacccgtcttaccagagcgttttcgggcacacccaggaccacatcatgcaacatggctccgctgccgaagtgctgggctatggacaggccgctcaggcagtagcaggtgtggtagaaatcacgcgacctgtaaggacaggcagctctgagcaggcgctcctctgctccgcacacatctacaaatgtagccacaccaattcagagaccactggtgcaatcacacgtccccccccatcctccatgtggctagaggaggcatggttttcccagcagtgttatttaaagccccactggctgagcacagtggctcacacccataatcccagcaagcaggaggctgaggcaagagaacggtttgaggccaggagttcaaaaccaacttgggcaacatgggagaccccgtctctacaaaaaattaaaaattagctaggtgtggtggccgatgcctgtaattccagttacttgggaggctgaagcaggaggatcactcgagcccaagaggtgaaggctgcagtgagtcatgattgtgacactgcactccagcctgggtgacagagtgagaccctgtctcaaaaaagtaaaatacaataaaataaaagccccatcctccagccctgcccagcagtgggaactgtattttttttcttttctttctttttttaccttaaactattaaaggaaactgtaattttaaagtcagtctctccagctgtcttctggaaagggctctccaggggcagtactaatgataaattgatacacttctctagaaaaatacctaaatatctagaaatgggccacatccttcctgatacattgtgggaccaggccttcccctggatgccaagagcagcaggacgtgtgctgggatgggggaagacagagggtgggtaacaaaggtgagaggacttattttatttccctttttctaacacataagccatctcagatttgagcttaatcatttaatccactctataatagttgtcatgattacagtctctgtttacaacactgaggggttttaaaatcctgtatcctattctatttagatcagtttttttttgttttttttaaaaaaaagaagagttatctacccagcaatctgtttccctgtctgggggagggggttgcatgcaggctgggggacaagacgggcagctggaggtgccaagatcaatggcctcaaggggtgctcccaactgggtgctttttcccatacaacctagcgctatgcaggtgctgaaggtgacacctctgctcttgagatctggctctgagtaggcctgaggtgcacgcccctctgctctctcctcccctctcccttccctccccagagagaaaacactcacttgccaggtttatccagaagcccccccgcagggcactggcagcacatcaggatgtactcctgcagggcctgctgatggaacatccagtggctcatgctaagggcagggtcacctgttgaagggcaaagggtcagtaagggcccggcagatccagccaagtatcaatgacctaattccactttctcacctgggggaatagtcaaggtttcctgctccccttcctcttccattcattcttggtacaactgctatcttccccatgtcctacgcacagcatgtcccttctcctgaactttgacatgtgtcaaagagcagcaattcaaagtggcactttcactttcttgaaatgcaccctgttaacgtggatggtgatcctcaaccacatctctggcaggcagtgaaccagcctagctgtttagcttaccttcccagactgacctcggtagctgctcccaacttggtccataactctaccctggacttcaagagacattccctctagcatatctctataacttgttaaccagactgattagctcagagaactcttaatgggtaataaagtctgtttcttctacttttctaagcctaaatttaattgatctccaaagggaattctctaacttgtctctcagctcaaagaatttacctaagaaacattactagtaactgccctcctgcatcatatgataccctagcaaaaactgggtattctggtaatactactaaggtactgacaagcaactggacttcttcactctgaagtccaatcactatggtcaaagaattctgtgggccacacagttatcaagtgggaaggagggacaaatcacggacaggtgtgcagaaacatctgcatagaaatcgattaaaaatatatatacatataggatgtacactaagtccttggtcaattttatattttgatacctgggctaaaagatgcctgacaataaatcatttttaaaaaaaagatgcccaacaattggtaaatggcacctgaaagctaattgttctttcttccagtctttttggttctatgcgtttttctacctagttattataactgtgtagcttatgtttttcacttataccactataggcataaattttctattctattacataatctgcatagccatcactgtgaatagccatatagtatttcattaagtggacatataaggtaactgtatcataaaaagaactgagctaaaaatcttatatatatgtcagtatataaattcctatggtgggccaggcacgatggcttatgcctgtaatcccagcactttgggaggctgaggggggttgatcacgaggtcaggagatcgagaccatcccggctaacacggtgaaaccctgtctctactaaaaatacaaaaaaattagccggacatggtggtgggcgcctgtagtcccagctactcaggaggctgaggcaggagaatggcgtgaacccaggaggcggagtttgcagtgagctgagatcacaccactgcactccagcctgggcgacacagcgagactccatctcaaaaaaaaaaaaaaattcctatggtgaaaattataaaagtttatggtatcaataacctttcccattttggagaaaatagcaaaaaagaaaaacgggggaaaagatttctaaaaataaaaatgaaaagtttatgatacagtctataaagagattgaagcaaaatattaaactgttgaatatttcctttttttttttcttttttgagacagagtctcactctgttgcccaggttggagggcaatggcacgatctcggctcactgcaacctccgcctcccgggttcaagcgattgtcctgcctcagcctcccgagtagctgggattacaggcatgcaccaccatgcctggctaattcttgtatttttagtagagacatggtttcactatgttggtcaggctgctctctaactcctgacctcaggtgacccaccctcttttggcctcccaaagtactgggattacaggcatgggccaccgcacccagcctaaattgttgaatatttcaaacagacaataagaatttattaaatttctttaaaaagagacacagaggaaaagggtttccaaggttgagcactaggtgagggacagtggccaggtgacatttagaggccagggacaaaagcttctcgtcttcaaccctgagtcgcactcagccctgaaacacccattaagagacacaggaaactaagtccgacctaaggagaagcatccaatctcccatctcaggctggctgcaggccacatgctttgatacacttgcactattttaattcccttcctttcttttcctcacctgtaagcacagtgaactttgttgtagaagatacatacatatatgatgggacttcactctatcttcttttacttatttccaaggttgtttccagttccttgccattatgaggaatgctggactaaatctttgtcaatattatgtatgcttaagattattttcttcaaatagactgaccacggtggaattattcggttaaagggaataaacattgttaaggcttttaatagatactgataaactgctttaagaatttatagactactctcagcacaatccctgtggagtagccctgctctgcaggagctgtcaaaaataaatatataaataaactaaaaataaaaacaaagactttatatagctaccagcaaaatttaaaattttgctataccacctccagcattagcacctttttgttgttgttgttgagatgctatcttgctctgtcgcccaggctggagtgcagtggtgtgatctcagctcactgcaacctctgcctcccaggttcaagtcattctcctgtctcagcctcctgagtaccttggattacaggtacaagcccccacgcctggctaatttttgcatttttagtagagacagggtttcactatgttgatcaagccagtctcgaactcctaaaatgatctgcccaactcggcttcccaaagtgctaggattacaggcgtgagccaccacgcccggccagctttagttactttttaaaagttatcagcaattaaaatggtaaaaagaaatagtacctgatagtttattttgatttgcatgcctctgattactaattagggtgaaatttttccataacttgtgtttaatatttgcatttccttatgatggtgtctgtttggcctaatcttctgagatccaatagccaattttattaatctagctttttcttatacttgccccttgtctacatcatatgctgcatctattttctcctttttgctcctctgttttggttatgtgagtttaaaactttttaaaatttttaaaatttaattaatgtaaaacatatatatgttttatacttaatattgtaatcatactattgatttttccttcacgatttcctttttaagaaaatatttaatgtgtatggggatttttggggggatgagtgatgaaaatgttctaaaattgtcatgatggttcgcaactgaataggtaagttgtgtggtatgggaattatatctcaacaaagctattatttaaaaaagcatatttattaaactttaggaaactgcattacacatctgtacaaaatgtacatatatttcatatcctataacaaataaaagactattattataaggtaaatgataacctgtggctaaaattagagtctgaaaagaaaacgctatgtttattatataaaaaactatagactgtttcagtgacttcctatattattaaagcatagaagctcaaagttcaaaagctctacaaggagcttccagatatcctgaatttggacaccagcacacataatcacaacaagatgaaagcagatacgattatagggtgataactgcacactggaatccaccttttaaatcctttctacctcttcctgaaattataggtcgccattctaatctcattttgcatttcaaaggttccttttatctaaaaaaatcaaaagtctttccacaccataactgataggtgcagccatctgtagctcaatttcacaggtaggcaagaaaattccagggtatgtccaaaagaacatataagaaaccagtaactaccaagccaagtggaaactcacaggcctgctgctttcttattgctccacaaaacaaaaaaacaaagtaactcactgatttagtcagcacttgagatttcttaagccttttttttttttttttagacggagtcctgccctgttacccaggctggagtgcaacggcgcgatctcagctcactgcaacctccgcctccggggttcaagggattctcctgcctcagcctcctgagtagctgggattacaggcaacgtggcaccatgcctggctaattttttgtatctttagtagagatggggtttcaccatgttggccaggctggtcttgaactcctgagctcatgatccacccacctcggcctcccaaaatgctgggattacaggcttttgtgtttttttgagacaaagtcttgctctgtcgctcaggctggagttgcagtggcactctctgcctgcaacctctgcctcccagactcaagtgatccttctacctcagcctcctgagtagctaggactacaggcatgtgccaccatgtctggttaactgtttttaattttttgtagagacaagctctcactatattgcccaggctggtcttgaactcctgagctcaagaggtcctcctgctttggcctcccaaagtgctgggattatggtcatgaaccaccatgtccagcattttaaggtactaatagtaattccttcttctactcaaatactgtcatttacacatagaaggtagtcaatggcatggagccactgatggtcacttgctgggtcagggcatggcctagacccacgtgctgcactatgtagagcattctttttgctttttagttagcaatatgatcaatgccttttaaaaaatgtatttgtacatttaccaaaataaaattagtaatgcacatggtttttttttttttaaaggcacagtataatacagaaggatagaaaatctaaaaagttggccaggtatggtggctcacgcctgtaatctcagcactttgtgtggccaaggaaggtggatcacttgaggccaggagtttgagaccagccaggccaacatagtcatatcctgtctctactaaaaatagaaaacattggctgggtgtggtggtacacgcctgtaatcccagctacacaggaggctgaggcaagaaaatcaattgaaccgaggaggctacagtgagccgagattgcaccactgcactccagcctcagcaacagagtgagactctgtctcaaaaaaaaaaaaaaaaaaaaaaaaaaatctaaaaagtctccctccttctgtcttctgtctgcttctcttctcccaaaggtacccattgttcaaggggttttgtgtagggttccaggaaaagctgtgtacatctcgggctgtgtgcccaggcactgctccaggccccgcccccttacacttcatgttgtatcttgcagagctttctatatcagcccatggtatgcagctactgtttggagagatttttattatttaacccttaaccttttgataggcacttaggctgctattgaaactccacttcaatatacatcctttgctaatatccctgcaggtaaattcctgacagtgcacttgctgtgttcaaagggtaagtgcccttataatttaaatggatgtctccaaactgccctccaaaaaatgacttaacctatttacatccccactatcaaattacctgttttctcacactctccccaacatagggtatcaagttttttaatctctgccaatccaataataaaaacaaatagtgccactcttttgattagcatttcttttactacaagtgagctaaacaatttttcgttggattaatggccacctactgtggttatgagcagggcagggttcagatgccagctagtctggattcacacaaccacatactaacccttgtgagtgccaatcaggtattataaagcaatcacttaacctcactgtagtttgtttcctcatctgtaaacaatggtacctatttcatagggttgttttgagaattaaatgagaaaacatatgtgaaatgctcagtacagcccctggcatacagtgagggcttgggaagactccgctaccagtagtagtggcagttgtagtagaaaaagtaagaaggacagttctttcactgggacctctttcttcagatcctttgcctgtttttcagttgggttgtccatccatttcttactggtttgtatgattttttttcaaattaaagaaattagccattcatcacttgttataaatatttttcgcacctttttgcttgttttgtttgtagaatttccctgtttctgtaaaataacttttgttgtctttttttatgcaagaaatacctattaactatagaaagattagaaaatacaaacagaagcaaacatcacctgtaacttcacatcctagatactttctatgaattttttgtagtcaactcttcactaaaaatgggattccacacatattgctttgatatgatcacaatatattgtgactatctttctacactgcatccccttttgactcccaaagtcagtattttgccctcctttcaacacacttcccttctttacagactcctgtctgttccaagttcaagagatgccctgtgtctgagaagacaacacaggccttctcccagccaatgaaaaaagctggaagcaccaagattcataggcacccttttccatagacaaagctttgaatgccactaagccccctagaacatgtgctacaagaaacaattaaccagcagcccccctggaagactttgacaggtggtgctcctgttatagctcattccacatttccctgggattgcagaattactgagtcttatccatgccagggacaggtttgtaaaagactgaccattttaccaggggcttgacctcaccagttccaaataaagagatcaccatgaccccaagtttttttctatcttagaaatgttgggccaggcacggtggctcacgcctgtaatcccagcactttgggaggccaaggcggacagatcacctgaggtcaggagttcgagaccagcctgaccaacatggagaaaccctgtctctactaaaaatacaaaattggctgggcgtggtggtgcatgcctataatcccagctatttaggaggctaaggcaggagaattacttgaacccagggggcagaggttgcagtgatccattgcactccggcctgggcaacaagagtgaaactccgtctcaaaaaaaaataatactaaaataaaaaatgtttgacttggggaattcctgacttccctactggtggtcaaggcagagactgtgcaggctccaaagtcagtgcacttgctgacagtgcacttgctgtgttccaagggtaagtgccttatatgccttaatactgacacctaaagcccagtgggcccaggccgggaaaatgggacagaggctctgcttactttaattcagtgtcagaaatggtcacaactcaacaactcaaaggaaattaagaaactaaataatgaggctcagggccgggtgcggtggctcacgcctataatcccagcactttgggaggccgaagtgggcggatcacctgaggtaaggagttcaagaacagcctgtccaacatggtgaaaccctgtctctactaaaaatacaaaaattagccaggtgtggtggcacgcgcctgtagtcccagctactcaggaggctgaggcaggagaattgcttgaacctgggaggtggaggctgcagtgagccaagatcgtgccactgcactccagcctgggagacagagcacgactccatctcgggggcggcggggaggggggaagacggggggtggggggctcagaaacaggaaaaaaaagtatggggaggggcagaaaagaatctcatcttttacatttgagcagttacattatccaactaagtccgaagaacagcttctctttggacccagggatctcattccaaaaacagatcagcaaccagcagggccccatgacttcctctctcccacaggtctactcagagacacctgctctcacatcaagtacaccagaaagatggtgcaggagttagcaggcagactgaggtttcaagagatagagagagaatgttcccagactttttgctcactaactacttcggttttgcgttcccatttgagaccccacagaaacgaacgtggatttctctactccaatggtgcaggtggaacaaactcccatttaggcttattcaatgaatgtaaaataaaacatttctaatagtgacaactctgcagccagtcagacacggcgagtctcttctccatggtgtaggggcaacccacccctacaacccacccctacacatgggttctggttctctacccctttacgcagttgcctttcctgttgctgttgcaacagtgactgttgcaacactgagggttttcagctctgccctgcacccagaggaggtggcaatcaccacagagcccaggacaggagtgggctgctccttccagataacgcagaagcagcgcccacttcctccccgctccccgtagcaatttcaaggaagctcattctgtcgcagccaatttgaagaagcaaagaatgacactaaaccaatgaaactaaatcttactctgcattcgcatgccccacggcatgaggttccacactgggcactcaaaatccaggatagacagagctcatttcaacccctctaaaaaagcacgctgggcttccagactttgtgagtagtggagggaaatcatccagccccaagtgaacagctccccaggctcaccttgggcgtgcagtgcgcggtggagcaggggcaggagccccgcctgccagaaggagtagcagccatccaccagcttgttgcagcggccctgaaatcctccttcaaatcgcatctgccggcttgtcacccattgctgaggagacacagatgggaaaggcagttgtaggctaaaagagacaaaatccagcccgacagaatctccaggagtcaatctgtgggatggagggtttcccatcttgtggcttcttggcactctagttttggtgctctggttttctttccttccctccccacactgccatagacacagagtgaagcatttaagccaacgctgtagaggcatccagcactgatctctgctcaatgcctggcagacaactaccttttcctgggttccaaagcagtgccagtgctgagaagataaagaggccaagctggtttgtaaggagaccttcaaagtctcttaataaacatggcttaagttggaaattgaaggcaagactaccagtagctcatttctcattacttccctgctccggggagtttattaaaagcagataaatggaatttggtactacatttcttttttttttttttttttttttttttttttttgagacggagtctcgctctgtcgcccaggccggactgcggactgcagtggcgcaatctcggctcactgcaagctccgcttcccgggttcacgccattctcctgcctcagcctcccgagtagctgggaccacaggcgcccgccaccgcgcccggctaattttttgtatttttagtagagacggggtttcaccttgttagccaggatggtctcgatctcctgacctcatgatccacccgcctcggcctcccaaagtgctgggattacaggcgtgagccaccgtgcccggcctggtactacatttcatcagatgatctcaaactgctcctgacttttacttggcacctggggaaatttacccaaggtctcttagcaagtcactagcaggcctgaaagcagaagccattcattctaattaccaaatgacaactctgcccagtctgtggctgatataagaaaatcttttactttgaagctgtaaaataggtcttggtcttgatgtcactcagcggtcacacacgataccaccattccttgcttatctacaagttttctaaacacactctactacaaagatcaagatagtcatgggtttggtccctcagaatgagcagaaccaactggctgagcagatatgacatttccatttccctccctagaccacctaggccgttccagccacggacttacagagctgcctcactcaactgaaagggtacaggggagggtacttcctgtttctagagtcttactaggtaaaggtcctgaaaggagccactgggacccttgatggaagtgggggccagccctcccctaaaagctgttgtttagattattccctcttcaaggcaacacctgcccatagagagtcacagtcacaaatgcttaaaagagacagaaaacactgtactgcaggttcaggtactaatatatcctcggttgatcttaaatgaaccagggcttccagcatgtaatggaagtgggctaagcattactcaggcagagagaaagcaggcgctgcagtgggagtcggttcctcatttctacttaccgcagggcttaagtgtttttaagcagactaatttactttttccagtgcctaagcccatggatttgttctgtttccttgggctataggaattcatacttcagatatgggtcctacttctcccaaagcaaatggaagggagtagtctggattagagcaggggtccctaacccccagaccatgccaggctgcacagcaggacatgagtggtgggtgagccagtgaagcttaatctgtatttacagctgctcctcactgctcccattactgcctgagctccacttcctgacagatcagcagcagcattagattctcataggagcgcaaaccctactgtgaaccgtgtatgccaggcttctaggttgcacgctctacatgagagtctaatgcctgatgatctgtcactgtctcccatcacccccaaatgggactgtctagttgaaagaaaacaagctcagggctctcactgattctacattatggtgagttgtataattatttcattatatattacagtgtaataatagaaataaagtacacaataaatgtaatgtacttgaatcatcctgaagccatcaccccccgtcccacccccaaccccaggtccacggaaaaattatctcccacaaaactggtcccttgtgccaaaaagattattactgtgggttagagggacactaacatttattaagtacctactatgtgccaggctgtttataaatgttctctcctttaaccttaaaaaaataaggattgttatccctaccttataaaagaaaaaaatatcaagctaaaagagattagacaatttgcccaaggactcatgtctcaaatgtagtagggacagggttcaaatctagaacactgtctttataactgaggcactccctaatcacattccttatctctgcctgggagatgggacttttttgtttcatgccttattggtgttcagattttaaaacatctgagaaactcttaagttcagcatacaaagttggctgtttcagcatgagccttcaagccttcatgaatctttaaaaagactacaccgggggaggctttctgaaggtggaggcaagacactgctggttacatgtctacagggtacaacagaaactctccaggaagctcacgatgggccgcataacgggaggctggcatctgaactcagggagaggaggtgcatgtcagttgcagctggtttgctttgacgtcatggtcagggggtacatgctccccaaatgacatgacggggaatgccttctccctggtggccgtggaggtgtgtgtgtttgtgcacccactgatcatttaactacaatctagtgactccctgaagctgactgctttctgagtttcttctgaatactggccaggagcgtggggtccagacataaatgttgggctgccttctcaatgcaattagccagctctgcctaaacaactcatttaaatgtaggtactaaatgtttacacagtgcagcaggtaataaaagtttggtttcgaaatgctgcaaagctcttcttgtaacttttcctcttaggaggttctttctataacacacgataacctctaattctacgaaactgaagtataaggaaggtactctgctcacaccagatgtctgcagcacacagtctatgtagtctacacactatgtaaaaagctctaagcaggaagacagaaaggcagaagggggagccaagacagagcagctgctcactccttcctctgtgttggaacagagctaactctcttagcccttcccatagccaaactctcctgaagcctgcatgtctgagtacaatcacatcaccatgacctggggcctgagagggggatggctcaaaagatacttactaataagctcttcaagttcaaggaacgttccctcttgaggattaccagcgcggccaggccacagaaggtatagccaccatgggcttccatccctggtaccccgccaatgccaccttcccagttctgacacctaagaagagattgagaaaagcagaatgagtggccagtgagtggacgtacacaagaccaggaccatcctaggtggcagagaaaaagttcactcagattaaggtgtgaaccatcacaactatgaatgaaaagatgccaactaattaacttttggaaatgtcttttcaaaaaaaaaaaaaaaaaaaagctgggcctggtggcacccatgtgtaatcccagctgctcaggagactaaggcaagaagatcacttgaggcgaggagttcgaggctgcagtgagctatgatcacaccattgtgctccagcccgggtgaaagagtgagactaggtctccaaaaaatgtaagtataataaaaactgtaaaatgttaaaaacccagacacttagaaacagcctacttgtgtaagaaacataataattcaaattattactctttgggaaaaagttataaaatcatacatatacatatatgtacatatatacacatatatatacatatatatatatacacacatatatatacatatatatacatatatatatagtgataaccatcaagttaaaataaaattaaagagtgattgttgattctagtgatcttttatttttgaaacagggtcttaactctgttacctaggttgactgcagatcatggctcactgcagcctcaacctcctggactcaggcaatcctcccacctcagcctcctgagtagctgggactatgggcgtgccccaccatacccggaccattttttgtattttttgtagagatggggcattgccatgttacccaggctggtcttaaatttctggcctcaaggaatcctcccaccccagcatcccaaagcgttgggatgacaggcatgggccaccgcacttggcctctggtgatctttgagtacaggtctactagtaatatttttcctttttgtttttctatttgttcaaaaagtttttataatgaacctgtatactattaaaaaataaacgttatttttaaaaattataattaggccaggtggtgatggcttcttaaacagcctgcagaaccatgagccaaataaacctcttttctttctaagttacccagcctcaggtattcctttatactgacacaaaatggactaacacaagaaggacaagaaataactgacttagtagaatagagaaacctttcctacccaaaggatagggatgggagaggggcaacaaaaagcaaggtgatctgctccaataaaaggctccaggattagagatacagggaacctccacaaagtggaatgcgtctgaaccaagtttgttggttgcaaacttatataagaatcagacctttaagtcccctactcaaatccagcagaagatgggaagtttcagaggtttaatcaaaaggatctgagttccagaatatccaacaagctaagaggaggagggagcactgtaccaaatgtgattacgtgagagtcagtaatctcaacacaatacccccagccccattcctctgtgtatttcacacaaggctgccagtttcataccccaagcaggaatttagaagattcctctctgagggaactgataagcccaagggaaaaaccctacagacactgctttgagaattccccaatgaatggcttgatcctgcccactctcgcagagctccccagcagcttttcagtgctggatccttaaatatgaacagacagctgtagagtaccagacatttgaccacagtctctactatgaaagaggagaccaaaacaaacaaaaataaattggaggaaataagacagggagcaaaagaaaactttttaaagttgtatctttagataaaatattatatgaagtaagactattgagaggacaaaatatccccagaaaagaacaagagagtagataaaaaagtagtcaggaagtaaaagtagtcagggaggaaaactaaaaataggattacaaaaataaaaacaagaggattagaagataaatactaagagaatctctcaaagtataagaagaaggattaagagatggaaacgaaccatgcaatgaaatatttttatttttatttatttatttttgagacagagtctcgctctgatgccgaggctggagtacagtggcacaatcttggctcactgcaacctccgcctcctgggttcaagtgattctcctgcctcagcctcctgagtacgtgggattacaggtgcatgccaccacgcccggctaatttttgtatttttagtaaagacagggtttcaccatgttggtcaggctggtttcgaactcctgacctcgtgatctgcctgccttggcctcccaaagtgctgggattacaggtatgagccactgcacccggcagtattatttttatttatttatttattttgagatggagtctcacactgtcacctgggctggagtgcaatggtgcgatctcggctcactgcaacctctgcctcctgggttcaagcaattctcctgcctcagcctcccgagtagctgggattacaggtacccaccaccacacccggctaatgttttgtatattttgtagaggctgggtttcactatgttggccaagctggtctcgaactcctgacctcgtgatccgcccgcctcagcctcccaaagtgttaggattacaggcgtgagccaccacgcccagcctcaaagtattcttaaaagtcagacaatcaaatgtactaatgggatgtcatatttttaaaaggctggccaggtgcgggggctcatgcctgtaatcccagcactttgggagaccaaggcaggaggatcatttgaggtcaggagtttgagactaacctgatcaacatggcgaaaccccgtaaaaattagctgggtgtcgtggcgcacgcctataatcccagctacttgggaggctgaggcaggagaatcgcttgaacctgggagaaagaggttgcagtgagctggtctgcaccaccgcactccagcctgggcaacagagcaaggcaccatctcaataaataaataaataaataaataaataaataaataaataaataaataaataaataataaataaataaataagaggctgggcatggtggctcacacctgtaatcccagcacttggggaagccgcagcaggaggattacgtcagcccaggagtttgagaccaacctgggcaatgtggtgaggctttgtctctacaaaaatttaaaaaattagcggatggtggatgcctgtagtcacagctactcaggaggctgaggatgatcacttgagcctggaaagtcgaggcaacagtgaaccatgatcgtgtcactgcactccaatctgggagacacataaaacaaaaagagacgtctcaaaaaaaaaaaaaaaaaaaaaaaaaaaaaaaaaaaaaaaaaaagggcccggcgtggtggctcacgcctataatctcagcactttgggaggccgaggcaggcgatcacttgaggtcaggagttcgagaccagcctggccaacatggtaaaaccccatctctactaaaaatacaaaaattagctgggcgtggtcgtgggcttctgtagtcccagctactcaggaggctgaggcaggagaattgctggaacctgagaggcagaggttgcagtgagccgagatcacgccattgcactccagcccgggtaacaacagcaagactccgtctcaaaggaaaaaaaaaaaagagcaaacacagaaaacacaagagaagaaattatcaaagaaatactgtaataaagaatcttggtactaaagtatatgcacttccaaatcgagtgcccagcaaaatgaataaaaataatccacatcaagattcatcatcaagtttccaaacaagaataaacattccaggccaggcgaggtggctcatgtctgtaatcccagtactttgggaggctcaggagggcagatcacttgaggtcaggagtttgagaccagcctggccagtatgacgagaccctgtctctactaaaaatacaaaaattagtcaggcatggtggcaggcacctgaggttgcagtgagctgagattacgccactgcactccaacctgggtgacagagcaagactccatcacacacaaaaagaataaagattccaagccgctaaagaaggacaggatggggatagaaaaagagagacagaagaaaaaaacatacagagaattaagaatcacaatggcactgccaggtagtacagcacagtggaatccatttgatttctctgtatttctgcttaatataaaatttaaaggctgggtgtggtggctcacgcctataatcccagcactttgggaggctgaggcaggcggattgcttaagctcaggggtttaagaccagcctgggcaacatgggaaaaccccgtctctactaaaaacacaaaaattagccaggtgtggtggcatacacctgcagtcctggctacttggaaagctgaagcaggaggatcacttgaacccaggaggtcaaggctgcagtgagccaagatcacgccactgcactccagcctgggtgacgaagtgagaccctctttcaaaaaataaataaattaaattaaattaattaaattcagtatcccaccacttgacatataaggaaactatgacacagagcagtggaataacttgtccaagcacaaagctaattagaaatggcaggctggccatcgtggctcacacctgtaattccaacactttgtggggctgaggcaggaagattgcttgaaaccaggagttcaagaccagcctgggcaacacagtgagactctgtctttacaagacattttaaaaattagctaggtgttgtggtgcacacctgtggtctctgctactcaggaggctgaggtgggaagactgcttgagcccaggaggtcaaggctgcagtgagccgtgatcatatcactgcaatccagccagggcaacaagcaagaccgtgtcttcaaagaaaaaaaaaaaaagctgggcgcagtggctcatgcctgtaatccttgaactttggtaggtcaaggtgggtggatagcctgagcccaggagttcaagccccacctggacaacacagacagatcccatctctacaaattttttttttaaacattagctggttatggtggcacgcgcttgttgtcccagctacttaggaggttgagatgggaggattgcttgagcccaggaggtggtggctgcagcgagctgtgatcacaccactacactccagctcgtgcaacagagcaagactcggtctcaaaaaaagaaagagagaattgaaagacagaggaagaaagaaggaagagaagaggaaagaaagggcaaaactgggattcaaacccaggctgtctgagttccgtatctagtctgtgcctaaccagtcaacccccctgcaaatgacagctgtacactgaacaaaatacaaaaaaacagcttcctgagggttcagctgactgaaaaagggcaggcagattttggtggagtttgaaacttggaacagagaacagcatgcagttagtccctcccttcccccacaactttttctctctggtttgccctcaggatggcagccatagcccagggcggcagcagcaggccaggggtcaggggtcagggcgggcagccaacactctaatgggaagccaaccatccttctggcaggaagatgcaggctgccagaaactgaggacgaatccagaaacaggaaagtcaaagaagaaaaatcccaaattctgcatttaaactcagttcaagtttccacatacgtgctggggaaacaaagcaacttctaagcaagaactgagctctgagctgctgcatgagtgacagtttgtagcttgagtctgaccaagttgactgcctgctaaactgaaaacatcaaccccttttggggcaaaccaacagaatccataccgttctgttgtatgacacctccaccatcatatcacaatgtctaggacacaacacaacatcactcagcacaggaagactcatggagctgacatgccaactccaggacacacagatgtggaaattcccagacaagcaatttaaagcagacattataattccatacttaccacagcaaaatgaagaaaaatgcactcataaagaataaaaagatggaaaatctcagctgagaaacacaaaatataaaagagaaccaaacacaggcagtgcctactctccagctctcaactatagctgccttaccattgagcatgacagtcctcaatgaactctggttactattatcagccttattaacaatgacattggaagccagaagataatgaagcaatgcttacaaaattcagaaagactacagtttataccattgccaagttagaaatctctaaccaaataattaagtgtgagattagaacacagatacatgcaagatattaaaaatgtatctcccaggtacccttttttgggatctgttggagtacaatacttcatgaaaataagaaaaccaagaaaaaggaggacagggacttcaacgaaggagagaaatgaagtgaatttcatgctgaaaggaagcttcgggatgcctgctgtgtagcaagctgagagcaatctgtccagactgaagcaggagggcagagggctccagaaggggcaactcaaaacgcacgtgtgcacagagacaggttacctgaagggtttgactatgtttagagtaattttttatagctctgacagacaatttgggaaggaattcataagtacattcatgatatatccattaactccaggaaaatgaaactcatacaaaaaagtaaacatgatctcagcatatcatctggtatcactgtaaattatatttatatggtaatacatactactttgataaaaataaaatttttttaactaaaacagtatctcagcttggctatcattccatcatagtatatatgtgtctactataccttttgcttctttttttgagatggagtctcgccctgtcgcccaggctggagtgcagtggcgtgatctcggctcactgcaagctccgcctcctgggttcactccattctcctgcctcagcttcccgagtagctgggactacaggcgcccgccaccatgcccagctaattttttgtatttttagtagagacggggtgtcaccatgttagccaggatggtctcgatttcctgacctcatgatccgcttgccctggcctcccaaagtgctggaattacaggcgtgagccaccgcacctggcctgctttttttaaactatgaaatatttggagcatccaggaaagtacagcaaacaaaatatagaacatacacgtatctaagacctagcttagaattagccatatacacttcaggtctttgttgttgttaactattacagctgaagtctcctatgcagacttatctcatttcctttgctctcccctcagcgggaatcactatgctaaatttggtgtttatctttcgtatacatgtttttatattattaccacatgattcttctcagaaacaatacagaattctcttgcatgtttcaaattttaagtaaatgtgctaatctgtatggtttttttgtatttttttcttttcattctttcaactcaacatagagatttttccatattgatacatgtaactctagttcattcattttcactgctacattatattccgatgcaactataccacacttacccatctcgtgcttatgagcactgaatctgctttcagcttttggctcttataaacaagtcctgtgctcctctctcccattcgtgtgtgcaagggtttctgtgggagtggaattactgggtcctacgcaagggcacctttgacatactgtcaaattgctctaaaaactggttaaatcaattcaggctctcactaatattgtttaccaaagttttttatctttgccaatctaaaatataatataacattaaagaaagtttggaaaaaagaagacattttaagtatttaaaaaaatcattagataaccctaatggatctcctgtgatttttgtatttccttccaagtccctctgcattttctttatttttctgaagtagtgtcgtgaccgcctgctctccaagaggccaggagaaaccctggcttctctcaccttgctatccattcagcagtgccctcaaagaggtctggagtgatgatgttggtcagcgaggctacggaggcagcacagtatgcgcttctggaaagacagaaacgggaaacacattaagctctacggaagagctaatgaggctcagtgaactccgcgggcggactgctcgccttgcctagtaagctgtaatcacctcctgtcctcactcttggcacacggtcagtcctcctgggtctccaactgagaggtgtgacattctatttggatagagttgctcacggcatggcttcagtgaaagaacatgacattctattctccctacctccacatggtccaatctacatcagaggaaataacagccatatcaattcatgtcaaaagtggattcagctcttctttcaaagacctataatggttgccataaatctatggtatcattcaggtacttctgatatgctcattcatttggatgttagtactgtttcagagccaggatttctgtttacagccttgacacattaaagattaactatactttttctgcaacagataaactgcaaaacaggccaccaaattgtaatagatcaaacaaggataggaacaggtgagtccactccaatacagtccttaaacctctagagggagaaaagagccttgatttcaaacctctcaccagtacacacacacacacacacacacacacacacacacacacacgttaaatgaaaaaggcgcacgtctatattttttgttttgcttttgttttggtttttattgagacagggtctcactctgtcgcccaggctagagtgcagtggtatgatctcagctcactgcaacctccgcctcctgggttcaagcaattctcctgtatcagcctcccaagtagctgggattacaggcgcatgccaccatgcctggcttatttttctatttttagtggagatggggtttcgccatgttggctaggctggtttcaaactcctgacctcaagcaatccacctgccttggcctcccaaagtgctgggattacaggcataagccaccgcgcccgggctattttttaaaaaagcattattaggctgggcacagttgctcatgcctgtaatcccagcactttgggaggctgaggcaggtggatcacgaggccaggagttcaagaccaacctgaccaatattgcgaaaccccgtctccactaaaaacacaaaaattagctgggcatggtggcgtgtgcccgtagtcccaactacttgggaggctgaggcaggagaaccacttgaacccgggaggcgggggttgcagtgagccaagatcatgccactgcattccagcttgggcaacagagtgagactctgtctcaaaaaaaaaaacaaacacaaaaaattattatacttgatttaggatcattcttgctgttccatcctcccagccctaattcttctcggggcacattttatttcagcttctccctctgtcatggtatacacacacagactgcctttccttcccctctatggttttttcaaatacccggcacagggaagacaaaaatcattggtttgaattctgctcaaaaatccttctcctggccaggcatggtagctcatgcctgtaatcccagcactttgggaggctaaggcaggtggattatttgaggtcaggagttcgagactagcctggccaacatggtgagacctcgtctctactaaaaatacaaaaattagctgggcatggtggcacacgcctgtaatcccagctacttgggagaccgaggcaggagaatcgtttgaaccccagagacagaggttgcagtgagccaagatcccaccactgcgctcctgcctgggcaacagaaagaaactccatctcaaaacaaaacaaacaaaaagtatattcctaagggctcctaagaaacataaaagaagggcctagtttccatcttcttttttttttttaagataggatctcactttgttgcccaggctgcagtgcagtggcgctatcatggctcactgcaacctcaaactcctgggctcaaactgatcttgcctcagcctcctaagcagctgaggctacagatgcatgccaccacacctggctaattttttaaaaattttttgtagagacagggtcttgctgtgttacccaggttggtcttgaactcctggcctcaagtgattctctcatctcagtctctcaaagtgttgagattacagacatgagccactgccgctcggccctggtttccatcttactcagtatagatataacatgaagtcagacttactgaggtattccaaagaagtctctgcagaagctgcatgcattatgatcctaccagcatttttagcagccaaaggcacagtggaagtttagttccaccagcaggcattgggagcacacaagagtcacaagtgccaatgccaaatgtgatcatctaccagcagctaattttgaagatctgtctaatttccttgcaattgtaggcctcttaaagaggctcagatgcatttgctcttgaatcctattgtgacttgtgaggtaggaggcgacctataatacagtttgcctctcacaagtgtgaggactaagaagtgatgacagaagacaggagtcccaggtctcacgctgagatggggaggaaacgtaatacaaccttttcatgtatttctccccctttccctccacccagtcatcgcagctctcaaatttgaatttgtccactaactttccatccttgctgccatcacccaaatccaagccttcttcaacctggatcagtcttcctgctctctctccctccagccctgaaaccagagggcttttattggaacactacagtccatcactgcaattgggaaacttctaagaaaatacaaatcagatcacatcactaaactccagactccataggagatttcagggcctctgtagcctgttcccagcctgtccctccagctccactgctcccctgcccaccaggccatctacacttcaacactgaacttgtcctttcttgagcaacacatgctttctcaccaaacttctgcaaatgctagatccctgcctccaccttatcctcacagaatgatctagattatataacctagaaaggaggtctcctttcttaagaactgagaaaaaatagtgcttgctatgagttcactgtgatttgattttttacaatacactggaactacagacccttgagtaggctcatctctgaaactatcagcagtgtaacagagcagaaagatcatccagagactgctgtctatcccagaagggcagcgagctagtctccagatgtcaaactctcccatcactgctgcttttctccaagtcaaatccacccaaacaagcactcctgaggactggctgatgcttccaggcaaaggacaatgaaagaaatgccaagtgaaaaatgatggaatcggggtactagaaaccaggcaaagcaaggaaaatggatgcaatctgctagcttttctctatcattcatatctttaatcctttatgtaaatagaaagcacgggcacgaatggcagagcatcacccaaagagcaaaggtcagggaagaatatggctacagtgcttggcaggggaaccaagctgccttactggagaagtttcctagcatttatctagaacatataaataaagagcatagggaaaaaaaaagtgctggaatgaataagatagcaaataatcacagctgcaaaaggtatatgataaaataccaaaaggatcttgctatgatttgtttgcttttgcctaataatcttagtaggtttttaaaagctgcgtttcaagactgtgcatattttgggggaatagcaacagaacaggaacgaaaatgtagtgaacacgagggaaaaaaactcttttaacattttccttaagaagaatcaacacatactgatttacctcagtcgttctactggtttcactggtatacacagatcctaatctaatttttttggttggattagacaagttagagatagaagaacatcttgaactaaaggcctttgcagcctgattacctattatctgtaatgtattttatgctccacaatgttcgtggttttttcctcccctatactttcaaaccaatggttaaaccagatgcttaagccagactattaatcaacttgtgtagaagcaaacccatttacacataggcagtaagacagctttgctatagaaacctcacaaaatgtatttctcaactaaataataagaaaatggcataaaatctcaataagccactgtcttagagaaatggcttattcaatgaattccctgtatgcctcataagtaatctgccaggtgaggaagcaacttgcttggtacatcagacacttatggaagaaaataataatttcgagctaactggcaccaatcagttaatgcgattttattgcactgcactctcccggcccacaaggctctctgcacctcccagaaaaactctcatgtgcctcaggaggacctcagggattagacattctcatgatttcatcaaattcactcagaaggtatttactgaggccctgctggactttcccctcccttcctatctcagagaggtgaaggaatacattacaccatacagttatttatattgtggtatatcattttgtaccaaacaaatgtatttttaatttctaaaacaaaagcatttgtttcttatattttcacatttacataaaataagtcaagtgatcatgacacctgaggacatctgcatcacatctgaatgattctgacgtgtcactgacatgtcatcccatgtgtcattctgggacaaagcagcagcttccccatgatgttccttaggcttggcatctctaatggcagatgagctctagagtcaactgatgtggcagcctgtgcaaaaccccactcacctcacatccacctcacctccgacatgcatgagaaaggagccgtcaggttgcttcagggagtacaaatactgaagaagcttctctctgagaaacagggaaagaggtaggagaggcaacagtcagtgcgtgtcagcaggcggggaactcctctaggtttctgtcactgctggctttcactgtacctgttaatgatgtcataggcctcctcggtgccaatgatgcacaatgcattgactgctgcatatgtgggtgcaaggtgtggatactgaccgggtcctcctccaaagccaccttctgggctctgacacagctccaggaactgacacacactaggtacacagccaaagggcaaaaacaaagtcagagagcattcatgtcaaaacaccaaattcccactagattccaggcctttccaatgatcccccactccctcaaaagttgaggggaacctctcctcccacttgttgaatataacctctccccaaagggcttaattctctctccagctatcatcatttctgtctgccctcctctgagtttcgtacttaagcgcttgttggtcatgaagcagggaacacaaggctgggaagaaaccgactttcgtagctatggggtaagagtctcccgtgcttcccacacaaacctttcccagactttccactcaacttgctgccctggacctgtggtaccagcctcctcctccttgcctttgggaacctcccagcctttgaattttgccaaaacatggtgctcaactgcttctttccacactaaccatcctagtcaggatccatcacctaggcctatcatgaacatgtaaatagaggtcttctcactcccattgccacctaagcctctgtgggccactgatttctactccaccagtaagaagcaagttttgtttttttgtttttttttttgaggcggggttgccctcggtcgcccaggctgcagtgcagtggtgtgatctcagctcattgcagcatccgtctcccaggttcaagagattcttttgcctcacccttccaagtagctgggattacaggcgtgcaccatcacgcccagccaattttttgtattttcagtacagacaaggtttcaccatgctggccaggctggtcttgaactacctgacctcaagtgatccacccgccgcagcctctgcaagtgctgggattacaggtgtgagccactgcatccggctgaaaaacacatttttaatggagcctgcttccatggctgggagaacagaagagaggcaggctgctctcatgctcaccttaattgcggtaaacataagaggagctgcactgactcgccgtgagaatgcctcccagtctgcgggttcttggagaattctccacgttaattcaaacaggctcccattccctcactgaggggagctgttttctgagggtttgcctccaagcctggcatcaggctgcccagaggttacagtcttgctttaggtgaaatcaagagagccctatcatcagtccggggtcttccgaagtgcaccagaaagggtgccccaggaaagccctggttatcaagctgtttctccacagctcagcagggtcacagccttcccgccaggagaaacctccatttacaacaagcaaactgtctttgcagtgttcatggggccttctttcctgggcgctttcacctcattatttccttgctactgctgccagaaagactacatagcctactctccaagaagacacaagtttataactgtttgccaacatcacatttaattgctttcgatttcagagttcccattatccgggcagagaaagcaaaagcaaacgctgctgccttgctctgtgagttctgaaacgtcacaggttaaaacaacacatacttctttttgcacctacaattttactgtagaaaacacaaggattgaaactgaagttgaaaacaattatgtggcactatggtttttgtttttgattttgagagagggtcttactctgtcggccaggctgcaggacagcggcataatcacggctcactgcagcctcaacctccccagactcaagctatcctcccacctcagcctcccaagtagctagaattacaggcatgagccaccacgcctggctagtttttgtattttttataaagatggggtttcgccatgttgcccaggctagtcttgaactcctgggctcaagcaatcctcccacctcggactcccaaagtgctgaggtcacaggtgtgagccatcatgcccagcatgtgacacatttttaacagcaattaatttctgtagagaacttgaatttgttccttctttccaaatcgtcatcaattcttatgacatttcccagaaacaaatagttaataagctcatgccctaacaaaggctggctgcactagcataccaaaaggtttctgtaccacaaaaagttttagctgatacaaaacttaacagcacattttttaaaagaaagaaaaagagtcacctggttatccactccctttcccagctcctaagatagaatcgtgccgaacgcaacactactgaccctaaagcctcgaattagttaggatctgaatgtaccagacacaccttgataccatccctccatgccaacctccctcagctgacatgctgcatctgactgtctggggctgtgctagagaactggaggttgggcttctcttgatctcagacacttccgtattacagaacattctgatcccaaggctttccaacttgcaccttaaggaattggcaagttgactatgaactaccagctgtcattcacagacttcttagcaattctgaagaccaaaatgttaatgatacttctacatatttaaaaaaaacaaacaaacaaaaaaaaggagccaggcatagtggcttgtgcctgtaattccagtactttgggaggccaaggcaggaggattgcttgaagccagtagttcaagaccagcctgggcaacacagtgagaccccagctctacaaaaaaatatttttttttcccacaaatgtagggggagaaaaacttatcatagagacaagaagttcaccaataaataaaaaattacaagcaaaaaacattgtacaaacaccaagtggcacattttgtgaaaaacaagtattcacaaaatcattcctttagaatatgactgaaagctgcaatacatcaattttctttaacgtcagcaaggcatttcattctagcttacgtgccaattaccagcaaagtgggaaactatcttctatatcatggatcttcaaacccaaaatgtgtgcatcagaatctgtagaaagctaataaaagaatacagagacccagtcctgctgaggtggaaaagatcctgggcctttgtatttttaccaaattctcaggtgattcagatacatgcaaagcttgagccatcactagtccttgctgcacaactaaaattacttggggggtgttttaaaaaaatcccaacacccaagccacacctaattccaattaaaccggaatcactatgggtgggacccaggtggcagtattttttttaaactccccacgtgattccaatgttcagccaggtatcagtgcttctcaaacttgagttgcatagaaattacctgtggatcttgctaaactgcagctctaattcagtagaactagatgggtctgagagtcctctttttttttttttttaggagatggagtgtccctctgtcgcccaggctggagtgcagttgagcgatctcagctcactgcaagctctgcctcctgggttcaagtgattctcctccctcagcctcccgagtagctgggactacaggtgcatgccgccacgcccagctaatttttgtattttttagtagagtcagggtttcactgtgttgcccaggctggtctcgaactcccgagctcagacaatccgcccgccttggcctcccaaagtgctaggattacaggcgtgagccaccatgcccggctgagagtcctcatttctaataagttcccaggtgatagcaatgctcctggtctggggaccacattttgagtagcaatgagatacatctgtgctgtccaataggcagccactagccacatgaggcaatttaaattctcaattaattaaaatagaaaattcagctcttcagtcacacaagacacatttcaagtactccacaactaactgtggctagtggccaatatagaacacgtatagatgtttatagacacctatagacatttacagaatatagaacattttcattatcacagaaagttctgctggacaccaccacttttatcattccatcattaaagagtatgtaaatcttgtaagagggtcaagttcaaagcagggatatcagcgattgcctctcagccttataaggagtttacttgggactcttaggtgatggctgaggactgatctaaagtgattgattctggccaggcgtggtggctcatgcctgtaatcccagcactttggctgaggtgagggggatcacttgagctcaggagttcaaggccagcctgggcaacatggcaaaaccccatctctacaagaattataaaaattaaccaggcacgttggcacccacctctagccccagctactcaggaggctgaggtgggaggatcacttgagcttggggaagtccaggttgcagtgagctgtgattgtgccactgcattccagcccagacaatagagtgagaccctgtctcaatcaattaatcaatgttgattctaaacaccgtcatcagtttggatgaaggattcaaaggcatgtacagtaaataagcatataatacaaaatgagcagcaaaacaaatcagaaaccaataagaataaaacaaatgcaacaggtacaaatagcaagaattacgcttagagatggcaggggtgggggatgggtaaggcacatgaatatgggaaatgactaggaacatagcaggaaaagaccagtaataagggtccacgagttgtgaagaacaacaataaaaatgcttgttaaaagcatcataaatgcagtattagtcagaactgtatctggctctagcctccattttccacctcaaagggaattcacatgagagttgtaaaaatgactactttttttttttttaagtatttggctgggtgtggtggctcgtgcctgtaatccctagactttgggaggccaaggcaggaggatcacttaaggccaagagtttgagaccagcttaggcaatacagcgagaccttatctctatttttaaaataatataaaaagcttaatattacagacaatcacagtgagaaagctacccagcaaaatacctcaaatatacaaaggataattacataaacattctagtaggtaaaaactgagactaatttgtagcaagaagtatttaggttacataaaaaacttcagcactagactaggctatcatagacagacttaaggcctaggataagttataaaaattatagctatgttctgcacaattgggcaggtttaaaaaaaaaaaaacagaaaaaaagattacagctttggaaataggaacagtcatccatgggcagaacggcttaggaggggatgtaaatgcaagatgcatgagctggcatcacatcaagcttgttctcgtactaactaaaacagcttcagcttgatatagtgaagaggaaatctccttccctaggtagaatatgacaatggacaggtgaagacgggcagcatctcttgttgattccgggtggcctctgctgctcacagagtcagacgtgttatttgactcttcatcaagcaccggcaagtctctggatggctgctgttctggaagaatggtcaggtcgaaagttggctactataggccgggcgcagtggctcacgcctataatcctagcactttgggaggccgacgtgggcggatcacttaaggccaggagtttgagaccagcctggccaacatggtgaaaccccatctctactaaaaatacaaaaattagccaggcatagtggcatgcgcccgtagtcccagctgcttgggaggctgaagcacgagaatcgcttgaacccggaaggtggaagttgcagtgagctgagattgcaccagtgccctccagcctgggggacacagcaagactgcctcaaaggaaaaaaaagttggctactttagagcagagtttctcaactgttgacactggggctcagtaattctttggtgcagggaccgtcctgtagaggatatttagcagcacctctgacctgcacccaccaggtgccaacagcacctggccaggaaaaatgcccaggagacaaaggcctagatatggtgtcctcactgaaaggtaaggaaacatacaaactagacttaaaaattaaaaggaaaaatatttaaggggctattccggggataagctactaacaaccttttgaaagggaaaggataaaacactgaaatagcaaaatttgaatttatctttggaaaaatcttacaagctgaaatgtcctaaaatggtttttaagttaaaggcaatttttaaatcttacagaagctaaaaacataactttaacagtgcgatggtctccctgtgaattttattttgctctgtttcactgaagctgctttcagtaacaaagaatgggattctcattagaggatgcttccttcagtgccaaaaccattaagcaaagcaaatgtacttagtctagttccaaaatattaattcattttagataaacacatataaatgtgtgcatataacctcttaaaagagggaagctaggccgggtgcggtggctcacatctgtaatcccaacactttgggaagccaagacaggtgtatcacctgaggtcaggagttcaagaccagcctggccaacatgttgaaagcctgtctttacaaaatacaaaaattagctgggcgtggtggcacacccctgtaatcctagctacttgggaagctgaggcaggagaatcacttgaacccgggaggtggaggttgcagtgagctgagatcatgccactgcactacagcctggcaacaagagcaaaactccgtctcaaaaaaaaaaaaaaaaggccgggcgcggtggctcatgcctgtaatcccagcactttgggaggctgaggcaggtggatcacctgaggtcaggagttcgagaccaacttggccaacatggtaaaacccaatctctactaaaaatacaaaaattagccgggtgtggtggctcccgcctgtatgcctgtagtcccagctactcgggaggccgaggcaggagaattgcttgaacccaggaggtggaggttgcagtgagccaagatcgtgccactgcactccagtctgggcaacagagcgagactctcaaaaaaaaaagaggcaagctgaagtcctacctatggactgggcatggtggctcacgcctataatcccagtgttttgggaggctaaggcaggaggatcaattgagcccaggagattgagaccagcccaggcaacacagcaaggcactgtctctaccaaaaataaagaaaacattccaggctatgaatacattattcttgaaacctctgataccagcagtaacaacctcgccttgctggctttggtcagcggtcatagcagctgacaaaagtattttgtccactagagggaacccagcttatcatattgttccctaaacaaatagaagcacagcagtgaacaaaataggaaagagaaacctttgtgtaagtgtagggggcgtgtgtgttacatgcaggggaaaagaaggcaggaaaataataaaactgcagagctagactttttgactctaggtcaccttaatatatttgtatgaagaaagaaaactgaacgcatttcaaagcatttcatttccctgtgcaagataaataaaaaggcaatattctatttcagctagtctaaaaaaaatcttctatttatatagaagtccttaagatttatctgtatcttactaaaaataatctatttccttatgggtcagagccagtaggctttgttcataacaagtgttttctgcacctagaagtaaccacctcctaggcacaaagcaaaatacattattgggaagtctaagaaatgtttaaaagttcactaaatcaatgcgtagaagaaccacaggtaaagcttttaaggcatctgtgaagcagaaactctcattaactgtcaagtggtttttgaaataaggacaaatcagcttatttttaaaccattccttttttaattacaaaataataaaagatcattgtagaaacttcagaaaatgcaagtaagcttaaaaaaaatgttttgtttgtttgttttttgagacaacagtctccttctgttacccaggctggagtgcagtggtgtgatctcggctcactgcaacctctgcctcccggattcaagcaattctcctgcttcagtctcccgagtagctgggattacaggtgccagccaccacatctggctattttttgtatttttagtagagacagggtttcaccatgttggccagactggtctcgaactcctgacctcaagtaatccgcctgtctcagcctctcaaagtcctgggattacagccatgagccactacatccagccagaaagttcttctttttctttttctttttttgagatggagtttcactcttgttgcccaggctggagtgcagtggtgcaatcttggctcaccgcaacctccgcctcccgggttcaagcgagtctcctgcctcagcctcctgagtaggagccgggagtgcagtaacagaaggagactcttgtctcaaaaaacaaacaaacagcctcctgagtaggattacaggcatgcgccaccacgcttggctaattttgtatttttagtagagacggggtttctccatgttggccaggctggtctcaaactcccgacctcaggtgatccacccacttcgttctcccaaagtgctgggattacaggtgtgagccaccgcgcctggcctttttttttttttttttttaagacagagtctcactctgtcctccaggctggagtagagtggcatgatcttggctcgtcgcaacgtccacctcccagattcaagcaattctcctgccttagtctcccgagtagctgggattacaggcatacaccaccaagccaggctaatttttatatttttagtagagacaagatttccccatgttggccaggctggtctcgaactcttgatctcaggtgatctgccgaccttggcctccccaagccctgggattacaggtgtgagacaccgtgcccagcccagaaagtttataaaatcacttttaaccccatcgtccagaaataactactacatgtatctttctggttctatctatgcatatcatcatctatatttttaatgtatgtaaattaaatcttttaaactattttcatttcacatctctctatataaatacatatattttaacatacaaatatacacattcatatatttattgagacagggtcttgctctgttgcccaggctggaatgcagtggtgccatcatggctcactgcagcctcaaacccctgaactcctgtctcggcctcctgagcagctagaactagaagtgtgcaccaccacgcccagctatttttatttttatttttgaaatggagtctcactatgtcgcccagactggtcttgaattcctgggccccagtggtcctctgaccgtggcctcccaaagtgctggggttacaggtgtgatcatgcgtggccacatttatacattttttaatggttatatagtatttcacagaatgtactgcaccataaatgacttatgttttattttttaaatttatgtattttatttatttatttttttgagatggagtgtcactctgttgcccggactggagtgcaaaggcgcaatctcgactcactgcaacctccgcctcctaggttcaagcgattctcctgcctcagcctcccgagtagctgggatgacaggcatgcaccaccatgcccagctaatttttgtattttagtagagatggggtttcaccatgttggccaggctggtctcaaactcctgacctcaagtgatccacccacctcaacctcccaaagtgcttgggattacaggcgtgagccaccacacccagctttacatttaaaaaaaattttttttaaacattctctactgttgatatttaatttagattgcttccaatgaaaggccctttaaaggctcctctcttcctatgtgacattgccccagaagcggcgctgacacttcctcagaaaagccttcactataaaacaccaagtacacagcctagaaaaaaactcagtcgattttggctcgagttcttccacctcaggcaccccctgtgattctctcttccagtttttcatgggtctgcggcctcctccatccagcgttcagatccaggctcacagaaatccccattttttctttcttctctcacacccaactttcccattgtgcaagagtgaagggaaaactttccaaatatcctgattgtgtaggagtgaagggaaaacttcccaaacaatccccaggcccccgagctggtatttcaaaaacacacgaggctggatgtggtggctcacacctgttatcccagcactttgggaggccgaggcaggtagatcagctgaggtcaggagttcaagaccagcctggtcaatatggtgaaagcctacctctactaaaaatacaaaaattagccaggcacggtggtgggtgcctgtaatcccagctactcaggaggctgaggcaggagaatcgcttgaacccgggaagcagaggcagcagtgagctgagactgtgccactgcaccccagcctgggtgacagagtgaaactctgtctcaaaaaaaaaaaaaaaaaaaaccacgtgggcctttctttgacaattaaattcctgttactgcagaaactgtgtccaactctccttccagtgctggaagcagccaggcttgcagtggcatcccgatgatcaaaacaatgcacttgcctctccctcagaaagcatcctacgtaccacaagggttaatggcctaattctttattatcttccccatccacattcatcacaagacaccctgcccaggaaggcaagaatgagaggttattgttaagacagaatgaatgagacaatgtgcagttctgttcctctgacctgacaatgtgactgaggcaggggctctgtgaccagagaggggccccggctaggcctctgtgtgtcccagcacagctgcctccttgtgctgtggagaaacaaacctggctcagaagtctctcatcccagatgcttcgacctcaagagcaccagaggaagctgagaaattcgagatgctgcctagagcccatgctgcctctcagtggatctcttggatccaattcctggctgccctttcttattccaggtatccctaggactggagtcatgatcagtcttttcttctttaatatataaatggtgatgagtgtctgggaatgagatgccagatcacgaatgccatctgtacaaggatcttgggaagaagctcagttgcttagatctctaatcatcgatcaggtttaggaaaactgagagtcatggcatttgtatgccacaccagtaacacatccagtcccatcaagagctacatggtcgctccaagcaccgggagcggggaggtacttctatagaggtgcgtaggaaaggcaaaggcatttttgttcactggactggcacgtgcttccccacagaagctgttcaaatgcatactgtactttctggcaaaatcttgtctctcagagttgatgattaagacttttctcaaagaccagagtcaagagccaaaagaaaaggccacagaagaaaccagaatccttctcttggaagttcaaagtcttgttctacccaccagcttacattagttttctaaagtggaggagtttcaggaagttgccggaggtcatgagaagagcaaagatttctttgtggcactgtttttttccattccaaacaaacaaaacagaaacaaaacaaaatcccaaactcaaaatacaatttcagagaacaccccagatttcccaaagacagactcactctgtagccactatctgggggatgggttcatctagcagttccaagctgtgcaggatccaatagcagagccatgggcggctggcatccagacactgggagagagacaggagagaaaacatcccttattcacaatcactccaagacactgctgccaaggctgtatctgtctcactcccagcagcctggcaagggggaggagggcacccttgctcaaacaacaatcagtgaataaaggacactttgctttgtggccttagccaggagctgaaatgaccatctgttaaaaaaaaaaaaaaaaaaaaaaaagataacaaggctgggcgcggtggttcatgcctgtaatcccagcactttgggaggccaaggtgggtggatcatttaaggtcaggagttcaagaccagcctggccaacatggcgaaaccctgtctctattaaaattacaaaaattagctgggcatagtgatgtgcgcctgtaatcccagcgacttgggaggccgaagcaggagaatcacttgaacccgggaggcagaggttgcagtgagccgagatggcaccactgcactccagcctaggcgacagagcaagactccgtctcaaaaaaaaaaaagaaagaaaagaaaaaaaagacaacaggattaaaaaaaagatgaccctgaacccagtggatccctccctggcaggcatctaaggaaggctgagcagaggacttcctacaggccaggaggttaggggctgctattttctcggtatagaaccaaggagatatacattctctgaagagatttcctagcttaactcaatcactgattcaacaaatatttgatagtatctacttgtgccaagcactgtattagacactggggggatgataataaaatttggtttctaccgtttatttttttgagacagggtctcgctctgtcacccaggctagagtgcagtggtatgatctcagctcactgcagcctcaacctcccgggctcaagcaatcctcccacctcagcctcctaagtagctgggactacgggcacacaccactatgcctggctaattttttaagtttttatagagacagcatcccactatgttgcccaggctggtcttgaactcctgggctgaagcaattcacctgcctgagcctcccaaagtgctgagattacaggcattagccaccatgcctgaactggtttctgttcttgagatgcttgggatatagaatgtgtgtggttacctgtaggggaagagagcactggacagacatataagttacctcatgtctttctggaaccaacacgtgtacatatacctggagaaatgctgtaatggacgaaaacagagttttgagggagcacgtggaagagactgactaattctgcctggggagctaggaaaggcttccaaaggcaaaatgcagacggctcttgatcctaattaaaccataaatgattattgagcattcaaggctaggcagggtaggtaggagtactgccccagttttataaattaaaatatataaatgaggtccaaagattaacctttttcagattataaaaatagcaaatgtcagaggtgagacaagaacctaggtttttagagtcaatccagtgttctttccgttggcccaagctgctctcttcaaaactatgctgatatcccaagctgtggctaacccaccacctggaaggtaggctggtgagctactgaagacactgccagggatgcagcttaagtttgaatcccagctcctcatcttactcgctatgtgcctttgagcaaatgacttaattttactatgcccatttcattatctgcaaaaaacaagagattgatctacctcatgtagttacaagatttaaataagagaatgcaactgggcgcagtagctcacgcctgtaaccccagagcctcaggaggctgaggcaggtggatcacttgaggtcaggagctcgagaccagcctggccaatatggtgaaaccctgtctctactaaaaatacaaaaattagccaggcgtgatggtgcacacctgtaatcctggccactcagaaggctgaggcaagagaatcgcttgaacctgaggcggaggttgcagtgactcacgatcatgccactgcactccagcctgggaaatacagcgagactccatctcataaattatgagagaatgcatggtaagctttcagcacactgttcaataaattgttagctgatatggtaccaactgtaacataactattgaggacttgagtcaaggattgaaaattcatagcccacaggccaaatctagcccatggatgtgtattgtttaactggtagtagctgcaacatttgtcaggagagtcacatgaaaacgtgatttccggcttcatttggaggaagaaaaaaaaaaaaggaaacaaagatgatttggcaaccctgggtctgcattcccagatggcagtaatgggcaggaaagaagttaagggcacagggtctccagttagcctcagtctccatgcagcccacttcactgatttatgctgcctgcctgggccctacaggcatttgagttggcaaatcattgccacaaataatcaaatgtggaacccaaataaaaagcagattaaaaatagagatgctgctctgtgttaagcagggcagaaagactggagacttcctgttcacattcaccctttgcctgccgctcagtcccatccaacatctgtcccctccaccgtcacccagtcctgacgttgctctgggaaatattaaagatctactcttaaacagtaatgttaaattgcaaggaccactctctatactggtcctctagtcagtatagaaattagatcttattacaagaaagggttttttgtctctttaatgaagatatgaaaagtaatgtacttactagaaggagtggtgaagttggaaaatttgtaaccatcacgatacagacttaacaggtttggacaatagtcctcaataaatgagcgagaaattagatcagcttatagggcaaagggttaagggtgaacaggtaactggcatttagccagctgtcaaggaggtctagataaagcacgtgaaccccttagtcatcatctagtaacagaagaaagccccatcctatctagggtgctccactcactctggaagagactaggttctgccctttcagggctgagtcccagctctgtgacagcaccctacctcctgccagagccacagagaacaaagagtgactctgcaacaggtcagccccaacagtcttttacgtttaaatagaaaaaggaggaggatttggtggataatttgacagcaagagttcctgggtaatgtgtttacctcataggcatctgtcagttgtcgaaggcctcttttcagataatggaagtgcttctccctctgcaaaacaagcctggaaagacaaacagtttataagcccattctaatagcttatgcttccaccatacacacgtatgtgcacgtacacacacacgggtaaacactcagcttcaggacgtccccctgcaatcactgactggataaccagcaacttctctggttccaaagagcaactaaaccagagaaaagaagctcttgtctgaatgtctctaaagcatctgaaaaccatgccagctgacatttagagtgcgattgtctcctaaaggcagtgactttgggctaacggaaaagccgcaatgagcacacgcagccaggcaatgacagtccacccagaaacttcctccagcatctaagaacagatatctttgtgcctccccatcctataagcaatttaaatctgagcctcgccacttccctgcctcagccgctgtcatttcagtcaccccgtctgggatgacttctccaaggcccataatttactccctgcctgcctctcggttatccaactattattctctccctgaaattccacctcccacgtgtgacccacagccctggccagaggaccgtgttctgcagccagtcgctgtccttggctttcaagtcagcaatactggctttaagatggaatgtgccgcccatggccacctgcacaggccgggcaaagcacagaggctgcacttctttcttggtctggcagaagagcctgtgtgactagggaaggaaacaaaaagcacagattgtcaagatgttccccgtgcttgcagattacagaaacaaaggaaagagaaccattccctttgctaggtagtcaattccacaattgtttatcaaattcccactgtacttggctcagagtaagagccttcatgcagtctttttttttttttttttttttcctgagacggagtctcgctctgtcacccaggctggagtgcagtggtgtgatttcagcttactgcaacctccacctcttgggttcaagctattctcctgcctcagccacctgagtagctgggattacaggcacgtgccaccacacccagctaatttttgtatttttagtggagacgggggtttcaccatgttgcccaggctggtcttgaactcctgacctcaggtaatcccctgccttggcctcccaaaatgctgggattacaggcgtgagccaccgcacccagcccttcatgtagtctttacctcaaaaactcttccaattcagaaatgaggtaagtatatcaatggctacaaggaaagaatgggtaggttttgcaagggaaaaacatactactgaggctcaaaagggaggggatatctcatgaagaaaggaatgatcaggaaagtttgtgtgaaaaaggaggaatgtgcgatgagtggccctggcagaaggagaaaattttaattcaattttaattcaagtttaaatagctgcaggtggctaatggctactctactatgctgcacaggtatcaagtgtacaagaggagtgacaggtgggagaatctgacctcaatacagggatgaaagaggaatgggaggaaagcaggagtactgccccagtttaaaaacaaacaaacaaacaaaaaaacaaggatctgggatgctgactaaggcatttctactcaatttactaggcaaagggaagtcctgaaggtttttgagatgaggaaagaaatgatcagaactgtgctttggagaaacagtaggtagtcagtatgtgtttacaaactgaagtatctgaaaatatcgcagtgggcagacagatggggtggggagacagggttagaagctctgaggagctgacccagttggggctacttagggcccgaactagtgtgtgacccgtgatcagctgacttttggatgtgtgggtcttaggatgctgggactgcattcaggtgatgatgtcaatcaggctgctggacacacacgtgaggctcaggagagggattcaggttacacacacagactacgaagcatttgtctgcacacaagtgacaggtgaagccacagaaggtgagagggcagagagagaagtttggaaacaaaactgtgggaagacccatctctaagggtttggaggagccagtgaaggagagaaacaggagagtttacatatgctagggaagagcaaaggaagtgtcatgtcacaggccatcagggaggagagaatttcaggaaggtgtttaacagtggcagatgctgcagcaagactgaggggaaaagacaacaaaccacagaagggctagagacctccaagagcattcagagcagaggtgaaggcaaattgtaaacaagagaaggccagactcagtttctctttcaggaaagtccactcaggacgcagggagcacccatctgtgtgggcagagtgttgtccagcactggggtagaggctgctctgtaccctagagcgacagtccagaggtggacacacatgtgaaaatgacaagcagagccctgtccaataaacgctgtgatcagccacgggaagagatggagggtcagaaaactcttcccaaagggaagagcattgagtttaaggctggaaagacatgagttaagcaggcaaaatgaagaaaacaccatgacacatttgagttagtttagttcagctggatcaaaagtacaaggcagtaagcagagaaattccacattagaaatgcaaaagctcagaggaaatccatagggaaggtctgtaaagaggatggaggagggctgggatgagggtatagtaggagaggtgagcctggaataaggaaggatgctgcattctttgagcgagaaatgatgggtacgaagctagcgaaatataggtctctgatgtgggaagaaggaaacaggaaagtcaggtgggtcagcctcgattttctcaggaactaggagtcaagatggtgggagagctgtggagtggccacggtggtgggtgtgttagggaatctacatgagacgaataaaaggattataaggcagttagtgaagcgccagtgaaattaagaaatataacatgttggtgaagccagtcagcagcctcaggagaaaccaagcctgctgacaccttggtcttagacttctggcctccagaaatgtgaaaaaataaatctctgtggtttaatgcaccccatctgtgataccgtcttatggcagcccaagctgactaataccctcaccggtccttcattctcaactcacctctatccaaaaatcttttctgtgtaggaagttaagaaagaaaaggtagagctcttcctatttttacctgaacaattcagccccaaaaccattcaattacatggagcagaataagacaggtttcgtgcaggacttgagggggtgcagggtgggatgcaggctgtcagctcaagtggatgaggagggcccccgtctcactgtgcagagggtgacaggagagcaagtgggtaaatctattaaggctatgggaagtcaggtttccactgtctgagaaggaacttacacatctatgtgtactgggtaatgatttaaatagaatttcttatgaggggtgagcccactgggcttccagactcttcacaatgtgcctccacccacactactctccaacctcatctccgcccctgagctctggtcatgctgccttctttgagctccgctcctttcagtctcctggctttagcacatgctgttccctctgcctggaacactctccccatcctttaagttagccacccctattccacctacagattcagcttaaatgtcactttctgtaagaagccttccctaacttcccaatccaaattagattctcccagtgattctctctctcaaattatcccatcggtaactgtatatttgtgttcatttgtttaatgtccacctcccccactagaccaagagcccagcaggggcaggcccagggctagccttgctcactctggcttccctgagcccagcagagtgtcctgtcctttggagactctctagatactgctgctgaaagagaggatcacacaaaggcagcagaatggaatgagagcaaagccacttcctccccccaaacctgggccatcctggaaaacatgcatttgattgtgacagatgagaggacaggggattcagtccattgctggttcctggggactttctaaactcactaaagccaggggcctctctagtcaaaaaataagcacctggcatgtaagcaataaagcaatcgaggaaaggtgaacttatttgtgagaccttggaaagaacaacagtaagaagggaatacatcctctacctgctcaggatctgggaaattctaaaattgtatcacatacaggaatagtagaaaacacgggagctaagctggtgcctgtgagagacctgctttgaggactttaactcagagtattctggcttcagagccattgtcagcacttaacctccagggctctattagcacagggacattatcaatatttctcacttctgaggagcacccgtctccttgcccaggagaaaacaaatttaaaaactacatgtgagcgaggtatctgtgtagtttatgcatttcaggtttcttattaaagccaaggtgataaatgcaaaagggtacattcaaaagggtgtgaaaccgtgacaatacccacagggaagaaaaaatgaattttcatgggaaagcagacatgaataaacaaaaccatgaaaagcatggtcaaaaagctccttgggactgactacctcactccaggtagacagtcccaaccttagagaagaaaatcatttctgggaaggggattaagtatagaatgtactgacattcagctccaggcttgactttcagcccagtctgctattcagctttggccctggaacactgaataggcaaatgcctacttcagcatcatcacaggcatccctggacctgtgcgtggtctgtggtcctgggcatgtgtgtgagtctgtcccatttgatcagcatcatgacctcagacacacaaacaagccctgccatctagatttactgctaacagctaaccatgcacttcagctaacagtgaaggttacttcctgtattaaagtgtcagacttttaaattttgactattaatatgttaaatattgagactgtgataatgatttaaaattctgataaattttctaatttattcttatatcctcgcttattctatgatggtgatgtttgccttcagccttatattgatatgttgaattatatactcagccattcagccaaaatgtatagtatctccaatattaattagcatcctttaaaacactcaatttcataggcaacaatgataaaaacgggtaattgtgaaattcctgaaactaacccagagccctgatatattctatttccacaaggatccgagcccaggaggaacactttttttttcccacccatacttgacctaccagctatgaatcaggggatttcactcctttaatatcatctaccaccactctcaaaaaacaactgcttcctcccagactataacctcccattttccctcatatctcagtgtgaataaaagtctttcttcagctcatgagctaaggaaaaacaaattttaaaaaaggaatgaaagagaccaagggctctatcctgatggtaagtgaaaagggaatgtcaaataatcaaaggttcatgtgagaaacagaggctgtgtgtccccagagcccaggcagtggacagtgactcagcccgatcgggtgagtcatcgggggtacaaccacaacaacaaagcccctccaaaagcaatcacccacaccctcaccattatgaagtcttgtcccctctggggaggctaagcttgaaccagcttgtgcctaggggcagcgaactgccaaggataccattacatttaagagagctcgttctcccaagctatttaaataaatggcgtcatttgctaatctctagctgtatctcatgacaagaggaataattcattttattgaggtcagagcattgggttaatgcagagatttggtttagcagttaagggaaagactatactagtaagctgatatttttcctcctttccttccccag

SEQ ID NO: 735281 - DNA, 1607 bp, Homo sapiens
cggcgaggtcggtcattctgcctgtccggtagcaccacgaaacacctgccactgacacctccccaccagcccccgagggttcgcgcaggcatcccgagccgcgccccctggtccgccgcagccagattccctcccgggcgggttacgcccctaggcgcaaaacggaaccactccgtatgaagaagacaaagtataaccagtcacaccaaagagaggcagcattatttagacagccggctactcccccagagactccacccagtcccctgggcccggcgtccagcgcgcagacggtgcccggctccaggagttccagctccctccacgtgtcctgtcttcccagcagcctcctctgccgcctcgggaggaaaatctcctgacaactcgcggtctgcggactacgactcccaggaggcgccgcgccgcggctctccccgcccccccccgcccccccccccctccccgggacgcgcaggcgccttgggctccgtcaacaagccgggctggcgtcgcctggatgcggtttcttccgggatttgtagtttttctggagctacccgggccgtctgttagagggacaagaactacaagtctcggctgccccagcgctgcgagcctggtcacgtggcgggggccgaccgggcgtgcgtgccgccgttgatccggtgctgcagtgaggagcgtggttcttgcccgtgttgtgtgtgtgtgtgagtgagagagcgagtgagtgagtgagtgagtgtgtgtgtgggggggactcggcttgttgttgtcggtgacttccccctccccttcaccccttcccctccccgccgccgctgcagtggccgctccctgggccgtaggaaatgagcgataacgatgacatcgaggtggagagcgacgctgacaaacgggctcatcataatgcactggaacgaaaacgtagggaccacatcaaagacagctttcacagtttgcgggactcagtcccatcactccaaggagagaagggaacaaagatgaagttaaccctcccacctgtctttccttatgaacacttgccttttccaactgttttctgccatggctaatcagaaaaagtttcttaaggaaatggtggcaaaaaaaaaaaaaaaaagacacaaaggtaacaaacaaagctggacctatttataatgttccagtaagcagaagtacctagagactgacttgctaggatttagtctgttagaagatctcaagaagtcaagagacatgatgaaggaggaaaggctgaacttcagacctgcaacttcccagccagagtgaatcagccagtgacctaaccacactttgttcagagatgtcaaggaaaagtgttctctcggccaggtgccatggctcacagctgtaatctcagcactttgggaggactgcttgaggccaggagctcaagacaagcctgagcaacacagtgagacccccatctctacaaaaaataaaaacaaaaataaaataagctaggcatagtgatgtgttcccatagtcccagctactgcggaggctgcactgaaaggattcgcaggaattcaaggctgctgtgggctatgatcagggcactgcactccagcctgggcaacaga

SEQ ID NO: 735282 - DNA, 71472 bp, Homo sapiens
cggcgaggtcggtcattctgcctgtccggtagcaccacgaaacacctgccactgacacctccccaccagcccccgagggttcgcgcaggcatcccgagccgcgccccctggtccgccgcagccagattccctcccgggcgggttacgcccctaggcgcaaaacggaaccactccgtatgaagaagacaaagtataaccagtcacaccaaagagaggcagcattatttagacagccggctactcccccagagactccacccagtcccctgggcccggcgtccagcgcgcagacggtgcccggctccaggagttccagctccctccacgtgtcctgtcttcccagcagcctcctctgccgcctcgggaggaaaatctcctgacaactcgcggtctgcggactacgactcccaggaggcgccgcgccgcggctctccccgcccccccccgcccccccccccctccccgggacgcgcaggcgccttgggctccgtcaacaagccgggctggcgtcgcctggatgcggtttcttccgggatttgtagtttttctggagctacccgggccgtctgttagagggacaagaactacaagtctcggctgccccagcgctgcgagcctggtcacgtggcgggggccgaccgggcgtgcgtgccgccgttgatccggtgctgcagtgaggagcgtggttcttgcccgtgttgtgtgtgtgtgtgagtgagagagcgagtgagtgagtgagtgagtgtgtgtgtgggggggactcggcttgttgttgtcggtgacttccccctccccttcaccccttcccctccccgccgccgctgcagtggccgctccctgggccgtaggaaatgagcgataacgatgacatcgaggtggagagcgacgaagagcaaccgaggtttcaatctgcggctgacaaacgggctcatcataatgcactggaacgaaaacgtagggaccacatcaaagacagctttcacagtttgcgggactcagtcccatcactccaaggagagaaggcatcccgggcccaaatcctagacaaagccacagaatatatccagtatatgcgaaggaaaaaccacacacaccagcaagatattgacgacctcaagcggcagaatgctcttctggagcagcaagtccgtgcactggagaaggcgaggtcaagtgcccaactgcagaccaactacccctcctcagacaacagcctctacaccaacgccaagggcagcaccatctctgccttcgatgggggctcggactccagctcggagtctgagcctgaagagccccaaagcaggaagaagctccggatggaggccagctaagccactcggggcaggccagcaataaaaactgtctgtctccatcgtctcatcctcctttcagttcgttggtagagccctcagaaccatttaagagactctttatttttctctttctcccttttttttttaaatttttatttttacgtagaagctcttggacaacagctctcgttctccttccccatttccactgtatattttttaatgtattcccttcagggattccctgtccccaacaggaatttttaaaccaaaacaccccaacttggcagctttttctgtggaggacagacggccggccggacctctgagcacatagtgtcctgcccaccctaccagctcctccagccctgccgggcacatgcccgggggacgcctgccctgcccaggtggcctcctggcccgccctcacctctgatagactttgtgaatctgaactgctctactttgagaagatgaccggtttggagtaatcagaatgaaccctcctcctttttaagggttttttttttttcctttttctaaaaagctatgtatcgctcctattgaaagaccagatccttagagaagtttgtggtatagcttctctcagccagctgtttaagcctgcggcgccagcctcacggagggccgtgtgacactctcgtggtatgtatgggagatggcagcagtgaagcagcagccaccagggagtggccatttggggttgggacagggagggtgttttgggtggcatagaggttttgtattgagggccagtgatgatgttttgatatttatttcctgctacttaaatttgaatctgagtgaattgtacctatttctgatgatgtcggtcttgcaaagcgacagattcataaagtaatgatgaaatctttctttcttcccgtgtgtatttctaagaaatagagccaactgattttgtatgtaaataccaagagcaatttacctggtactaaacccgcaccccagtgcggacccttcccagccctcatcccacttcctttcctactgtcctggaacctgtctccattgtgtgatccagccctggttctggctgtggtcagcagatcccagtgaagggttttgtgtgtttaggcctcatttctttgtctttttcctactccgttcctggcatttgctgatttctagtgtatactctgtagtctcagttcgtgtttgattccattccatggaaataaaaagtatgttgtacatactgccgaagaattgtcttgcaagttaaggcttccccctttactataagactataaataaaaacttattttatcctttcttggtggtggtgtcttcttacccttgttaaggccaaggtggttgatgagagacccctctggaagctgttagggcctcaatgtaagtctgagtgagaagtggaggtggcttacccggtcttgcagaaccaggagcagccataagccagagttgcttcccctttctcagctcagcctgagagagtaaatgggtggtgatggctttgttcattggatgaggcttttgaggttcaacagggatgtagccttagctgtggcaacatttctagatctagtttctgctaagcaagtgacctttgggggaattggtagcccagagctgtggttcaggttctcctggtaatgagtgcccagttcagaggtggctgttctccaggacctttcagtttctagatagttccagtttattaagaggaggcagcagagctgccaaggactggaagtcaagaaggctccaactgcaccgagttagctctactcagactgggacccaacaccagcctgaacttgtttgaccttggaagaaaaaggaattatggccagaacgcagctcagtgttggttttcctgtctggctgacaggaaatactgctgttcctagacccagagaggaagtcaagtcaaatcagttcttggatttgtcaccatctttagagtggtggagagcactgtggctcctatcaattgtatgtcaaatccgtaatatctttttttgtttaatgggagctggggcagatgggtcttgtcaatttgaaacatgatcaagcctccaaaggccatgattacattaaggaaaagaaaaatgctgggaaagcaagatcccatttataaaggcacttcttttcaagatagaggaaagaaactgcagtaaggaagaaatggaaatgagaatcagcttattgcctaaagccctcaaggttaacatgctttcctctttttcattgcccttaactatatctctttgtatatctgggcttaagtatacagttggtttgcttagtattggtgttagaagtgagctgtgggtgaagccatgttgatgcagagatggaaggcatgtgaagctggcacccagtagggagatagcaaacaggaaggggcagtcaagccagcatgaggacaggtggtgtccctgagagccagtccctggctccagtgtattggctggacaaaggattgagtttaggcttctctagatttcagtaaaccagttcagacaaggggcacagtggctaggtggctggttcacctaggaaaatccaaaccacctgattgacatggtgagcggactttggcacagggtggaggtaccactggaagcagcttcctgggcaggaacacagggcaggggagctccgcctggaaactgctcagctgaaaaggccaagtcaaagtcacagccaagcaagccccttctggtatgtgtgtctaggaagcgagtgtgagtattccctcaggataccaaagtcggaccatagcttactctctcacagtaatggtaatctctggtttattttttatattactctggacactcacttacacaaaaccagataagctgtagatttgcttggtcactgtggcaggtggcttcactgaggagtctgttaagcgtgctatttccctacctttacagttgccccaagtgcaagggtatttaaaatggcccagtttttaaagttcttgatacgctaaccccattgtaaaacatcaacaacttcttaggtaaagaatctaagctcacagagctgtcatcttagctgagacaggtttaaaaaacaagactgagtagacaataggagccagagccctgaactgggactgaagtaagcagaattctgtttctgatagtatcatgtgtgttttatgcttggcctctgaaagcagactggctgggttcacagtcctgtctctgccactcggtggctgtgttacttctcccagcctcagcatctttatctataaaatgaggataataatagcactagcctcatgagatggttatgaggcttaaatgagataatgcttataatgtgcttgacctcaggaccaagcaagcactgaggtgcctctgctgtcattatctacacaaagcatgtaaccagggctgactcagcaaggtggaaaaagccagctcccagacacctttcctaaagtgagtaagggttgacttcttggtatatcacaaatgcttcccactcctcagagatgtgccccatccttaccaggcacagtgactaaagagagcaaggtgacaccaggactggactgacaaactcttcgagactaaagcagcccctgtgggtacattaattagatctggtgtcaactcgagtgaggctctgcccattccctcccaccacgattcagtggcatctctcaggtttggacacttttggaggcccaggcagaactgctcagaagccccatgtggtgttactcaaagtgggatccttggatcatgcccagggctgcttgttaaaaggattcctgggctctaacccctctaatctaaagtgtgccgtggctcaccagtcagtttaacaagctctttcaggtggtcctcaagtcactcaggtttgactcccaacagtaatataacccggggaaccaaaaggacgctgttggggaagttaggcacagctgagctgaattagcgaagtggttctgaggtcaggatgaaggtgggggaggcgggcttgttaaatagttcaacccttagagctgccttgatgagtctacgtgctcccagcatgcctccaatgctctagggggctggctgagctacccagtttttaaacttgagaaggaagaaagctgagggctgcctacactagcccctttagaagccccaagcaggggtaatgacatggggcagcactcatttctgtagcatgcctaggctggcctctggtccccaggcaggttttataatccagccagagcaagggtctctctcaggcctggtcaccaggatgcattctcaaaagcctctgggaacatgaaactagagcattcctttcttcaaaactgtttctctagcctgaagaggaaacccaggtaggaaaaaagagtttgtcaatgtctacactgctagatagcgaatagagaatttccttcagtgtctagggtttactagggcagcggctaactcatacatccccaaagttcccttgggaagggaataaaaaatagtttctagttaacttcctcagggagaaaaccaatttggctaagccaggcttaactataggtaggactgggtgactgcaccaggcaggcctgtgcatgggttttggaggctctcctggcaaacccttatcaccctgctggtaagtgttgtccttgcttggtgtttcattggggtcggtgttgggaaggagcccagggagcttcagaatgactgccagagcgggtagggctaggggctctgagcccgcctgtctggactgccatgccagctacaacccttacctttggggtgacattgctctggcttcctgtgccattatgtgaggacaataatagcaccaagtgccattgtgaggcttaaaggagtgtgagaagcccatgaattgttcctggcatttaatactcaataaatactgtcaaatcttagatgtgtctgccatcagatgtcctgggtagtgcagccattttttagttttgttaaaatgtggaatgaagctgggcgcagaggctcacacctgtaatatcagcactttgggaagccaaggtgggcggatcacttgaggtcaggagtttgagaccagcctggtcaatgtggtgaaaccccgtctctactaaaaatacaaaaaaattagccgagcatagtgttgcatgcctgtggtcccagctactcgggagactgaggcaggagaatcgcttgaacccaggaggcagaggttgcagtgagccaagatcacgccactgcactccagcctgggtgacacagcaagactccttctcagaaaaaaaaaaatgtggagtgaataaactctccttttcgctgatgtaataagagtttagtatattaaaatccttgaaaggggaggtaaatgtatgttgaatgctaaaaggcagtaaaaatttgcatgttttctgaaagaacttgagcaagaccacaaatctgttaccttttggagaaaaaaaaggagttgaggaatgaaatatacccttgcaggctggctcagagccattaaccattaacatactggcgactttgccctgttcttcattccagtttcagtttgcatttctgcagtgccgggtggcaggcactgtgccaggtgcagatactgcaagtgcatctggtgtctgccccgtgtttcttgcccagggctggttatgacagtggtcagccatcgtttttcagccttccccttcagggaccccttgagcagaatctgcctggtgggtgaggtggagcagatgagcctcatgactgggccgaggggcccgcatgctctagctcactctggatcccatgtgcacgctcgcacacacaacacacccagcaggatgggcgtgtctagaagaatgccgagcaggtggccttggacaattcacaaccagccgagcaggtcccctcctgcgccctgtgctagatgccagctgccccagcaggcctgttgtgactgccaggccccatttaggattgttttcctttgctgtcctttgcagggtggggctcttgtatacccacagcctgctctgggcaaaattatgtagcacggtctctgctattaattttttccagtaaattaaaggctagagaagaagaagaagaaaaatcaaggatccaatattaagaaatctgagcccaaaccttctactccagtgctgaacatggtgaaggattaagcctcctatcaagaaaaacaagcctgacagcctgtagactgatagagggaggtgtgccttctctccagaaagcctacttctgcaggaacccaggagtatggaatgagccatgcaaagtctgattcaaaaaataacccaatgggcatgcacccccagtcactcatccggaatccggctggcagcctggcagcccggcagcccatggctcccatgcacagtgcttgagagcttcattgtttcctgtctgctggtgccatcaacagctctggggtggcaggggcagatcttgggctaaaggacagtggccaacagctttgggccaaaaggccacaacaagaccagccagctaagaggaggaatgtcatgtccacagcgaatacctactgcagcaaggctgtaggagactttggagaggaaggaccctgtttccaacaacttgaccatgtttcccatccagggacctctgtgcagagagtggtggtgagcaagtatttccaactgggagcccccacagagtcagtggctggtctgtgcacttgttactggactcctagcactgtgcttggcttgtggtgggtactctacaaatgctgcatgcatatgtgcgtgtgccagtggactccagccttgtgatgtaccttcatctctgtgcccttgatagggcggttccagggttgcctctgcgtgagttcaaccctcgggtatttgagcagcacgtagcctcagcccagcattgtgctggctactggggcaatctaggcagcttataaaggctgggccttgccttgaagaagcttagagatgaggttaggcatttagcacaaatgcacgtctgggctctgaatgccagaggagttcaggagatgggccctcagtgagagcggtttggcactatgggaggggcagggccaccaggtcatcgcttctcaagctcttgatgggctctccttctgtcctgcccacaagagcccagccttgggctccccatctagctgtccagacaggctgggggtggggggctgttggtgaagggagggtgggccagagccatctgctctgcacaggttgggtcacgattctattccaccactttcactggtcccttggtatccaggcacatggcagccactgctccagagagtgaggagaggggctggggggatggagcctcgcaaggagcatggacacctagcacttacgtcatcaccatcggcatctgccttacctggctacctctctgttcagcacacctgggagcagcacccttgcagcccttctcccttgacagagctgtgacattgaaccctgccctggtctggtagctgagggcccagcctccccttgcctcctttgtcccatcagcccaggccatcatgggtacagaaggtagcaatgaagtctcacactcggggtaaccaacatgcaatacttatggaaagactgtgtgatcaagggttgagagaatagtatactgaacccaaatgtacccattacatagtgtgaacaattatcaacatgcagtactcgttgaaagaaaagggatgataaaaatgcactattattgaaagtaagaaagtgtggggtctgttaaacagacaaaggagcccactgagaaagctcccaaaggccaaaactgcaacaatttgagcaacaaaataaataatgtagcattggaacataatatgaagtataaaataaacgagtccatagtgaaagaaatggttgaataaattgagaataaacatctcccatgtagaattccgggtagtttatgcaggtgctctgccttcaaacatatggagcataactccccacttctgtttgttgttttgagacagagtctcacgctgtcgcccaggttggagtgcagtggcacaatctcagctcactgcaacctctgcctcccaggttcaagcgattctcctgcctcagcttctcgagtagctgagattacaggtgtatgccaccacaccaggctaatttttgtgtttttagttgctatggggtttcatcatgttggccaggctggtctcgaactcctgacctcaagtgatccacctgcctcagcctgccaaagtgctgggattacaggcgtgagccacctccccacttcttaagcgtggactgcatatagtagctaccttctaaaggacacattcaagaaagggacaaaaagtaaccttatggaggaacctgacaaactacctcagccaggcgatgaagggtaacatcagcataaacatgatgaagcaggttgatagtatgtatccttgatgtgtgatgagaatggtactttacctctgtggccttcctccaaaaaactgttacgcatggtctgggcacggtggctcatgcctgtaatcatagcactttgggaggccaagggaggatgattgcttaagtctagcagttcaagaccagcctgggcaacatagcaagagcctgcctctaccaaaaaaaaaaaaaaaaaaatgtaattagctgcacatggtggtgtgtgcctgtggtcccacctactcaggaagctgaccaggaggattgcttgagcccaggaggttgaggctgcagtgagccatgatccactgtactctagcctgggcgacagagcaagacactgtctcttggaaaaaaaaaaaaaaacataaacccatctagtcataaggataacatcaaacaaatcccacctgagggatgttctacaaaatacctggccatacttttcaaaactgtcaaagtcatcaaaaacaaggaaagaatgagaaaccgtcaaaaccaagaggagtctaaggagacatgagacatgacagctcagtgtaatgtagtgtcctgggtgggatcttgggacagaaaaaggccattaggtaaaaactaggggaattcaaataaggtatggactttctttagtaatgtatcaaaattggttcattcattatggcaaatgccacctattagtggaagatgttaatagggaaaactgactaatgggtctgtgggaactctgtgtactatctttgcaatttttctgtcaatctcaaactattccaaaatgtttattttttaaaatgctttttttttttttttaagacagggtcttgctgtgtcatccaggctggagtacagtggcataatcatggcttactgcagcctttacttctcaggctcaagtgaccccccatcttagcctcccaagtagctgtgagcacaggtgtgtgccaccgcatccgactaatttttttttttttttttaatttttgtagagacagagtgtggctatgtcgctcaggctggtctcaaactcctgagttcaagtgatcttccagccttggcctcccaaagtgttgggattacagtcatgagccatcacacccgaactaaaaaatacattgtttttttttttttttttgagatggaatttcactcttgttgccaaggctggagtgcaagggtgcaatctcagctcaccacaacctctgcctcctgggttcaagcgattctcctacctaagcctctaagcctcccgagtagctaggattacaggtatgcaccaccatgcgcggctaattttgtatttttagtagagacggggtttctccatgttggtcaggctggtcatgaactcccaaccttaggtgatctgcctgtcttggcctcccaaagtgttgggattacaggcgtgagccaccacacccggccatgcatttttcttattgttattttgtaagcgctgtatttcctcagggggagcagagggcaagggaaagtttccattaagctgggctaatgatgagcgccctgtccctgccctgcctggttttgttcttggatgtgccagagaagcgggagggaggaacgtgaggccacctggccccagttccccagctggtggaaaacagaggcaaggagggttactgcaggaaagtgtgaggatgtgcaggaacctgttagatgtgcctgggccaggttggagaaagctggctgctgtcaggtcagctcctgggaagacggactcatcacggcctcactgagccacacggcatcacactgcactggtgtggccacacacttggtggcaagtggagacctcattagaagggtgaggggcctgccctatttgctgtcaccatccctgacctagtgacagatggcagctggtattcagggcctcagccatccagcctagaggtaaaccaagcatgtttcaccagtgccccctattccccgagacctctcaccttccttcagaggcctgcggtggtggaagggcatgggctttggaggcagcagatacgggctcgggctcaggcaccaccacttgacagctgggaaaccttgggtgatttacgtaagctctccaacctgtttctccagttgtaaaaggcaggtaatacgcctgcttcacccaccttacaaggtgagtcaaggatcaaatgagaggcggtagaacaggagggactgtcttaggggttattgtttgggcagatgaggcaagagtggtcagcactttttaagcagcaggtaaagccttggtcttggggctaattggtggtagagttttgtatatagtcacgccacatcatgttttggttaacaacagaatgcatgtacgacagtggtcccgtgagatcataatactgtatttttactgtaccttttccatgtttagattcacaaatacttaccactgtgttccagttgcctacagtatccagtacggtgacaagctgcacaggtttgtagcctaggagcaacaggctaccccatctagcctaggtgtgcggtagggtaggccatctaggtctgtgtaagtgcactccatgatgttcacacaacgacgagatcacctgactgcttttctcagggtgtatcctcgtcattaagtgacatgactgtattaggttgctttcagttgcaggtaatagtaagtccaactcacattgtctcatataactgaaaatccagaggccacgtgggcctcgggagccatgtgatcagggccatgtttctcagtctcagagcatatgtgtgtgctggcttctcacgctggtttccttctaggtagaaaaatggttataggaggcccaggccacacattctaccatcccctaataggaaagagctgcttttccccgtcatacagtgtccacgacgtctctctctttagactattttaggtcacatgcttgtgctctgaattgatcactggggcaaggacaaatcatgctgactgacttaagcctgagttactcccaacctgaacaaattactggggcaaagagagataaatgaaaattattggcttagccagtcagggcctgggcctggaggtaggagggcatcaagccctggcaaaccttttggctgccacaggtggggaggagtggcatggatgccaacagtgtccctacaggcttctatcccagtaatcactgtttgagagcaatggccatttgcctctctagcatccatttacccctttggcaacaatcctaatttgcatttggagctttgttccttccccgttcccaaaaactacgtgcttctaatgaagcctcatttccctctcaagggagaggcatgtgaccaagactttggccaattggtgcactgtattctccaagccattggactgcttcttggaaaggcacttggtttgattaaagccagtgaaacacaatgatactcgctggaaggaaggctggggtggaaccaagtgtgcctgtctgctgaacctgaccccaacaggatgtagggtctggagctattggtgctgccattttacaaccccatggagagcctgagattgaggctaatgtagaaagatggagggagggtgaggaacctaataggaccagcctaattcctggactctgcagtttgagtcaacagattgcctcttttgcttcaaaagccagtttgggtcaagttttctaccagttgcaatggtgtcttaaatcatattatactttccttcctattcaaaggcagtaaatgccaccaagcagtgcatgtgggcaactagaatgcttggtccaatccttactatttgtcacttgacactaatattacatgaaaagcatcccagtcatgaaaggtatggaagaatgctcaataataccaagaagggagagcagtgtggaactattgtttactggtattattatctcaggggtgtttcccctgattatccatgaggttctctttatgctccgctccctgtagggtctggcaggcttcccaacttatctggtgttcaaggtgggcctaagggtgaaactggagcccacctggatacagagatctgtattagttttgtgtttattgatgggagaaagtatttggggtcatccaccttgaatgctacataaatgtcttctactcaaggagtcacataataaatctctccaaaggtgcggtggctcacacccgtaatctcagcactttgggaggctgaggcaggaagattgcttgagcccaggagctcgagaccagcttgggcaacgtggtgaaaccccatttctataaaaaatacaaaaattagctagctgtggtggtgtgcacctgtggtcctagctacttgggaggctaaggcaggaagatcttctgagcccaggaggtcgaggctgcagtgagccatgattgtgccactgcactccagcctgggtgcatttgagcaagatcctatctcaaatgagtgaatagacaaatctctaggactcaccttgagggctgtcaggaaaccctctggaaaaggatgtctcatggatatgccagtgtaaactctcctgaaataaccctttctcttctctacccagactaactttacctaccctttggggcccaactcagatccctccttcttggtaaaaagccagttcagactgaagcaatcccttctattaaccacattaattattactgcaattaatctcacaataccttgaggctccgagtgctgagaggattttgccttttgttatagtgatggaaaggatgcatttcaatatgttgccttgcagtgcaaacctttgttaacagggcaaaaatagcacagggggcaggaattacattcctggatgtgcatttggcttatttacatggatttgggtgccctctaaggacaccatcttctctcccctccaagagggtcaggccacaggacatccatgttcttggcctcccatgggagagggtctctcgccagaggaagggaaagccaagtggccacagagttccagcctgtccctgtgacagcccctgcctctggccagacatccacccacccttgctaagtcagcctgctctggggctactaggcccagtccttgctgtctgtcggagacagaccatgaagtgcagtgtgtggagggctgggacatagcataccgaattaccccagggagcttggaaaacatctcttcccactctctgttaggcccacggcttcctctactggaggagacggcatgtgaggatggaactcggtcattcctctgtcaccaccgatgtgaacagtctggaatcctgcacacaggagactgacgatccctgagcaacctttagtagctcctaccattgggcattttcttggtacagatcacaaataagagacatcatagaaaatgttattcttttattatttcaaggaggtaatacatagcccaatatggcaaagcaaaagggaattagaggcagcaaatggccaggtttttctaagcgcctcatgctgcatctctgagctcctgtctgcccgcagcccacagctgcttacatgaaggccaggtcagtagacagatggcccaacttgatactccactgactgagaaagggctcaatgtgcagcacagcagaggcactgccaggacccagcacgctgggcggcaccccacgctgccaccaccagctacagaggctagtgccttagtagcagccagtgtgtctagcacttgattttattcctgtgagcctagagtgggcaggacgtgaataaatcctgagtcataagttaaggtgaaagacttagtagtgttaatactcttggtgagaaaagacaacacagtcttggaggagagtgggcttggagtctggtggaagaaagatagaaacccccagaagggcctcggcctgcaggcactgccttgaggccatcagagggggttttcacggtacatgatagggaggagtgaggcaggtgggcactggagggctgtttcctctggcacagttgaactagagggtcactttccactcataattggtttcctaggtctaagtcaccacacctggggctgaagcaagtcttgcctgtgcaccaagcgtggccttggaccctggagagatgcaaggctcagttctccagtgttgaagtggaaggactcccaactgaaggagatctttctctccccacctccagctcttttcccttacaaatgaccagggtgcaagtcgagaggcagaggcacctcctggtgcaactccaccacagtcttacagagaactcatcttggtgggacccaaagcccagccttggcatgaagcagacttattccacccatcggagggcacccagtctggtgactgaatggtggcgtgcaagtgggagtcagcagtggctctggatgccgtaatactcagatgccattcatctctgtgtgatcgtcctggctggagagctggtgaggagggactgcttcctcctggcatgcactgttcaccaaccacaccacgtgggctgatagatttttggtttgacaggtgtggaaagaatttttaaaaccagccactgtgttctccaaacccagagccattggttttgtttgacaagaaagtaccaagagaaccacagctccactgaggctaaggcttgtgtagcacagaatgcagtatgtattgaaacgtataaaccttgtctgactggggagatgggtgagcaaagagctgccgggacccaggtcctctagtcggttgcaggctctgccgatgtctcatccttaagctcctcaaaacctgggactggcttctgtagaaagtatgtagtggcctggatcaccttgtctggtccaatgttgtacactgggtgagtgggctgctgcaaagagaagaaaaggtgccagttaatcaccccggtggtccttgaaaacataacacatcctttgctccatgaaaggcacttctaagaatttagtataaggaatcagagatacacacaaagcccaaaggttcaaaaatggtgtatttgctaaaactatctagtacatgggacacaggttaatatacagccattataaacacgcatttaaatatttaacgatacaggcaaatacttacaacatattatgtgagaaaacagtatgtacaatactatctcaaactgtttttttttttttttttttttttttgagagagtcttgctctgttgcccaggctggagtgcattgacacgatcttagctcactgcaacctctgcctcctgtgttcaagcaattctcctgcctcagcctcctgagtagctgggattacaggtgtgagccaccacgcctgggtaatttttgtattttttttttttttttttgagacggagtctctcgctctgtcgcccaggctggagtgcagtggcgggatctcggctcactgcaagctccgcctcccgggttcacgccattctcctgcctcagcctcccaagtagctgggactacaggcgcccgccactacgcccggctaattttttgtatttttagtagagacggggtttcaccgttttagccgggatggtctcgatctcctgacctcgtgatccgcccgcctcggcctcccaaagtgctgggattatttttgtatttttagtagagacagggtttcaccatgttggtccggctggtctcgaactcctgacctcaggtgatccacccgcctcggcctcccaaagtgctggggttacaggtgtgagccaccacacctggtctcaaactttttaaaaagtgtatttgtacctgtgatgtatataaatagcaaaaattgtacccataccaaaatattaatagtgatatgattgtttttcattttcttttttatattttatgtatcccaattattaaaacaataaacatgtatttacatttataatcaagaaaaagggggccggacgcggtggctcatgcctgtaatcccagcattttgggaggccgaggtggatggatcacccgaggtcaggagttcaagaccagcctggccaagatggtgaaaccccgtctctacaaaaatacaaaaattagccgagcatgatggtgagtgtctgtaatcccagctagttgggaggctgaagcaggagaattgcttgaacccgggaggcggaggttgcagtgagccaagattgtgccactgcactctaacctgggcaacagcgagactctgtctcaaaaaaaaaaaaaaaagaaaaaaggaccacaaccctaatatgtagtaaggctgtcagatcatatttaaatatataaacaaaatttaaatatgaaatttaaattaaatagatgttattctagtacatcacagaaacccaaaagaaactttagatttgacacggcataatcctaggccaatattcaggattctcccactgtgggataatgaagaaggggacacaactgcaggagagattttaaaaattttgagagaatactaggagcaacctcatgctgaaacatacaaaaattcagataaaacaataatttttaaaaaccaggaaaactgccaaaattgacttaaggaatttttaaaggcctacatgaagaaattagtaacaacaattgcttattctgccacccccacataccttaaaagatactagacctagatggtttctcaggcaagtagtatcaaacctacaaagaaacagataatctctgatctatacaaaccttttaaggactgaaaaaaaaaaaggggctagtgcgggggccaggtacaatggctcacacctataatcccagcactttgggtggctgaggtaggatagcttgaggccaagagttcaagaccagactaggcaacatagcaaaaccctgtctctacaaaaaatttaaaaattagcaggttctggtggtgtgcacctgtagtccctgctacttgggaggctaaggcaggaggatagcttgagcccaggagttccaggctgcagtgagctatgatcacagcactgtactccagcatgagtgacagagtgagatcatgtctctgaaaaagaaaagaaaaagaaaaaaggtaagaggtgcaggaagctacccatttaattttatgaggctatgatattatcctgaaacactggaaaaggacaatacaataaaattttagatcaatctttcttatgaatgtacatgcaaaaaaatcctaaataaaagtactaggcaaacatactggcaaactgaatccagcagtatactgaacaaaacacacagacacagacacactgcctctactatgaccaagaagggcttatcctgggaatataaggcttaacatcagaatattaatgaaacatatcatattaaagaagaaaaatcagatgcggagaaagcattcaataaaatttaacactaccttatgactgaaactaacaaaaacaacctagcaaatcaggaataaaagtgaatatcactaacttgatataatgtaactatcacaaccttacagtaaacatcatgcttaatgatcaggttataaaaagccttcccattataatcaggagcaagagacgaatgccctctactacctttagtcagcactatgtggggatcttacccaacaatacaaggcaagaaaaataaaatggaaactaacttagacaaacttaaaactattaaagagttcaacaaggtggctggacacaagatttataaatattattagcatttctatacactagtaacaaacagttacaaaactgaaaataagaaaagattccagtcacaagagacatgaaaactgtaaattagacataactctaaccgaaaaaaaaaaaatgctagtcctttatggaaaaaattataaaaaaaacactgaaagacattaaagaaaagaaaaattatgttcataaatggaagcctaaatattgaaaagaagtcagttctctttgtactcctgggaagacaggaagaaaaaaaaaaaagttggttctctcctattaatctaaaatgtagtgcaattccaataaaaatcccattagaacttgacaggctgatcctacaattcacaggaaaaagcaaaaggcaaagaatagccaaggcaattttgaagaaaaacaacaaggcagacaggacttgcctacctgttttcagacttgcttaaaagagtgcagataggcaaacagaccaaaggaacaaaataagagagtccagaaacagggccccttcatgtatggaaacttgagggtgtggtacacatgagatacacatcagcaggaaaggttgtagacttcagtaaatggtgctggtcaattggttatccatatggaaaaaagataacattatatccaagcctcaccatacacagaaaccaaatccaagagaattaaaaatctagattaaaaaagcaagctttagactatttagaagaagttacacttaatgacttgctgcattgccttgttcattcccttcatagcacgcatcacaatttgtgatgtatttgtttaatgtgtgcctccttttgtctgcttccctcaaaaaatggtagagattccttaagttaatcctcacctaccctcccccaaaaacaaacccctgaatgacagaaaagacaaatagatttgaccacttcaaaattaaaatattaaaatatttttgtggggaaggggtgctgggggcagggtctcactctatctcccagactggagcaaacagagctcactgcagccttgactacctgggctcaagcgattctcccacctcagcctcccaaagtgctaggtttacaggtgcgaaccaccatatctggcctaaaatcttctatttaacaaaaaaacaccaaaaacaaaatgctatggtttggatgtggtttatttgtccccacaaaaattaatgttgaaatctgatccccaagatggctatgttgagaggtggggtttgtggaatgtgtttgggtttgaggggtggatccctcaggagtgccttggtgctgttcttgcagtagtgcgtgagctctcactcttgctctggggagtctggattagtccttgagggaatggattagttcctgcaagggtaggctgttataaagccaggatgctctcaggctctcctctgtttgcatgggttggcttcccctttgatttccacatgttataatgcagcacaacccttgccagaagccagagccatgcccttgaatttctcagtctatagaaccatgagctaaataaacctcttgtctttatacattacctagtctcaggtattctcttatagcaatgcaaatcagagtcacaaaatgaaaagacaagtcacaagctggaagatattcactacacacatgtaactgatagaagattagtattaaaaatatacagagaactacaaatacttaagggaaaacaactgaagttacccatcagtaagaaaatgagcacagaatatgaactggcagacaattcgcagaagacaacacaaatggccaacaaacatttgaaaatattctcaacctcaccagtaatcaggaaaacacaaaatcaaacaaataccacttcacacccatcaaattggcaaaaaggaaaaggtctgactatggatcgattcatcttacacaaccacactggggagcagttacagaggtatctatcaaagatgacaatatgtgtccccttcaacccagcaggtcccctcctggagacattctaacatgtgaacccaatgagacagataccacaacgttcactgcaacactgtaatagcaaaaaattgataactagcaggagaacagagaaacacactggggtacatttatataagggagtatcatataatagttaaaatgaataaactggagcaacacatgtgaacacagataaacctcaaaaatacaatggcaagtggaaaaagcaatgcagaatgactggtacagtaggtaccattacaaaaagtttgaaaacatgcaagcaactgttatattgcttataaaaaactatatattgcttatagatacatatgtatgtagcaatagcacaaaaacatccacaggcatgatacatgtcaaatttgggacagggttacctctggagaaggagggaggaaaaaaaactggaagagggctacataagaggcaaatagggggaaataattagggcctggaaaagctgggtggtggtttttctgattaagaatgaggttgagcatcttttcaactatctattggccatttgtgtttcttccatttgaaatgtttcccaattaaaagaaacaaagatggggccaggcgtggtggctcacacatgtaatcctggcaccttgggaggctgaggcaggcatatcacttgaggccaggagtttgagaccagcctggccaacatggggaaaccctgtctctactaaaaatacaaaaattagctgggtgtggtggtgcatgcctgtaatcccagctactcaggaggctgaggcacgagaattgcttgaacctgggaggtggaggttgcagtgagccaatatcatgccactgtactccagcctgggtgacagagtgagactttgtctcacaaaaaaaaattaaaaattaaaaaaaaaatttttttaaacaaaaaaggaaggttacaatgacacagatgagaaaataaggcagtgacctagatggtagcagcaggccatgtttacactggtggaagtagggcttagtaagagtagggaactgcacacaaaaattcatgacagtctgcatgggccctgtgatttgatcactggggacagtctccattggattcatgtccaggctcacgtctaggctcagagcacctccaggttgtcctcagctggctgcagcagtgagcatcctgccctcatagggctattgttttttcaggaaagcagacaaacacacattaaacaacacaccaccaactgagtaaagtactacaaagaatatgaacaaggcactgaggcagagcattctggggatctcattctctgaagagatggcatctaagctgagcctctgggagagacgcggcaggctgtacagccagtgccgcatggctgcagtgctatcacgagcctgctgggactcacagcctcagagtgacacgtaactgtggcctcctctaggggaagctaataccagcagtgggctaggtcctcagccctgggataaaggcacaacagctctttgacagatcagaccgcccatctggaaccctgagcttgcccagaggtgcgtctcctctgtggtcacatcctcactaacggctgcacagctcgaagggcagagggaccacaagcttccgcctgtccacacaggaaatgcagagccagttctgcttacttggaaagccttctgtccgcgaggtccctgtggagaaggggtgtgaagccctgcacccgtcttaccagagcgttttcgggcacacccaggaccacatcatgcaacatggctccgctgccgaagtgctgggctatggacaggccgctcaggcagtagcaggtgtggtagaaatcacgcgacctgtaaggacaggcagctctgagcaggcgctcctctgctccgcacacatctacaaatgtagccacaccaattcagagaccactggtgcaatcacacgtccccccccatcctccatgtggctagaggaggcatggttttcccagcagtgttatttaaagccccactggctgagcacagtggctcacacccataatcccagcaagcaggaggctgaggcaagagaacggtttgaggccaggagttcaaaaccaacttgggcaacatgggagaccccgtctctacaaaaaattaaaaattagctaggtgtggtggccgatgcctgtaattccagttacttgggaggctgaagcaggaggatcactcgagcccaagaggtgaaggctgcagtgagtcatgattgtgacactgcactccagcctgggtgacagagtgagaccctgtctcaaaaaagtaaaatacaataaaataaaagccccatcctccagccctgcccagcagtgggaactgtattttttttcttttctttctttttttaccttaaactattaaaggaaactgtaattttaaagtcagtctctccagctgtcttctggaaagggctctccaggggcagtactaatgataaattgatacacttctctagaaaaatacctaaatatctagaaatgggccacatccttcctgatacattgtgggaccaggccttcccctggatgccaagagcagcaggacgtgtgctgggatgggggaagacagagggtgggtaacaaaggtgagaggacttattttatttccctttttctaacacataagccatctcagatttgagcttaatcatttaatccactctataatagttgtcatgattacagtctctgtttacaacactgaggggttttaaaatcctgtatcctattctatttagatcagtttttttttgttttttttaaaaaaaagaagagttatctacccagcaatctgtttccctgtctgggggagggggttgcatgcaggctgggggacaagacgggcagctggaggtgccaagatcaatggcctcaaggggtgctcccaactgggtgctttttcccatacaacctagcgctatgcaggtgctgaaggtgacacctctgctcttgagatctggctctgagtaggcctgaggtgcacgcccctctgctctctcctcccctctcccttccctccccagagagaaaacactcacttgccaggtttatccagaagcccccccgcagggcactggcagcacatcaggatgtactcctgcagggcctgctgatggaacatccagtggctcatgctaagggcagggtcacctgttgaagggcaaagggtcagtaagggcccggcagatccagccaagtatcaatgacctaattccactttctcacctgggggaatagtcaaggtttcctgctccccttcctcttccattcattcttggtacaactgctatcttccccatgtcctacgcacagcatgtcccttctcctgaactttgacatgtgtcaaagagcagcaattcaaagtggcactttcactttcttgaaatgcaccctgttaacgtggatggtgatcctcaaccacatctctggcaggcagtgaaccagcctagctgtttagcttaccttcccagactgacctcggtagctgctcccaacttggtccataactctaccctggacttcaagagacattccctctagcatatctctataacttgttaaccagactgattagctcagagaactcttaatgggtaataaagtctgtttcttctacttttctaagcctaaatttaattgatctccaaagggaattctctaacttgtctctcagctcaaagaatttacctaagaaacattactagtaactgccctcctgcatcatatgataccctagcaaaaactgggtattctggtaatactactaaggtactgacaagcaactggacttcttcactctgaagtccaatcactatggtcaaagaattctgtgggccacacagttatcaagtgggaaggagggacaaatcacggacaggtgtgcagaaacatctgcatagaaatcgattaaaaatatatatacatataggatgtacactaagtccttggtcaattttatattttgatacctgggctaaaagatgcctgacaataaatcatttttaaaaaaaagatgcccaacaattggtaaatggcacctgaaagctaattgttctttcttccagtctttttggttctatgcgtttttctacctagttattataactgtgtagcttatgtttttcacttataccactataggcataaattttctattctattacataatctgcatagccatcactgtgaatagccatatagtatttcattaagtggacatataaggtaactgtatcataaaaagaactgagctaaaaatcttatatatatgtcagtatataaattcctatggtgggccaggcacgatggcttatgcctgtaatcccagcactttgggaggctgaggggggttgatcacgaggtcaggagatcgagaccatcccggctaacacggtgaaaccctgtctctactaaaaatacaaaaaaattagccggacatggtggtgggcgcctgtagtcccagctactcaggaggctgaggcaggagaatggcgtgaacccaggaggcggagtttgcagtgagctgagatcacaccactgcactccagcctgggcgacacagcgagactccatctcaaaaaaaaaaaaaaattcctatggtgaaaattataaaagtttatggtatcaataacctttcccattttggagaaaatagcaaaaaagaaaaacgggggaaaagatttctaaaaataaaaatgaaaagtttatgatacagtctataaagagattgaagcaaaatattaaactgttgaatatttcctttttttttttcttttttgagacagagtctcactctgttgcccaggttggagggcaatggcacgatctcggctcactgcaacctccgcctcccgggttcaagcgattgtcctgcctcagcctcccgagtagctgggattacaggcatgcaccaccatgcctggctaattcttgtatttttagtagagacatggtttcactatgttggtcaggctgctctctaactcctgacctcaggtgacccaccctcttttggcctcccaaagtactgggattacaggcatgggccaccgcacccagcctaaattgttgaatatttcaaacagacaataagaatttattaaatttctttaaaaagagacacagaggaaaagggtttccaaggttgagcactaggtgagggacagtggccaggtgacatttagaggccagggacaaaagcttctcgtcttcaaccctgagtcgcactcagccctgaaacacccattaagagacacaggaaactaagtccgacctaaggagaagcatccaatctcccatctcaggctggctgcaggccacatgctttgatacacttgcactattttaattcccttcctttcttttcctcacctgtaagcacagtgaactttgttgtagaagatacatacatatatgatgggacttcactctatcttcttttacttatttccaaggttgtttccagttccttgccattatgaggaatgctggactaaatctttgtcaatattatgtatgcttaagattattttcttcaaatagactgaccacggtggaattattcggttaaagggaataaacattgttaaggcttttaatagatactgataaactgctttaagaatttatagactactctcagcacaatccctgtggagtagccctgctctgcaggagctgtcaaaaataaatatataaataaactaaaaataaaaacaaagactttatatagctaccagcaaaatttaaaattttgctataccacctccagcattagcacctttttgttgttgttgttgagatgctatcttgctctgtcgcccaggctggagtgcagtggtgtgatctcagctcactgcaacctctgcctcccaggttcaagtcattctcctgtctcagcctcctgagtaccttggattacaggtacaagcccccacgcctggctaatttttgcatttttagtagagacagggtttcactatgttgatcaagccagtctcgaactcctaaaatgatctgcccaactcggcttcccaaagtgctaggattacaggcgtgagccaccacgcccggccagctttagttactttttaaaagttatcagcaattaaaatggtaaaaagaaatagtacctgatagtttattttgatttgcatgcctctgattactaattagggtgaaatttttccataacttgtgtttaatatttgcatttccttatgatggtgtctgtttggcctaatcttctgagatccaatagccaattttattaatctagctttttcttatacttgccccttgtctacatcatatgctgcatctattttctcctttttgctcctctgttttggttatgtgagtttaaaactttttaaaatttttaaaatttaattaatgtaaaacatatatatgttttatacttaatattgtaatcatactattgatttttccttcacgatttcctttttaagaaaatatttaatgtgtatggggatttttggggggatgagtgatgaaaatgttctaaaattgtcatgatggttcgcaactgaataggtaagttgtgtggtatgggaattatatctcaacaaagctattatttaaaaaagcatatttattaaactttaggaaactgcattacacatctgtacaaaatgtacatatatttcatatcctataacaaataaaagactattattataaggtaaatgataacctgtggctaaaattagagtctgaaaagaaaacgctatgtttattatataaaaaactatagactgtttcagtgacttcctatattattaaagcatagaagctcaaagttcaaaagctctacaaggagcttccagatatcctgaatttggacaccagcacacataatcacaacaagatgaaagcagatacgattatagggtgataactgcacactggaatccaccttttaaatcctttctacctcttcctgaaattataggtcgccattctaatctcattttgcatttcaaaggttccttttatctaaaaaaatcaaaagtctttccacaccataactgataggtgcagccatctgtagctcaatttcacaggtaggcaagaaaattccagggtatgtccaaaagaacatataagaaaccagtaactaccaagccaagtggaaactcacaggcctgctgctttcttattgctccacaaaacaaaaaaacaaagtaactcactgatttagtcagcacttgagatttcttaagccttttttttttttttttagacggagtcctgccctgttacccaggctggagtgcaacggcgcgatctcagctcactgcaacctccgcctccggggttcaagggattctcctgcctcagcctcctgagtagctgggattacaggcaacgtggcaccatgcctggctaattttttgtatctttagtagagatggggtttcaccatgttggccaggctggtcttgaactcctgagctcatgatccacccacctcggcctcccaaaatgctgggattacaggcttttgtgtttttttgagacaaagtcttgctctgtcgctcaggctggagttgcagtggcactctctgcctgcaacctctgcctcccagactcaagtgatccttctacctcagcctcctgagtagctaggactacaggcatgtgccaccatgtctggttaactgtttttaattttttgtagagacaagctctcactatattgcccaggctggtcttgaactcctgagctcaagaggtcctcctgctttggcctcccaaagtgctgggattatggtcatgaaccaccatgtccagcattttaaggtactaatagtaattccttcttctactcaaatactgtcatttacacatagaaggtagtcaatggcatggagccactgatggtcacttgctgggtcagggcatggcctagacccacgtgctgcactatgtagagcattctttttgctttttagttagcaatatgatcaatgccttttaaaaaatgtatttgtacatttaccaaaataaaattagtaatgcacatggtttttttttttttaaaggcacagtataatacagaaggatagaaaatctaaaaagttggccaggtatggtggctcacgcctgtaatctcagcactttgtgtggccaaggaaggtggatcacttgaggccaggagtttgagaccagccaggccaacatagtcatatcctgtctctactaaaaatagaaaacattggctgggtgtggtggtacacgcctgtaatcccagctacacaggaggctgaggcaagaaaatcaattgaaccgaggaggctacagtgagccgagattgcaccactgcactccagcctcagcaacagagtgagactctgtctcaaaaaaaaaaaaaaaaaaaaaaaaaaatctaaaaagtctccctccttctgtcttctgtctgcttctcttctcccaaaggtacccattgttcaaggggttttgtgtagggttccaggaaaagctgtgtacatctcgggctgtgtgcccaggcactgctccaggccccgcccccttacacttcatgttgtatcttgcagagctttctatatcagcccatggtatgcagctactgtttggagagatttttattatttaacccttaaccttttgataggcacttaggctgctattgaaactccacttcaatatacatcctttgctaatatccctgcaggtaaattcctgacagtgcacttgctgtgttcaaagggtaagtgcccttataatttaaatggatgtctccaaactgccctccaaaaaatgacttaacctatttacatccccactatcaaattacctgttttctcacactctccccaacatagggtatcaagttttttaatctctgccaatccaataataaaaacaaatagtgccactcttttgattagcatttcttttactacaagtgagctaaacaatttttcgttggattaatggccacctactgtggttatgagcagggcagggttcagatgccagctagtctggattcacacaaccacatactaacccttgtgagtgccaatcaggtattataaagcaatcacttaacctcactgtagtttgtttcctcatctgtaaacaatggtacctatttcatagggttgttttgagaattaaatgagaaaacatatgtgaaatgctcagtacagcccctggcatacagtgagggcttgggaagactccgctaccagtagtagtggcagttgtagtagaaaaagtaagaaggacagttctttcactgggacctctttcttcagatcctttgcctgtttttcagttgggttgtccatccatttcttactggtttgtatgattttttttcaaattaaagaaattagccattcatcacttgttataaatatttttcgcacctttttgcttgttttgtttgtagaatttccctgtttctgtaaaataacttttgttgtctttttttatgcaagaaatacctattaactatagaaagattagaaaatacaaacagaagcaaacatcacctgtaacttcacatcctagatactttctatgaattttttgtagtcaactcttcactaaaaatgggattccacacatattgctttgatatgatcacaatatattgtgactatctttctacactgcatccccttttgactcccaaagtcagtattttgccctcctttcaacacacttcccttctttacagactcctgtctgttccaagttcaagagatgccctgtgtctgagaagacaacacaggccttctcccagccaatgaaaaaagctggaagcaccaagattcataggcacccttttccatagacaaagctttgaatgccactaagccccctagaacatgtgctacaagaaacaattaaccagcagcccccctggaagactttgacaggtggtgctcctgttatagctcattccacatttccctgggattgcagaattactgagtcttatccatgccagggacaggtttgtaaaagactgaccattttaccaggggcttgacctcaccagttccaaataaagagatcaccatgaccccaagtttttttctatcttagaaatgttgggccaggcacggtggctcacgcctgtaatcccagcactttgggaggccaaggcggacagatcacctgaggtcaggagttcgagaccagcctgaccaacatggagaaaccctgtctctactaaaaatacaaaattggctgggcgtggtggtgcatgcctataatcccagctatttaggaggctaaggcaggagaattacttgaacccagggggcagaggttgcagtgatccattgcactccggcctgggcaacaagagtgaaactccgtctcaaaaaaaaataatactaaaataaaaaatgtttgacttggggaattcctgacttccctactggtggtcaaggcagagactgtgcaggctccaaagtcagtgcacttgctgacagtgcacttgctgtgttccaagggtaagtgccttatatgccttaatactgacacctaaagcccagtgggcccaggccgggaaaatgggacagaggctctgcttactttaattcagtgtcagaaatggtcacaactcaacaactcaaaggaaattaagaaactaaataatgaggctcagggccgggtgcggtggctcacgcctataatcccagcactttgggaggccgaagtgggcggatcacctgaggtaaggagttcaagaacagcctgtccaacatggtgaaaccctgtctctactaaaaatacaaaaattagccaggtgtggtggcacgcgcctgtagtcccagctactcaggaggctgaggcaggagaattgcttgaacctgggaggtggaggctgcagtgagccaagatcgtgccactgcactccagcctgggagacagagcacgactccatctcgggggcggcggggaggggggaagacggggggtggggggctcagaaacaggaaaaaaaagtatggggaggggcagaaaagaatctcatcttttacatttgagcagttacattatccaactaagtccgaagaacagcttctctttggacccagggatctcattccaaaaacagatcagcaaccagcagggccccatgacttcctctctcccacaggtctactcagagacacctgctctcacatcaagtacaccagaaagatggtgcaggagttagcaggcagactgaggtttcaagagatagagagagaatgttcccagactttttgctcactaactacttcggttttgcgttcccatttgagaccccacagaaacgaacgtggatttctctactccaatggtgcaggtggaacaaactcccatttaggcttattcaatgaatgtaaaataaaacatttctaatagtgacaactctgcagccagtcagacacggcgagtctcttctccatggtgtaggggcaacccacccctacaacccacccctacacatgggttctggttctctacccctttacgcagttgcctttcctgttgctgttgcaacagtgactgttgcaacactgagggttttcagctctgccctgcacccagaggaggtggcaatcaccacagagcccaggacaggagtgggctgctccttccagataacgcagaagcagcgcccacttcctccccgctccccgtagcaatttcaaggaagctcattctgtcgcagccaatttgaagaagcaaagaatgacactaaaccaatgaaactaaatcttactctgcattcgcatgccccacggcatgaggttccacactgggcactcaaaatccaggatagacagagctcatttcaacccctctaaaaaagcacgctgggcttccagactttgtgagtagtggagggaaatcatccagccccaagtgaacagctccccaggctcaccttgggcgtgcagtgcgcggtggagcaggggcaggagccccgcctgccagaaggagtagcagccatccaccagcttgttgcagcggccctgaaatcctccttcaaatcgcatctgccggcttgtcacccattgctgaggagacacagatgggaaaggcagttgtaggctaaaagagacaaaatccagcccgacagaatctccaggagtcaatctgtgggatggagggtttcccatcttgtggcttcttggcactctagttttggtgctctggttttctttccttccctccccacactgccatagacacagagtgaagcatttaagccaacgctgtagaggcatccagcactgatctctgctcaatgcctggcagacaactaccttttcctgggttccaaagcagtgccagtgctgagaagataaagaggccaagctggtttgtaaggagaccttcaaagtctcttaataaacatggcttaagttggaaattgaaggcaagactaccagtagctcatttctcattacttccctgctccggggagtttattaaaagcagataaatggaatttggtactacatttcttttttttttttttttttttttttttttttttgagacggagtctcgctctgtcgcccaggccggactgcggactgcagtggcgcaatctcggctcactgcaagctccgcttcccgggttcacgccattctcctgcctcagcctcccgagtagctgggaccacaggcgcccgccaccgcgcccggctaattttttgtatttttagtagagacggggtttcaccttgttagccaggatggtctcgatctcctgacctcatgatccacccgcctcggcctcccaaagtgctgggattacaggcgtgagccaccgtgcccggcctggtactacatttcatcagatgatctcaaactgctcctgacttttacttggcacctggggaaatttacccaaggtctcttagcaagtcactagcaggcctgaaagcagaagccattcattctaattaccaaatgacaactctgcccagtctgtggctgatataagaaaatcttttactttgaagctgtaaaataggtcttggtcttgatgtcactcagcggtcacacacgataccaccattccttgcttatctacaagttttctaaacacactctactacaaagatcaagatagtcatgggtttggtccctcagaatgagcagaaccaactggctgagcagatatgacatttccatttccctccctagaccacctaggccgttccagccacggacttacagagctgcctcactcaactgaaagggtacaggggagggtacttcctgtttctagagtcttactaggtaaaggtcctgaaaggagccactgggacccttgatggaagtgggggccagccctcccctaaaagctgttgtttagattattccctcttcaaggcaacacctgcccatagagagtcacagtcacaaatgcttaaaagagacagaaaacactgtactgcaggttcaggtactaatatatcctcggttgatcttaaatgaaccagggcttccagcatgtaatggaagtgggctaagcattactcaggcagagagaaagcaggcgctgcagtgggagtcggttcctcatttctacttaccgcagggcttaagtgtttttaagcagactaatttactttttccagtgcctaagcccatggatttgttctgtttccttgggctataggaattcatacttcagatatgggtcctacttctcccaaagcaaatggaagggagtagtctggattagagcaggggtccctaacccccagaccatgccaggctgcacagcaggacatgagtggtgggtgagccagtgaagcttaatctgtatttacagctgctcctcactgctcccattactgcctgagctccacttcctgacagatcagcagcagcattagattctcataggagcgcaaaccctactgtgaaccgtgtatgccaggcttctaggttgcacgctctacatgagagtctaatgcctgatgatctgtcactgtctcccatcacccccaaatgggactgtctagttgaaagaaaacaagctcagggctctcactgattctacattatggtgagttgtataattatttcattatatattacagtgtaataatagaaataaagtacacaataaatgtaatgtacttgaatcatcctgaagccatcaccccccgtcccacccccaaccccaggtccacggaaaaattatctcccacaaaactggtcccttgtgccaaaaagattattactgtgggttagagggacactaacatttattaagtacctactatgtgccaggctgtttataaatgttctctcctttaaccttaaaaaaataaggattgttatccctaccttataaaagaaaaaaatatcaagctaaaagagattagacaatttgcccaaggactcatgtctcaaatgtagtagggacagggttcaaatctagaacactgtctttataactgaggcactccctaatcacattccttatctctgcctgggagatgggacttttttgtttcatgccttattggtgttcagattttaaaacatctgagaaactcttaagttcagcatacaaagttggctgtttcagcatgagccttcaagccttcatgaatctttaaaaagactacaccgggggaggctttctgaaggtggaggcaagacactgctggttacatgtctacagggtacaacagaaactctccaggaagctcacgatgggccgcataacgggaggctggcatctgaactcagggagaggaggtgcatgtcagttgcagctggtttgctttgacgtcatggtcagggggtacatgctccccaaatgacatgacggggaatgccttctccctggtggccgtggaggtgtgtgtgtttgtgcacccactgatcatttaactacaatctagtgactccctgaagctgactgctttctgagtttcttctgaatactggccaggagcgtggggtccagacataaatgttgggctgccttctcaatgcaattagccagctctgcctaaacaactcatttaaatgtaggtactaaatgtttacacagtgcagcaggtaataaaagtttggtttcgaaatgctgcaaagctcttcttgtaacttttcctcttaggaggttctttctataacacacgataacctctaattctacgaaactgaagtataaggaaggtactctgctcacaccagatgtctgcagcacacagtctatgtagtctacacactatgtaaaaagctctaagcaggaagacagaaaggcagaagggggagccaagacagagcagctgctcactccttcctctgtgttggaacagagctaactctcttagcccttcccatagccaaactctcctgaagcctgcatgtctgagtacaatcacatcaccatgacctggggcctgagagggggatggctcaaaagatacttactaataagctcttcaagttcaaggaacgttccctcttgaggattaccagcgcggccaggccacagaaggtatagccaccatgggcttccatccctggtaccccgccaatgccaccttcccagttctgacacctaagaagagattgagaaaagcagaatgagtggccagtgagtggacgtacacaagaccaggaccatcctaggtggcagagaaaaagttcactcagattaaggtgtgaaccatcacaactatgaatgaaaagatgccaactaattaacttttggaaatgtcttttcaaaaaaaaaaaaaaaaaaaagctgggcctggtggcacccatgtgtaatcccagctgctcaggagactaaggcaagaagatcacttgaggcgaggagttcgaggctgcagtgagctatgatcacaccattgtgctccagcccgggtgaaagagtgagactaggtctccaaaaaatgtaagtataataaaaactgtaaaatgttaaaaacccagacacttagaaacagcctacttgtgtaagaaacataataattcaaattattactctttgggaaaaagttataaaatcatacatatacatatatgtacatatatacacatatatatacatatatatatatacacacatatatatacatatatatacatatatatatagtgataaccatcaagttaaaataaaattaaagagtgattgttgattctagtgatcttttatttttgaaacagggtcttaactctgttacctaggttgactgcagatcatggctcactgcagcctcaacctcctggactcaggcaatcctcccacctcagcctcctgagtagctgggactatgggcgtgccccaccatacccggaccattttttgtattttttgtagagatggggcattgccatgttacccaggctggtcttaaatttctggcctcaaggaatcctcccaccccagcatcccaaagcgttgggatgacaggcatgggccaccgcacttggcctctggtgatctttgagtacaggtctactagtaatatttttcctttttgtttttctatttgttcaaaaagtttttataatgaacctgtatactattaaaaaataaacgttatttttaaaaattataattaggccaggtggtgatggcttcttaaacagcctgcagaaccatgagccaaataaacctcttttctttctaagttacccagcctcaggtattcctttatactgacacaaaatggactaacacaagaaggacaagaaataactgacttagtagaatagagaaacctttcctacccaaaggatagggatgggagaggggcaacaaaaagcaaggtgatctgctccaataaaaggctccaggattagagatacagggaacctccacaaagtggaatgcgtctgaaccaagtttgttggttgcaaacttatataagaatcagacctttaagtcccctactcaaatccagcagaagatgggaagtttcagaggtttaatcaaaaggatctgagttccagaatatccaacaagctaagaggaggagggagcactgtaccaaatgtgattacgtgagagtcagtaatctcaacacaatacccccagccccattcctctgtgtatttcacacaaggctgccagtttcataccccaagcaggaatttagaagattcctctctgagggaactgataagcccaagggaaaaaccctacagacactgctttgagaattccccaatgaatggcttgatcctgcccactctcgcagagctccccagcagcttttcagtgctggatccttaaatatgaacagacagctgtagagtaccagacatttgaccacagtctctactatgaaagaggagaccaaaacaaacaaaaataaattggaggaaataagacagggagcaaaagaaaactttttaaagttgtatctttagataaaatattatatgaagtaagactattgagaggacaaaatatccccagaaaagaacaagagagtagataaaaaagtagtcaggaagtaaaagtagtcagggaggaaaactaaaaataggattacaaaaataaaaacaagaggattagaagataaatactaagagaatctctcaaagtataagaagaaggattaagagatggaaacgaaccatgcaatgaaatatttttatttttatttatttatttttgagacagagtctcgctctgatgccgaggctggagtacagtggcacaatcttggctcactgcaacctccgcctcctgggttcaagtgattctcctgcctcagcctcctgagtacgtgggattacaggtgcatgccaccacgcccggctaatttttgtatttttagtaaagacagggtttcaccatgttggtcaggctggtttcgaactcctgacctcgtgatctgcctgccttggcctcccaaagtgctgggattacaggtatgagccactgcacccggcagtattatttttatttatttatttattttgagatggagtctcacactgtcacctgggctggagtgcaatggtgcgatctcggctcactgcaacctctgcctcctgggttcaagcaattctcctgcctcagcctcccgagtagctgggattacaggtacccaccaccacacccggctaatgttttgtatattttgtagaggctgggtttcactatgttggccaagctggtctcgaactcctgacctcgtgatccgcccgcctcagcctcccaaagtgttaggattacaggcgtgagccaccacgcccagcctcaaagtattcttaaaagtcagacaatcaaatgtactaatgggatgtcatatttttaaaaggctggccaggtgcgggggctcatgcctgtaatcccagcactttgggagaccaaggcaggaggatcatttgaggtcaggagtttgagactaacctgatcaacatggcgaaaccccgtaaaaattagctgggtgtcgtggcgcacgcctataatcccagctacttgggaggctgaggcaggagaatcgcttgaacctgggagaaagaggttgcagtgagctggtctgcaccaccgcactccagcctgggcaacagagcaaggcaccatctcaataaataaataaataaataaataaataaataaataaataaataaataaataaataataaataaataaataagaggctgggcatggtggctcacacctgtaatcccagcacttggggaagccgcagcaggaggattacgtcagcccaggagtttgagaccaacctgggcaatgtggtgaggctttgtctctacaaaaatttaaaaaattagcggatggtggatgcctgtagtcacagctactcaggaggctgaggatgatcacttgagcctggaaagtcgaggcaacagtgaaccatgatcgtgtcactgcactccaatctgggagacacataaaacaaaaagagacgtctcaaaaaaaaaaaaaaaaaaaaaaaaaaaaaaaaaaaaaaaaaaagggcccggcgtggtggctcacgcctataatctcagcactttgggaggccgaggcaggcgatcacttgaggtcaggagttcgagaccagcctggccaacatggtaaaaccccatctctactaaaaatacaaaaattagctgggcgtggtcgtgggcttctgtagtcccagctactcaggaggctgaggcaggagaattgctggaacctgagaggcagaggttgcagtgagccgagatcacgccattgcactccagcccgggtaacaacagcaagactccgtctcaaaggaaaaaaaaaaaagagcaaacacagaaaacacaagagaagaaattatcaaagaaatactgtaataaagaatcttggtactaaagtatatgcacttccaaatcgagtgcccagcaaaatgaataaaaataatccacatcaagattcatcatcaagtttccaaacaagaataaacattccaggccaggcgaggtggctcatgtctgtaatcccagtactttgggaggctcaggagggcagatcacttgaggtcaggagtttgagaccagcctggccagtatgacgagaccctgtctctactaaaaatacaaaaattagtcaggcatggtggcaggcacctgaggttgcagtgagctgagattacgccactgcactccaacctgggtgacagagcaagactccatcacacacaaaaagaataaagattccaagccgctaaagaaggacaggatggggatagaaaaagagagacagaagaaaaaaacatacagagaattaagaatcacaatggcactgccaggtagtacagcacagtggaatccatttgatttctctgtatttctgcttaatataaaatttaaaggctgggtgtggtggctcacgcctataatcccagcactttgggaggctgaggcaggcggattgcttaagctcaggggtttaagaccagcctgggcaacatgggaaaaccccgtctctactaaaaacacaaaaattagccaggtgtggtggcatacacctgcagtcctggctacttggaaagctgaagcaggaggatcacttgaacccaggaggtcaaggctgcagtgagccaagatcacgccactgcactccagcctgggtgacgaagtgagaccctctttcaaaaaataaataaattaaattaaattaattaaattcagtatcccaccacttgacatataaggaaactatgacacagagcagtggaataacttgtccaagcacaaagctaattagaaatggcaggctggccatcgtggctcacacctgtaattccaacactttgtggggctgaggcaggaagattgcttgaaaccaggagttcaagaccagcctgggcaacacagtgagactctgtctttacaagacattttaaaaattagctaggtgttgtggtgcacacctgtggtctctgctactcaggaggctgaggtgggaagactgcttgagcccaggaggtcaaggctgcagtgagccgtgatcatatcactgcaatccagccagggcaacaagcaagaccgtgtcttcaaagaaaaaaaaaaaaagctgggcgcagtggctcatgcctgtaatccttgaactttggtaggtcaaggtgggtggatagcctgagcccaggagttcaagccccacctggacaacacagacagatcccatctctacaaattttttttttaaacattagctggttatggtggcacgcgcttgttgtcccagctacttaggaggttgagatgggaggattgcttgagcccaggaggtggtggctgcagcgagctgtgatcacaccactacactccagctcgtgcaacagagcaagactcggtctcaaaaaaagaaagagagaattgaaagacagaggaagaaagaaggaagagaagaggaaagaaagggcaaaactgggattcaaacccaggctgtctgagttccgtatctagtctgtgcctaaccagtcaacccccctgcaaatgacagctgtacactgaacaaaatacaaaaaaacagcttcctgagggttcagctgactgaaaaagggcaggcagattttggtggagtttgaaacttggaacagagaacagcatgcagttagtccctcccttcccccacaactttttctctctggtttgccctcaggatggcagccatagcccagggcggcagcagcaggccaggggtcaggggtcagggcgggcagccaacactctaatgggaagccaaccatccttctggcaggaagatgcaggctgccagaaactgaggacgaatccagaaacaggaaagtcaaagaagaaaaatcccaaattctgcatttaaactcagttcaagtttccacatacgtgctggggaaacaaagcaacttctaagcaagaactgagctctgagctgctgcatgagtgacagtttgtagcttgagtctgaccaagttgactgcctgctaaactgaaaacatcaaccccttttggggcaaaccaacagaatccataccgttctgttgtatgacacctccaccatcatatcacaatgtctaggacacaacacaacatcactcagcacaggaagactcatggagctgacatgccaactccaggacacacagatgtggaaattcccagacaagcaatttaaagcagacattataattccatacttaccacagcaaaatgaagaaaaatgcactcataaagaataaaaagatggaaaatctcagctgagaaacacaaaatataaaagagaaccaaacacaggcagtgcctactctccagctctcaactatagctgccttaccattgagcatgacagtcctcaatgaactctggttactattatcagccttattaacaatgacattggaagccagaagataatgaagcaatgcttacaaaattcagaaagactacagtttataccattgccaagttagaaatctctaaccaaataattaagtgtgagattagaacacagatacatgcaagatattaaaaatgtatctcccaggtacccttttttgggatctgttggagtacaatacttcatgaaaataagaaaaccaagaaaaaggaggacagggacttcaacgaaggagagaaatgaagtgaatttcatgctgaaaggaagcttcgggatgcctgctgtgtagcaagctgagagcaatctgtccagactgaagcaggagggcagagggctccagaaggggcaactcaaaacgcacgtgtgcacagagacaggttacctgaagggtttgactatgtttagagtaattttttatagctctgacagacaatttgggaaggaattcataagtacattcatgatatatccattaactccaggaaaatgaaactcatacaaaaaagtaaacatgatctcagcatatcatctggtatcactgtaaattatatttatatggtaatacatactactttgataaaaataaaatttttttaactaaaacagtatctcagcttggctatcattccatcatagtatatatgtgtctactataccttttgcttctttttttgagatggagtctcgccctgtcgcccaggctggagtgcagtggcgtgatctcggctcactgcaagctccgcctcctgggttcactccattctcctgcctcagcttcccgagtagctgggactacaggcgcccgccaccatgcccagctaattttttgtatttttagtagagacggggtgtcaccatgttagccaggatggtctcgatttcctgacctcatgatccgcttgccctggcctcccaaagtgctggaattacaggcgtgagccaccgcacctggcctgctttttttaaactatgaaatatttggagcatccaggaaagtacagcaaacaaaatatagaacatacacgtatctaagacctagcttagaattagccatatacacttcaggtctttgttgttgttaactattacagctgaagtctcctatgcagacttatctcatttcctttgctctcccctcagcgggaatcactatgctaaatttggtgtttatctttcgtatacatgtttttatattattaccacatgattcttctcagaaacaatacagaattctcttgcatgtttcaaattttaagtaaatgtgctaatctgtatggtttttttgtatttttttcttttcattctttcaactcaacatagagatttttccatattgatacatgtaactctagttcattcattttcactgctacattatattccgatgcaactataccacacttacccatctcgtgcttatgagcactgaatctgctttcagcttttggctcttataaacaagtcctgtgctcctctctcccattcgtgtgtgcaagggtttctgtgggagtggaattactgggtcctacgcaagggcacctttgacatactgtcaaattgctctaaaaactggttaaatcaattcaggctctcactaatattgtttaccaaagttttttatctttgccaatctaaaatataatataacattaaagaaagtttggaaaaaagaagacattttaagtatttaaaaaaatcattagataaccctaatggatctcctgtgatttttgtatttccttccaagtccctctgcattttctttatttttctgaagtagtgtcgtgaccgcctgctctccaagaggccaggagaaaccctggcttctctcaccttgctatccattcagcagtgccctcaaagaggtctggagtgatgatgttggtcagcgaggctacggaggcagcacagtatgcgcttctggaaagacagaaacgggaaacacattaagctctacggaagagctaatgaggctcagtgaactccgcgggcggactgctcgccttgcctagtaagctgtaatcacctcctgtcctcactcttggcacacggtcagtcctcctgggtctccaactgagaggtgtgacattctatttggatagagttgctcacggcatggcttcagtgaaagaacatgacattctattctccctacctccacatggtccaatctacatcagaggaaataacagccatatcaattcatgtcaaaagtggattcagctcttctttcaaagacctataatggttgccataaatctatggtatcattcaggtacttctgatatgctcattcatttggatgttagtactgtttcagagccaggatttctgtttacagccttgacacattaaagattaactatactttttctgcaacagataaactgcaaaacaggccaccaaattgtaatagatcaaacaaggataggaacaggtgagtccactccaatacagtccttaaacctctagagggagaaaagagccttgatttcaaacctctcaccagtacacacacacacacacacacacacacacacacacacacacgttaaatgaaaaaggcgcacgtctatattttttgttttgcttttgttttggtttttattgagacagggtctcactctgtcgcccaggctagagtgcagtggtatgatctcagctcactgcaacctccgcctcctgggttcaagcaattctcctgtatcagcctcccaagtagctgggattacaggcgcatgccaccatgcctggcttatttttctatttttagtggagatggggtttcgccatgttggctaggctggtttcaaactcctgacctcaagcaatccacctgccttggcctcccaaagtgctgggattacaggcataagccaccgcgcccgggctattttttaaaaaagcattattaggctgggcacagttgctcatgcctgtaatcccagcactttgggaggctgaggcaggtggatcacgaggccaggagttcaagaccaacctgaccaatattgcgaaaccccgtctccactaaaaacacaaaaattagctgggcatggtggcgtgtgcccgtagtcccaactacttgggaggctgaggcaggagaaccacttgaacccgggaggcgggggttgcagtgagccaagatcatgccactgcattccagcttgggcaacagagtgagactctgtctcaaaaaaaaaaacaaacacaaaaaattattatacttgatttaggatcattcttgctgttccatcctcccagccctaattcttctcggggcacattttatttcagcttctccctctgtcatggtatacacacacagactgcctttccttcccctctatggttttttcaaatacccggcacagggaagacaaaaatcattggtttgaattctgctcaaaaatccttctcctggccaggcatggtagctcatgcctgtaatcccagcactttgggaggctaaggcaggtggattatttgaggtcaggagttcgagactagcctggccaacatggtgagacctcgtctctactaaaaatacaaaaattagctgggcatggtggcacacgcctgtaatcccagctacttgggagaccgaggcaggagaatcgtttgaaccccagagacagaggttgcagtgagccaagatcccaccactgcgctcctgcctgggcaacagaaagaaactccatctcaaaacaaaacaaacaaaaagtatattcctaagggctcctaagaaacataaaagaagggcctagtttccatcttcttttttttttttaagataggatctcactttgttgcccaggctgcagtgcagtggcgctatcatggctcactgcaacctcaaactcctgggctcaaactgatcttgcctcagcctcctaagcagctgaggctacagatgcatgccaccacacctggctaattttttaaaaattttttgtagagacagggtcttgctgtgttacccaggttggtcttgaactcctggcctcaagtgattctctcatctcagtctctcaaagtgttgagattacagacatgagccactgccgctcggccctggtttccatcttactcagtatagatataacatgaagtcagacttactgaggtattccaaagaagtctctgcagaagctgcatgcattatgatcctaccagcatttttagcagccaaaggcacagtggaagtttagttccaccagcaggcattgggagcacacaagagtcacaagtgccaatgccaaatgtgatcatctaccagcagctaattttgaagatctgtctaatttccttgcaattgtaggcctcttaaagaggctcagatgcatttgctcttgaatcctattgtgacttgtgaggtaggaggcgacctataatacagtttgcctctcacaagtgtgaggactaagaagtgatgacagaagacaggagtcccaggtctcacgctgagatggggaggaaacgtaatacaaccttttcatgtatttctccccctttccctccacccagtcatcgcagctctcaaatttgaatttgtccactaactttccatccttgctgccatcacccaaatccaagccttcttcaacctggatcagtcttcctgctctctctccctccagccctgaaaccagagggcttttattggaacactacagtccatcactgcaattgggaaacttctaagaaaatacaaatcagatcacatcactaaactccagactccataggagatttcagggcctctgtagcctgttcccagcctgtccctccagctccactgctcccctgcccaccaggccatctacacttcaacactgaacttgtcctttcttgagcaacacatgctttctcaccaaacttctgcaaatgctagatccctgcctccaccttatcctcacagaatgatctagattatataacctagaaaggaggtctcctttcttaagaactgagaaaaaatagtgcttgctatgagttcactgtgatttgattttttacaatacactggaactacagacccttgagtaggctcatctctgaaactatcagcagtgtaacagagcagaaagatcatccagagactgctgtctatcccagaagggcagcgagctagtctccagatgtcaaactctcccatcactgctgcttttctccaagtcaaatccacccaaacaagcactcctgaggactggctgatgcttccaggcaaaggacaatgaaagaaatgccaagtgaaaaatgatggaatcggggtactagaaaccaggcaaagcaaggaaaatggatgcaatctgctagcttttctctatcattcatatctttaatcctttatgtaaatagaaagcacgggcacgaatggcagagcatcacccaaagagcaaaggtcagggaagaatatggctacagtgcttggcaggggaaccaagctgccttactggagaagtttcctagcatttatctagaacatataaataaagagcatagggaaaaaaaaagtgctggaatgaataagatagcaaataatcacagctgcaaaaggtatatgataaaataccaaaaggatcttgctatgatttgtttgcttttgcctaataatcttagtaggtttttaaaagctgcgtttcaagactgtgcatattttgggggaatagcaacagaacaggaacgaaaatgtagtgaacacgagggaaaaaaactcttttaacattttccttaagaagaatcaacacatactgatttacctcagtcgttctactggtttcactggtatacacagatcctaatctaatttttttggttggattagacaagttagagatagaagaacatcttgaactaaaggcctttgcagcctgattacctattatctgtaatgtattttatgctccacaatgttcgtggttttttcctcccctatactttcaaaccaatggttaaaccagatgcttaagccagactattaatcaacttgtgtagaagcaaacccatttacacataggcagtaagacagctttgctatagaaacctcacaaaatgtatttctcaactaaataataagaaaatggcataaaatctcaataagccactgtcttagagaaatggcttattcaatgaattccctgtatgcctcataagtaatctgccaggtgaggaagcaacttgcttggtacatcagacacttatggaagaaaataataatttcgagctaactggcaccaatcagttaatgcgattttattgcactgcactctcccggcccacaaggctctctgcacctcccagaaaaactctcatgtgcctcaggaggacctcagggattagacattctcatgatttcatcaaattcactcagaaggtatttactgaggccctgctggactttcccctcccttcctatctcagagaggtgaaggaatacattacaccatacagttatttatattgtggtatatcattttgtaccaaacaaatgtatttttaatttctaaaacaaaagcatttgtttcttatattttcacatttacataaaataagtcaagtgatcatgacacctgaggacatctgcatcacatctgaatgattctgacgtgtcactgacatgtcatcccatgtgtcattctgggacaaagcagcagcttccccatgatgttccttaggcttggcatctctaatggcagatgagctctagagtcaactgatgtggcagcctgtgcaaaaccccactcacctcacatccacctcacctccgacatgcatgagaaaggagccgtcaggttgcttcagggagtacaaatactgaagaagcttctctctgagaaacagggaaagaggtaggagaggcaacagtcagtgcgtgtcagcaggcggggaactcctctaggtttctgtcactgctggctttcactgtacctgttaatgatgtcataggcctcctcggtgccaatgatgcacaatgcattgactgctgcatatgtgggtgcaaggtgtggatactgaccgggtcctcctccaaagccaccttctgggctctgacacagctccaggaactgacacacactaggtacacagccaaagggcaaaaacaaagtcagagagcattcatgtcaaaacaccaaattcccactagattccaggcctttccaatgatcccccactccctcaaaagttgaggggaacctctcctcccacttgttgaatataacctctccccaaagggcttaattctctctccagctatcatcatttctgtctgccctcctctgagtttcgtacttaagcgcttgttggtcatgaagcagggaacacaaggctgggaagaaaccgactttcgtagctatggggtaagagtctcccgtgcttcccacacaaacctttcccagactttccactcaacttgctgccctggacctgtggtaccagcctcctcctccttgcctttgggaacctcccagcctttgaattttgccaaaacatggtgctcaactgcttctttccacactaaccatcctagtcaggatccatcacctaggcctatcatgaacatgtaaatagaggtcttctcactcccattgccacctaagcctctgtgggccactgatttctactccaccagtaagaagcaagttttgtttttttgtttttttttttgaggcggggttgccctcggtcgcccaggctgcagtgcagtggtgtgatctcagctcattgcagcatccgtctcccaggttcaagagattcttttgcctcacccttccaagtagctgggattacaggcgtgcaccatcacgcccagccaattttttgtattttcagtacagacaaggtttcaccatgctggccaggctggtcttgaactacctgacctcaagtgatccacccgccgcagcctctgcaagtgctgggattacaggtgtgagccactgcatccggctgaaaaacacatttttaatggagcctgcttccatggctgggagaacagaagagaggcaggctgctctcatgctcaccttaattgcggtaaacataagaggagctgcactgactcgccgtgagaatgcctcccagtctgcgggttcttggagaattctccacgttaattcaaacaggctcccattccctcactgaggggagctgttttctgagggtttgcctccaagcctggcatcaggctgcccagaggttacagtcttgctttaggtgaaatcaagagagccctatcatcagtccggggtcttccgaagtgcaccagaaagggtgccccaggaaagccctggttatcaagctgtttctccacagctcagcagggtcacagccttcccgccaggagaaacctccatttacaacaagcaaactgtctttgcagtgttcatggggccttctttcctgggcgctttcacctcattatttccttgctactgctgccagaaagactacatagcctactctccaagaagacacaagtttataactgtttgccaacatcacatttaattgctttcgatttcagagttcccattatccgggcagagaaagcaaaagcaaacgctgctgccttgctctgtgagttctgaaacgtcacaggttaaaacaacacatacttctttttgcacctacaattttactgtagaaaacacaaggattgaaactgaagttgaaaacaattatgtggcactatggtttttgtttttgattttgagagagggtcttactctgtcggccaggctgcaggacagcggcataatcacggctcactgcagcctcaacctccccagactcaagctatcctcccacctcagcctcccaagtagctagaattacaggcatgagccaccacgcctggctagtttttgtattttttataaagatggggtttcgccatgttgcccaggctagtcttgaactcctgggctcaagcaatcctcccacctcggactcccaaagtgctgaggtcacaggtgtgagccatcatgcccagcatgtgacacatttttaacagcaattaatttctgtagagaacttgaatttgttccttctttccaaatcgtcatcaattcttatgacatttcccagaaacaaatagttaataagctcatgccctaacaaaggctggctgcactagcataccaaaaggtttctgtaccacaaaaagttttagctgatacaaaacttaacagcacattttttaaaagaaagaaaaagagtcacctggttatccactccctttcccagctcctaagatagaatcgtgccgaacgcaacactactgaccctaaagcctcgaattagttaggatctgaatgtaccagacacaccttgataccatccctccatgccaacctccctcagctgacatgctgcatctgactgtctggggctgtgctagagaactggaggttgggcttctcttgatctcagacacttccgtattacagaacattctgatcccaaggctttccaacttgcaccttaaggaattggcaagttgactatgaactaccagctgtcattcacagacttcttagcaattctgaagaccaaaatgttaatgatacttctacatatttaaaaaaaacaaacaaacaaaaaaaaggagccaggcatagtggcttgtgcctgtaattccagtactttgggaggccaaggcaggaggattgcttgaagccagtagttcaagaccagcctgggcaacacagtgagaccccagctctacaaaaaaatatttttttttcccacaaatgtagggggagaaaaacttatcatagagacaagaagttcaccaataaataaaaaattacaagcaaaaaacattgtacaaacaccaagtggcacattttgtgaaaaacaagtattcacaaaatcattcctttagaatatgactgaaagctgcaatacatcaattttctttaacgtcagcaaggcatttcattctagcttacgtgccaattaccagcaaagtgggaaactatcttctatatcatggatcttcaaacccaaaatgtgtgcatcagaatctgtagaaagctaataaaagaatacagagacccagtcctgctgaggtggaaaagatcctgggcctttgtatttttaccaaattctcaggtgattcagatacatgcaaagcttgagccatcactagtccttgctgcacaactaaaattacttggggggtgttttaaaaaaatcccaacacccaagccacacctaattccaattaaaccggaatcactatgggtgggacccaggtggcagtattttttttaaactccccacgtgattccaatgttcagccaggtatcagtgcttctcaaacttgagttgcatagaaattacctgtggatcttgctaaactgcagctctaattcagtagaactagatgggtctgagagtcctctttttttttttttttaggagatggagtgtccctctgtcgcccaggctggagtgcagttgagcgatctcagctcactgcaagctctgcctcctgggttcaagtgattctcctccctcagcctcccgagtagctgggactacaggtgcatgccgccacgcccagctaatttttgtattttttagtagagtcagggtttcactgtgttgcccaggctggtctcgaactcccgagctcagacaatccgcccgccttggcctcccaaagtgctaggattacaggcgtgagccaccatgcccggctgagagtcctcatttctaataagttcccaggtgatagcaatgctcctggtctggggaccacattttgagtagcaatgagatacatctgtgctgtccaataggcagccactagccacatgaggcaatttaaattctcaattaattaaaatagaaaattcagctcttcagtcacacaagacacatttcaagtactccacaactaactgtggctagtggccaatatagaacacgtatagatgtttatagacacctatagacatttacagaatatagaacattttcattatcacagaaagttctgctggacaccaccacttttatcattccatcattaaagagtatgtaaatcttgtaagagggtcaagttcaaagcagggatatcagcgattgcctctcagccttataaggagtttacttgggactcttaggtgatggctgaggactgatctaaagtgattgattctggccaggcgtggtggctcatgcctgtaatcccagcactttggctgaggtgagggggatcacttgagctcaggagttcaaggccagcctgggcaacatggcaaaaccccatctctacaagaattataaaaattaaccaggcacgttggcacccacctctagccccagctactcaggaggctgaggtgggaggatcacttgagcttggggaagtccaggttgcagtgagctgtgattgtgccactgcattccagcccagacaatagagtgagaccctgtctcaatcaattaatcaatgttgattctaaacaccgtcatcagtttggatgaaggattcaaaggcatgtacagtaaataagcatataatacaaaatgagcagcaaaacaaatcagaaaccaataagaataaaacaaatgcaacaggtacaaatagcaagaattacgcttagagatggcaggggtgggggatgggtaaggcacatgaatatgggaaatgactaggaacatagcaggaaaagaccagtaataagggtccacgagttgtgaagaacaacaataaaaatgcttgttaaaagcatcataaatgcagtattagtcagaactgtatctggctctagcctccattttccacctcaaagggaattcacatgagagttgtaaaaatgactactttttttttttttaagtatttggctgggtgtggtggctcgtgcctgtaatccctagactttgggaggccaaggcaggaggatcacttaaggccaagagtttgagaccagcttaggcaatacagcgagaccttatctctatttttaaaataatataaaaagcttaatattacagacaatcacagtgagaaagctacccagcaaaatacctcaaatatacaaaggataattacataaacattctagtaggtaaaaactgagactaatttgtagcaagaagtatttaggttacataaaaaacttcagcactagactaggctatcatagacagacttaaggcctaggataagttataaaaattatagctatgttctgcacaattgggcaggtttaaaaaaaaaaaaacagaaaaaaagattacagctttggaaataggaacagtcatccatgggcagaacggcttaggaggggatgtaaatgcaagatgcatgagctggcatcacatcaagcttgttctcgtactaactaaaacagcttcagcttgatatagtgaagaggaaatctccttccctaggtagaatatgacaatggacaggtgaagacgggcagcatctcttgttgattccgggtggcctctgctgctcacagagtcagacgtgttatttgactcttcatcaagcaccggcaagtctctggatggctgctgttctggaagaatggtcaggtcgaaagttggctactataggccgggcgcagtggctcacgcctataatcctagcactttgggaggccgacgtgggcggatcacttaaggccaggagtttgagaccagcctggccaacatggtgaaaccccatctctactaaaaatacaaaaattagccaggcatagtggcatgcgcccgtagtcccagctgcttgggaggctgaagcacgagaatcgcttgaacccggaaggtggaagttgcagtgagctgagattgcaccagtgccctccagcctgggggacacagcaagactgcctcaaaggaaaaaaaagttggctactttagagcagagtttctcaactgttgacactggggctcagtaattctttggtgcagggaccgtcctgtagaggatatttagcagcacctctgacctgcacccaccaggtgccaacagcacctggccaggaaaaatgcccaggagacaaaggcctagatatggtgtcctcactgaaaggtaaggaaacatacaaactagacttaaaaattaaaaggaaaaatatttaaggggctattccggggataagctactaacaaccttttgaaagggaaaggataaaacactgaaatagcaaaatttgaatttatctttggaaaaatcttacaagctgaaatgtcctaaaatggtttttaagttaaaggcaatttttaaatcttacagaagctaaaaacataactttaacagtgcgatggtctccctgtgaattttattttgctctgtttcactgaagctgctttcagtaacaaagaatgggattctcattagaggatgcttccttcagtgccaaaaccattaagcaaagcaaatgtacttagtctagttccaaaatattaattcattttagataaacacatataaatgtgtgcatataacctcttaaaagagggaagctaggccgggtgcggtggctcacatctgtaatcccaacactttgggaagccaagacaggtgtatcacctgaggtcaggagttcaagaccagcctggccaacatgttgaaagcctgtctttacaaaatacaaaaattagctgggcgtggtggcacacccctgtaatcctagctacttgggaagctgaggcaggagaatcacttgaacccgggaggtggaggttgcagtgagctgagatcatgccactgcactacagcctggcaacaagagcaaaactccgtctcaaaaaaaaaaaaaaaaggccgggcgcggtggctcatgcctgtaatcccagcactttgggaggctgaggcaggtggatcacctgaggtcaggagttcgagaccaacttggccaacatggtaaaacccaatctctactaaaaatacaaaaattagccgggtgtggtggctcccgcctgtatgcctgtagtcccagctactcgggaggccgaggcaggagaattgcttgaacccaggaggtggaggttgcagtgagccaagatcgtgccactgcactccagtctgggcaacagagcgagactctcaaaaaaaaaagaggcaagctgaagtcctacctatggactgggcatggtggctcacgcctataatcccagtgttttgggaggctaaggcaggaggatcaattgagcccaggagattgagaccagcccaggcaacacagcaaggcactgtctctaccaaaaataaagaaaacattccaggctatgaatacattattcttgaaacctctgataccagcagtaacaacctcgccttgctggctttggtcagcggtcatagcagctgacaaaagtattttgtccactagagggaacccagcttatcatattgttccctaaacaaatagaagcacagcagtgaacaaaataggaaagagaaacctttgtgtaagtgtagggggcgtgtgtgttacatgcaggggaaaagaaggcaggaaaataataaaactgcagagctagactttttgactctaggtcaccttaatatatttgtatgaagaaagaaaactgaacgcatttcaaagcatttcatttccctgtgcaagataaataaaaaggcaatattctatttcagctagtctaaaaaaaatcttctatttatatagaagtccttaagatttatctgtatcttactaaaaataatctatttccttatgggtcagagccagtaggctttgttcataacaagtgttttctgcacctagaagtaaccacctcctaggcacaaagcaaaatacattattgggaagtctaagaaatgtttaaaagttcactaaatcaatgcgtagaagaaccacaggtaaagcttttaaggcatctgtgaagcagaaactctcattaactgtcaagtggtttttgaaataaggacaaatcagcttatttttaaaccattccttttttaattacaaaataataaaagatcattgtagaaacttcagaaaatgcaagtaagcttaaaaaaaatgttttgtttgtttgttttttgagacaacagtctccttctgttacccaggctggagtgcagtggtgtgatctcggctcactgcaacctctgcctcccggattcaagcaattctcctgcttcagtctcccgagtagctgggattacaggtgccagccaccacatctggctattttttgtatttttagtagagacagggtttcaccatgttggccagactggtctcgaactcctgacctcaagtaatccgcctgtctcagcctctcaaagtcctgggattacagccatgagccactacatccagccagaaagttcttctttttctttttctttttttgagatggagtttcactcttgttgcccaggctggagtgcagtggtgcaatcttggctcaccgcaacctccgcctcccgggttcaagcgagtctcctgcctcagcctcctgagtaggagccgggagtgcagtaacagaaggagactcttgtctcaaaaaacaaacaaacagcctcctgagtaggattacaggcatgcgccaccacgcttggctaattttgtatttttagtagagacggggtttctccatgttggccaggctggtctcaaactcccgacctcaggtgatccacccacttcgttctcccaaagtgctgggattacaggtgtgagccaccgcgcctggcctttttttttttttttttttaagacagagtctcactctgtcctccaggctggagtagagtggcatgatcttggctcgtcgcaacgtccacctcccagattcaagcaattctcctgccttagtctcccgagtagctgggattacaggcatacaccaccaagccaggctaatttttatatttttagtagagacaagatttccccatgttggccaggctggtctcgaactcttgatctcaggtgatctgccgaccttggcctccccaagccctgggattacaggtgtgagacaccgtgcccagcccagaaagtttataaaatcacttttaaccccatcgtccagaaataactactacatgtatctttctggttctatctatgcatatcatcatctatatttttaatgtatgtaaattaaatcttttaaactattttcatttcacatctctctatataaatacatatattttaacatacaaatatacacattcatatatttattgagacagggtcttgctctgttgcccaggctggaatgcagtggtgccatcatggctcactgcagcctcaaacccctgaactcctgtctcggcctcctgagcagctagaactagaagtgtgcaccaccacgcccagctatttttatttttatttttgaaatggagtctcactatgtcgcccagactggtcttgaattcctgggccccagtggtcctctgaccgtggcctcccaaagtgctggggttacaggtgtgatcatgcgtggccacatttatacattttttaatggttatatagtatttcacagaatgtactgcaccataaatgacttatgttttattttttaaatttatgtattttatttatttatttttttgagatggagtgtcactctgttgcccggactggagtgcaaaggcgcaatctcgactcactgcaacctccgcctcctaggttcaagcgattctcctgcctcagcctcccgagtagctgggatgacaggcatgcaccaccatgcccagctaatttttgtattttagtagagatggggtttcaccatgttggccaggctggtctcaaactcctgacctcaagtgatccacccacctcaacctcccaaagtgcttgggattacaggcgtgagccaccacacccagctttacatttaaaaaaaattttttttaaacattctctactgttgatatttaatttagattgcttccaatgaaaggccctttaaaggctcctctcttcctatgtgacattgccccagaagcggcgctgacacttcctcagaaaagccttcactataaaacaccaagtacacagcctagaaaaaaactcagtcgattttggctcgagttcttccacctcaggcaccccctgtgattctctcttccagtttttcatgggtctgcggcctcctccatccagcgttcagatccaggctcacagaaatccccattttttctttcttctctcacacccaactttcccattgtgcaagagtgaagggaaaactttccaaatatcctgattgtgtaggagtgaagggaaaacttcccaaacaatccccaggcccccgagctggtatttcaaaaacacacgaggctggatgtggtggctcacacctgttatcccagcactttgggaggccgaggcaggtagatcagctgaggtcaggagttcaagaccagcctggtcaatatggtgaaagcctacctctactaaaaatacaaaaattagccaggcacggtggtgggtgcctgtaatcccagctactcaggaggctgaggcaggagaatcgcttgaacccgggaagcagaggcagcagtgagctgagactgtgccactgcaccccagcctgggtgacagagtgaaactctgtctcaaaaaaaaaaaaaaaaaaaaccacgtgggcctttctttgacaattaaattcctgttactgcagaaactgtgtccaactctccttccagtgctggaagcagccaggcttgcagtggcatcccgatgatcaaaacaatgcacttgcctctccctcagaaagcatcctacgtaccacaagggttaatggcctaattctttattatcttccccatccacattcatcacaagacaccctgcccaggaaggcaagaatgagaggttattgttaagacagaatgaatgagacaatgtgcagttctgttcctctgacctgacaatgtgactgaggcaggggctctgtgaccagagaggggccccggctaggcctctgtgtgtcccagcacagctgcctccttgtgctgtggagaaacaaacctggctcagaagtctctcatcccagatgcttcgacctcaagagcaccagaggaagctgagaaattcgagatgctgcctagagcccatgctgcctctcagtggatctcttggatccaattcctggctgccctttcttattccaggtatccctaggactggagtcatgatcagtcttttcttctttaatatataaatggtgatgagtgtctgggaatgagatgccagatcacgaatgccatctgtacaaggatcttgggaagaagctcagttgcttagatctctaatcatcgatcaggtttaggaaaactgagagtcatggcatttgtatgccacaccagtaacacatccagtcccatcaagagctacatggtcgctccaagcaccgggagcggggaggtacttctatagaggtgcgtaggaaaggcaaaggcatttttgttcactggactggcacgtgcttccccacagaagctgttcaaatgcatactgtactttctggcaaaatcttgtctctcagagttgatgattaagacttttctcaaagaccagagtcaagagccaaaagaaaaggccacagaagaaaccagaatccttctcttggaagttcaaagtcttgttctacccaccagcttacattagttttctaaagtggaggagtttcaggaagttgccggaggtcatgagaagagcaaagatttctttgtggcactgtttttttccattccaaacaaacaaaacagaaacaaaacaaaatcccaaactcaaaatacaatttcagagaacaccccagatttcccaaagacagactcactctgtagccactatctgggggatgggttcatctagcagttccaagctgtgcaggatccaatagcagagccatgggcggctggcatccagacactgggagagagacaggagagaaaacatcccttattcacaatcactccaagacactgctgccaaggctgtatctgtctcactcccagcagcctggcaagggggaggagggcacccttgctcaaacaacaatcagtgaataaaggacactttgctttgtggccttagccaggagctgaaatgaccatctgttaaaaaaaaaaaaaaaaaaaaaaaagataacaaggctgggcgcggtggttcatgcctgtaatcccagcactttgggaggccaaggtgggtggatcatttaaggtcaggagttcaagaccagcctggccaacatggcgaaaccctgtctctattaaaattacaaaaattagctgggcatagtgatgtgcgcctgtaatcccagcgacttgggaggccgaagcaggagaatcacttgaacccgggaggcagaggttgcagtgagccgagatggcaccactgcactccagcctaggcgacagagcaagactccgtctcaaaaaaaaaaaagaaagaaaagaaaaaaaagacaacaggattaaaaaaaagatgaccctgaacccagtggatccctccctggcaggcatctaaggaaggctgagcagaggacttcctacaggccaggaggttaggggctgctattttctcggtatagaaccaaggagatatacattctctgaagagatttcctagcttaactcaatcactgattcaacaaatatttgatagtatctacttgtgccaagcactgtattagacactggggggatgataataaaatttggtttctaccgtttatttttttgagacagggtctcgctctgtcacccaggctagagtgcagtggtatgatctcagctcactgcagcctcaacctcccgggctcaagcaatcctcccacctcagcctcctaagtagctgggactacgggcacacaccactatgcctggctaattttttaagtttttatagagacagcatcccactatgttgcccaggctggtcttgaactcctgggctgaagcaattcacctgcctgagcctcccaaagtgctgagattacaggcattagccaccatgcctgaactggtttctgttcttgagatgcttgggatatagaatgtgtgtggttacctgtaggggaagagagcactggacagacatataagttacctcatgtctttctggaaccaacacgtgtacatatacctggagaaatgctgtaatggacgaaaacagagttttgagggagcacgtggaagagactgactaattctgcctggggagctaggaaaggcttccaaaggcaaaatgcagacggctcttgatcctaattaaaccataaatgattattgagcattcaaggctaggcagggtaggtaggagtactgccccagttttataaattaaaatatataaatgaggtccaaagattaacctttttcagattataaaaatagcaaatgtcagaggtgagacaagaacctaggtttttagagtcaatccagtgttctttccgttggcccaagctgctctcttcaaaactatgctgatatcccaagctgtggctaacccaccacctggaaggtaggctggtgagctactgaagacactgccagggatgcagcttaagtttgaatcccagctcctcatcttactcgctatgtgcctttgagcaaatgacttaattttactatgcccatttcattatctgcaaaaaacaagagattgatctacctcatgtagttacaagatttaaataagagaatgcaactgggcgcagtagctcacgcctgtaaccccagagcctcaggaggctgaggcaggtggatcacttgaggtcaggagctcgagaccagcctggccaatatggtgaaaccctgtctctactaaaaatacaaaaattagccaggcgtgatggtgcacacctgtaatcctggccactcagaaggctgaggcaagagaatcgcttgaacctgaggcggaggttgcagtgactcacgatcatgccactgcactccagcctgggaaatacagcgagactccatctcataaattatgagagaatgcatggtaagctttcagcacactgttcaataaattgttagctgatatggtaccaactgtaacataactattgaggacttgagtcaaggattgaaaattcatagcccacaggccaaatctagcccatggatgtgtattgtttaactggtagtagctgcaacatttgtcaggagagtcacatgaaaacgtgatttccggcttcatttggaggaagaaaaaaaaaaaaggaaacaaagatgatttggcaaccctgggtctgcattcccagatggcagtaatgggcaggaaagaagttaagggcacagggtctccagttagcctcagtctccatgcagcccacttcactgatttatgctgcctgcctgggccctacaggcatttgagttggcaaatcattgccacaaataatcaaatgtggaacccaaataaaaagcagattaaaaatagagatgctgctctgtgttaagcagggcagaaagactggagacttcctgttcacattcaccctttgcctgccgctcagtcccatccaacatctgtcccctccaccgtcacccagtcctgacgttgctctgggaaatattaaagatctactcttaaacagtaatgttaaattgcaaggaccactctctatactggtcctctagtcagtatagaaattagatcttattacaagaaagggttttttgtctctttaatgaagatatgaaaagtaatgtacttactagaaggagtggtgaagttggaaaatttgtaaccatcacgatacagacttaacaggtttggacaatagtcctcaataaatgagcgagaaattagatcagcttatagggcaaagggttaagggtgaacaggtaactggcatttagccagctgtcaaggaggtctagataaagcacgtgaaccccttagtcatcatctagtaacagaagaaagccccatcctatctagggtgctccactcactctggaagagactaggttctgccctttcagggctgagtcccagctctgtgacagcaccctacctcctgccagagccacagagaacaaagagtgactctgcaacaggtcagccccaacagtcttttacgtttaaatagaaaaaggaggaggatttggtggataatttgacagcaagagttcctgggtaatgtgtttacctcataggcatctgtcagttgtcgaaggcctcttttcagataatggaagtgcttctccctctgcaaaacaagcctggaaagacaaacagtttataagcccattctaatagcttatgcttccaccatacacacgtatgtgcacgtacacacacacgggtaaacactcagcttcaggacgtccccctgcaatcactgactggataaccagcaacttctctggttccaaagagcaactaaaccagagaaaagaagctcttgtctgaatgtctctaaagcatctgaaaaccatgccagctgacatttagagtgcgattgtctcctaaaggcagtgactttgggctaacggaaaagccgcaatgagcacacgcagccaggcaatgacagtccacccagaaacttcctccagcatctaagaacagatatctttgtgcctccccatcctataagcaatttaaatctgagcctcgccacttccctgcctcagccgctgtcatttcagtcaccccgtctgggatgacttctccaaggcccataatttactccctgcctgcctctcggttatccaactattattctctccctgaaattccacctcccacgtgtgacccacagccctggccagaggaccgtgttctgcagccagtcgctgtccttggctttcaagtcagcaatactggctttaagatggaatgtgccgcccatggccacctgcacaggccgggcaaagcacagaggctgcacttctttcttggtctggcagaagagcctgtgtgactagggaaggaaacaaaaagcacagattgtcaagatgttccccgtgcttgcagattacagaaacaaaggaaagagaaccattccctttgctaggtagtcaattccacaattgtttatcaaattcccactgtacttggctcagagtaagagccttcatgcagtctttttttttttttttttttttcctgagacggagtctcgctctgtcacccaggctggagtgcagtggtgtgatttcagcttactgcaacctccacctcttgggttcaagctattctcctgcctcagccacctgagtagctgggattacaggcacgtgccaccacacccagctaatttttgtatttttagtggagacgggggtttcaccatgttgcccaggctggtcttgaactcctgacctcaggtaatcccctgccttggcctcccaaaatgctgggattacaggcgtgagccaccgcacccagcccttcatgtagtctttacctcaaaaactcttccaattcagaaatgaggtaagtatatcaatggctacaaggaaagaatgggtaggttttgcaagggaaaaacatactactgaggctcaaaagggaggggatatctcatgaagaaaggaatgatcaggaaagtttgtgtgaaaaaggaggaatgtgcgatgagtggccctggcagaaggagaaaattttaattcaattttaattcaagtttaaatagctgcaggtggctaatggctactctactatgctgcacaggtatcaagtgtacaagaggagtgacaggtgggagaatctgacctcaatacagggatgaaagaggaatgggaggaaagcaggagtactgccccagtttaaaaacaaacaaacaaacaaaaaaacaaggatctgggatgctgactaaggcatttctactcaatttactaggcaaagggaagtcctgaaggtttttgagatgaggaaagaaatgatcagaactgtgctttggagaaacagtaggtagtcagtatgtgtttacaaactgaagtatctgaaaatatcgcagtgggcagacagatggggtggggagacagggttagaagctctgaggagctgacccagttggggctacttagggcccgaactagtgtgtgacccgtgatcagctgacttttggatgtgtgggtcttaggatgctgggactgcattcaggtgatgatgtcaatcaggctgctggacacacacgtgaggctcaggagagggattcaggttacacacacagactacgaagcatttgtctgcacacaagtgacaggtgaagccacagaaggtgagagggcagagagagaagtttggaaacaaaactgtgggaagacccatctctaagggtttggaggagccagtgaaggagagaaacaggagagtttacatatgctagggaagagcaaaggaagtgtcatgtcacaggccatcagggaggagagaatttcaggaaggtgtttaacagtggcagatgctgcagcaagactgaggggaaaagacaacaaaccacagaagggctagagacctccaagagcattcagagcagaggtgaaggcaaattgtaaacaagagaaggccagactcagtttctctttcaggaaagtccactcaggacgcagggagcacccatctgtgtgggcagagtgttgtccagcactggggtagaggctgctctgtaccctagagcgacagtccagaggtggacacacatgtgaaaatgacaagcagagccctgtccaataaacgctgtgatcagccacgggaagagatggagggtcagaaaactcttcccaaagggaagagcattgagtttaaggctggaaagacatgagttaagcaggcaaaatgaagaaaacaccatgacacatttgagttagtttagttcagctggatcaaaagtacaaggcagtaagcagagaaattccacattagaaatgcaaaagctcagaggaaatccatagggaaggtctgtaaagaggatggaggagggctgggatgagggtatagtaggagaggtgagcctggaataaggaaggatgctgcattctttgagcgagaaatgatgggtacgaagctagcgaaatataggtctctgatgtgggaagaaggaaacaggaaagtcaggtgggtcagcctcgattttctcaggaactaggagtcaagatggtgggagagctgtggagtggccacggtggtgggtgtgttagggaatctacatgagacgaataaaaggattataaggcagttagtgaagcgccagtgaaattaagaaatataacatgttggtgaagccagtcagcagcctcaggagaaaccaagcctgctgacaccttggtcttagacttctggcctccagaaatgtgaaaaaataaatctctgtggtttaatgcaccccatctgtgataccgtcttatggcagcccaagctgactaataccctcaccggtccttcattctcaactcacctctatccaaaaatcttttctgtgtaggaagttaagaaagaaaaggtagagctcttcctatttttacctgaacaattcagccccaaaaccattcaattacatggagcagaataagacaggtttcgtgcaggacttgagggggtgcagggtgggatgcaggctgtcagctcaagtggatgaggagggcccccgtctcactgtgcagagggtgacaggagagcaagtgggtaaatctattaaggctatgggaagtcaggtttccactgtctgagaaggaacttacacatctatgtgtactgggtaatgatttaaatagaatttcttatgaggggtgagcccactgggcttccagactcttcacaatgtgcctccacccacactactctccaacctcatctccgcccctgagctctggtcatgctgccttctttgagctccgctcctttcagtctcctggctttagcacatgctgttccctctgcctggaacactctccccatcctttaagttagccacccctattccacctacagattcagcttaaatgtcactttctgtaagaagccttccctaacttcccaatccaaattagattctcccagtgattctctctctcaaattatcccatcggtaactgtatatttgtgttcatttgtttaatgtccacctcccccactagaccaagagcccagcaggggcaggcccagggctagccttgctcactctggcttccctgagcccagcagagtgtcctgtcctttggagactctctagatactgctgctgaaagagaggatcacacaaaggcagcagaatggaatgagagcaaagccacttcctccccccaaacctgggccatcctggaaaacatgcatttgattgtgacagatgagaggacaggggattcagtccattgctggttcctggggactttctaaactcactaaagccaggggcctctctagtcaaaaaataagcacctggcatgtaagcaataaagcaatcgaggaaaggtgaacttatttgtgagaccttggaaagaacaacagtaagaagggaatacatcctctacctgctcaggatctgggaaattctaaaattgtatcacatacaggaatagtagaaaacacgggagctaagctggtgcctgtgagagacctgctttgaggactttaactcagagtattctggcttcagagccattgtcagcacttaacctccagggctctattagcacagggacattatcaatatttctcacttctgaggagcacccgtctccttgcccaggagaaaacaaatttaaaaactacatgtgagcgaggtatctgtgtagtttatgcatttcaggtttcttattaaagccaaggtgataaatgcaaaagggtacattcaaaagggtgtgaaaccgtgacaatacccacagggaagaaaaaatgaattttcatgggaaagcagacatgaataaacaaaaccatgaaaagcatggtcaaaaagctccttgggactgactacctcactccaggtagacagtcccaaccttagagaagaaaatcatttctgggaaggggattaagtatagaatgtactgacattcagctccaggcttgactttcagcccagtctgctattcagctttggccctggaacactgaataggcaaatgcctacttcagcatcatcacaggcatccctggacctgtgcgtggtctgtggtcctgggcatgtgtgtgagtctgtcccatttgatcagcatcatgacctcagacacacaaacaagccctgccatctagatttactgctaacagctaaccatgcacttcagctaacagtgaaggttacttcctgtattaaagtgtcagacttttaaattttgactattaatatgttaaatattgagactgtgataatgatttaaaattctgataaattttctaatttattcttatatcctcgcttattctatgatggtgatgtttgccttcagccttatattgatatgttgaattatatactcagccattcagccaaaatgtatagtatctccaatattaattagcatcctttaaaacactcaatttcataggcaacaatgataaaaacgggtaattgtgaaattcctgaaactaacccagagccctgatatattctatttccacaaggatccgagcccaggaggaacactttttttttcccacccatacttgacctaccagctatgaatcaggggatttcactcctttaatatcatctaccaccactctcaaaaaacaactgcttcctcccagactataacctcccattttccctcatatctcagtgtgaataaaagtctttcttcagctcatgagctaaggaaaaacaaattttaaaaaaggaatgaaagagaccaagggctctatcctgatggtaagtgaaaagggaatgtcaaataatcaaaggttcatgtgagaaacagaggctgtgtgtccccagagcccaggcagtggacagtgactcagcccgatcgggtgagtcatcgggggtacaaccacaacaacaaagcccctccaaaagcaatcacccacaccctcaccattatgaagtcttgtcccctctggggaggctaagcttgaaccagcttgtgcctaggggcagcgaactgccaaggataccattacatttaagagagctcgttctcccaagctatttaaataaatggcgtcatttgctaatctctagctgtatctcatgacaagaggaataattcattttattgaggtcagagcattgggttaatgcagagatttggtttagcagttaagggaaagactatactagtaagctgatatttttcctcctttccttccccag

SEQ ID NO: 735283 - DNA, 1961 bp, Homo sapiens
cggcgaggtcggtcattctgcctgtccggtagcaccacgaaacacctgccactgacacctccccaccagcccccgagggttcgcgcaggcatcccgagccgcgccccctggtccgccgcagccagattccctcccgggcgggttacgcccctaggcgcaaaacggaaccactccgtatgaagaagacaaagtataaccagtcacaccaaagagaggcagcattatttagacagccggctactcccccagagactccacccagtcccctgggcccggcgtccagcgcgcagacggtgcccggctccaggagttccagctccctccacgtgtcctgtcttcccagcagcctcctctgccgcctcgggaggaaaatctcctgacaactcgcggtctgcggactacgactcccaggaggcgccgcgccgcggctctccccgcccccccccgcccccccccccctccccgggacgcgcaggcgccttgggctccgtcaacaagccgggctggcgtcgcctggatgcggtttcttccgggatttgtagtttttctggagctacccgggccgtctgttagagggacaagaactacaagtctcggctgccccagcgctgcgagcctggtcacgtggcgggggccgaccgggcgtgcgtgccgccgttgatccggtgctgcagtgaggagcgtggttcttgcccgtgttgtgtgtgtgtgtgagtgagagagcgagtgagtgagtgagtgagtgtgtgtgtgggggggactcggcttgttgttgtcggtgacttccccctccccttcaccccttcccctccccgccgccgctgcagtggccgctccctgggccgtaggaaatgagcgataacgatgacatcgaggtggagagcgacgaagagcaaccgaggtttcaatctgcggctgacaaacgggctcatcataatgcactggaacgaaaacgtagggaccacatcaaagacagctttcacagtttgcgggactcagtcccatcactccaaggagagaaggcatcccgggcccaaatcctagacaaagccacagaatatatccagtatatgcgaaggaaaaaccacacacaccagcaagatattgacgacctcaagcggcagaatgctcttctggagcagcaagtccgtgcactggagaaggcgaggtcaagtgcccaactgcagaccaactacccctcctcagacaacagcctctacaccaacgccaagggcagcaccatctctgccttcgatgggggctcggactccagctcggagtctgagcctgaagagccccaaagcaggaagaagctccggatggaggccagctaagccactcggggcaggccagcaataaaaactgtctgtctccatcgtctcatcctcctttcagttcgttggtagagccctcagaaccatttaagagactctttatttttctctttctcccttttttttttaaatttttatttttacgtagaagctcttggacaacagctctcgttctccttccccatttccactgtatattttttaatgtattcccttcagggattccctgtccccaacaggaatttttaaaccaaaacaccccaacttggcagctttttctgtggaggacagacggccggccggacctctgagcacatagtgtcctgcccaccctaccagctcctccagccctgccgggcacatgcccgggggacgcctgccctgcccaggtggcctcctggcccgccctcacctctgatagactttgtgaatctgaactgctctactttgagaagatgaccggtttggagtaatcagaatgaaccctcctcctttttaagggttttttttttttcctttttctaaaaagctatgtatcgctcctattgaaagaccagatccttagagaagtttgtggtataaaaggaagtggggacgaatagtttactcgtaaagcgggatcctcag

SEQ ID NO: 735284 - DNA, 1911 bp, Homo sapiens
cggcgaggtcggtcattctgcctgtccggtagcaccacgaaacacctgccactgacacctccccaccagcccccgagggttcgcgcaggcatcccgagccgcgccccctggtccgccgcagccagattccctcccgggcgggttacgcccctaggcgcaaaacggaaccactccgtatgaagaagacaaagtataaccagtcacaccaaagagaggcagcattatttagacagccggctactcccccagagactccacccagtcccctgggcccggcgtccagcgcgcagacggtgcccggctccaggagttccagctccctccacgtgtcctgtcttcccagcagcctcctctgccgcctcgggaggaaaatctcctgacaactcgcggtctgcggactacgactcccaggaggcgccgcgccgcggctctccccgcccccccccgcccccccccccctccccgggacgcgcaggcgccttgggctccgtcaacaagccgggctggcgtcgcctggatgcggtttcttccgggatttgtagtttttctggagctacccgggccgtctgttagagggacaagaactacaagtctcggctgccccagcgctgcgagcctggtcacgtggcgggggccgaccgggcgtgcgtgccgccgttgatccggtgctgcagtgaggagcgtggttcttgcccgtgttgtgtgtgtgtgtgagtgagagagcgagtgagtgagtgagtgagtgtgtgtgtgggggggactcggcttgttgttgtcggtgacttccccctccccttcaccccttcccctccccgccgccgctgcagtggccgctccctgggccgtaggaaatgagcgataacgatgacatcgaggtggagagcgacgaagagcaaccgaggtttcaatctgcggctgacaaacgggctcatcataatgcactggaacgaaaacgtagggaccacatcaaagacagctttcacagtttgcgggactcagtcccatcactccaaggagagaaggcatcccgggcccaaatcctagacaaagccacagaatatatccagtatatgcgaaggaaaaaccacacacaccagcaagatattgacgacctcaagcggcagaatgctcttctggagcagcaaggggaaagcgagagctgatcaagttctttgttcctggggaattcacttctcttcctccctcatggaagatgcaagtaaaaggaaatgcaagtaaccacctgggttagaaaacctcaaataaaataaaataaaataaattaaatgggttgaccttccaggctcaagctgagctgaaccaagggatgggcagtgggtggtgtcagtgggttggttactgggccaggcagcctgcatgtaggggctatttgaaaagcccaggtattttatgtgtattggtgacttgcttccaagtgtccagcttgtcattccaagtggatcttgtacacgagagctaagccaaaactgttctttggctgatacgtcttatgtcatcctttcctgctgttgtgtggcctcacaccttgtggagcctcatgctcctgggccagcttctcctctgttattgcactgctgaatcccacagggagctcacgctccagtctctccacggggcttccacggcaggacggtgacatcacaagccttctcttcagagttgggtgggattgcagagtgtctgctggctcccaggtccagctgggaaaggcgggagggaaatgaagtgtgtgagtgaacagccacccgaagggagctacttctgagcatcttgagcctcgggggccaacaagcaagcccttaggaagaacaggctggaccctgagtctgagactcggttactccccaagtctccagaaggcagtaacacactcccttggttgccttttag

SEQ ID NO: 735285 - DNA, 71619 bp, Homo sapiens
cggcgaggtcggtcattctgcctgtccggtagcaccacgaaacacctgccactgacacctccccaccagcccccgagggttcgcgcaggcatcccgagccgcgccccctggtccgccgcagccagattccctcccgggcgggttacgcccctaggcgcaaaacggaaccactccgtatgaagaagacaaagtataaccagtcacaccaaagagaggcagcattatttagacagccggctactcccccagagactccacccagtcccctgggcccggcgtccagcgcgcagacggtgcccggctccaggagttccagctccctccacgtgtcctgtcttcccagcagcctcctctgccgcctcgggaggaaaatctcctgacaactcgcggtctgcggactacgactcccaggaggcgccgcgccgcggctctccccgcccccccccgcccccccccccctccccgggacgcgcaggcgccttgggctccgtcaacaagccgggctggcgtcgcctggatgcggtttcttccgggatttgtagtttttctggagctacccgggccgtctgttagagggacaagaactacaagtctcggctgccccagcgctgcgagcctggtcacgtggcgggggccgaccgggcgtgcgtgccgccgttgatccggtgctgcagtgaggagcgtggttcttgcccgtgttgtgtgtgtgtgtgagtgagagagcgagtgagtgagtgagtgagtgtgtgtgtgggggggactcggcttgttgttgtcggtgacttccccctccccttcaccccttcccctccccgccgccgctgcagtggccgctccctgggccgtaggaaatgagcgataacgatgacatcgaggtggagagcgacgaagagcaaccgaggtttcaatctgcggctgacaaacgggctcatcataatgcactggaacgaaaacgtagggaccacatcaaagacagctttcacagtttgcgggactcagtcccatcactccaaggagagaaggcatcccgggcccaaatcctagacaaagccacagaatatatccagtatatgcgaaggaaaaaccacacacaccagcaagatattgacgacctcaagcggcagaatgctcttctggagcagcaaggggaaagcgagagctgatcaagttctttgttcctggggaattcacttctcttcctccctcatggaagatgcaagtaaaaggaaatgcaagtaatccgtgcactggagaaggcgaggtcaagtgcccaactgcagaccaactacccctcctcagacaacagcctctacaccaacgccaagggcagcaccatctctgccttcgatgggggctcggactccagctcggagtctgagcctgaagagccccaaagcaggaagaagctccggatggaggccagctaagccactcggggcaggccagcaataaaaactgtctgtctccatcgtctcatcctcctttcagttcgttggtagagccctcagaaccatttaagagactctttatttttctctttctcccttttttttttaaatttttatttttacgtagaagctcttggacaacagctctcgttctccttccccatttccactgtatattttttaatgtattcccttcagggattccctgtccccaacaggaatttttaaaccaaaacaccccaacttggcagctttttctgtggaggacagacggccggccggacctctgagcacatagtgtcctgcccaccctaccagctcctccagccctgccgggcacatgcccgggggacgcctgccctgcccaggtggcctcctggcccgccctcacctctgatagactttgtgaatctgaactgctctactttgagaagatgaccggtttggagtaatcagaatgaaccctcctcctttttaagggttttttttttttcctttttctaaaaagctatgtatcgctcctattgaaagaccagatccttagagaagtttgtggtataaaaagaaagtggggacagattcgcagcacagagtcgctggcatgtttcactcctgcttctctcagccagctgtttaagcctgcggcgccagcctcacggagggccgtgtgacactctcgtggtatgtatgggagatggcagcagtgaagcagcagccaccagggagtggccatttggggttgggacagggagggtgttttgggtggcatagaggttttgtattgagggccagtgatgatgttttgatatttatttcctgctacttaaatttgaatctgagtgaattgtacctatttctgatgatgtcggtcttgcaaagcgacagattcataaagtaatgatgaaatctttctttcttcccgtgtgtatttctaagaaatagagccaactgattttgtatgtaaataccaagagcaatttacctggtactaaacccgcaccccagtgcggacccttcccagccctcatcccacttcctttcctactgtcctggaacctgtctccattgtgtgatccagccctggttctggctgtggtcagcagatcccagtgaagggttttgtgtgtttaggcctcatttctttgtctttttcctactccgttcctggcatttgctgatttctagtgtatactctgtagtctcagttcgtgtttgattccattccatggaaataaaaagtatgttgtacatactgccgaagaattgtcttgcaagttaaggcttccccctttactataagactataaataaaaacttattttatcctttcttggtggtggtgtcttcttacccttgttaaggccaaggtggttgatgagagacccctctggaagctgttagggcctcaatgtaagtctgagtgagaagtggaggtggcttacccggtcttgcagaaccaggagcagccataagccagagttgcttcccctttctcagctcagcctgagagagtaaatgggtggtgatggctttgttcattggatgaggcttttgaggttcaacagggatgtagccttagctgtggcaacatttctagatctagtttctgctaagcaagtgacctttgggggaattggtagcccagagctgtggttcaggttctcctggtaatgagtgcccagttcagaggtggctgttctccaggacctttcagtttctagatagttccagtttattaagaggaggcagcagagctgccaaggactggaagtcaagaaggctccaactgcaccgagttagctctactcagactgggacccaacaccagcctgaacttgtttgaccttggaagaaaaaggaattatggccagaacgcagctcagtgttggttttcctgtctggctgacaggaaatactgctgttcctagacccagagaggaagtcaagtcaaatcagttcttggatttgtcaccatctttagagtggtggagagcactgtggctcctatcaattgtatgtcaaatccgtaatatctttttttgtttaatgggagctggggcagatgggtcttgtcaatttgaaacatgatcaagcctccaaaggccatgattacattaaggaaaagaaaaatgctgggaaagcaagatcccatttataaaggcacttcttttcaagatagaggaaagaaactgcagtaaggaagaaatggaaatgagaatcagcttattgcctaaagccctcaaggttaacatgctttcctctttttcattgcccttaactatatctctttgtatatctgggcttaagtatacagttggtttgcttagtattggtgttagaagtgagctgtgggtgaagccatgttgatgcagagatggaaggcatgtgaagctggcacccagtagggagatagcaaacaggaaggggcagtcaagccagcatgaggacaggtggtgtccctgagagccagtccctggctccagtgtattggctggacaaaggattgagtttaggcttctctagatttcagtaaaccagttcagacaaggggcacagtggctaggtggctggttcacctaggaaaatccaaaccacctgattgacatggtgagcggactttggcacagggtggaggtaccactggaagcagcttcctgggcaggaacacagggcaggggagctccgcctggaaactgctcagctgaaaaggccaagtcaaagtcacagccaagcaagccccttctggtatgtgtgtctaggaagcgagtgtgagtattccctcaggataccaaagtcggaccatagcttactctctcacagtaatggtaatctctggtttattttttatattactctggacactcacttacacaaaaccagataagctgtagatttgcttggtcactgtggcaggtggcttcactgaggagtctgttaagcgtgctatttccctacctttacagttgccccaagtgcaagggtatttaaaatggcccagtttttaaagttcttgatacgctaaccccattgtaaaacatcaacaacttcttaggtaaagaatctaagctcacagagctgtcatcttagctgagacaggtttaaaaaacaagactgagtagacaataggagccagagccctgaactgggactgaagtaagcagaattctgtttctgatagtatcatgtgtgttttatgcttggcctctgaaagcagactggctgggttcacagtcctgtctctgccactcggtggctgtgttacttctcccagcctcagcatctttatctataaaatgaggataataatagcactagcctcatgagatggttatgaggcttaaatgagataatgcttataatgtgcttgacctcaggaccaagcaagcactgaggtgcctctgctgtcattatctacacaaagcatgtaaccagggctgactcagcaaggtggaaaaagccagctcccagacacctttcctaaagtgagtaagggttgacttcttggtatatcacaaatgcttcccactcctcagagatgtgccccatccttaccaggcacagtgactaaagagagcaaggtgacaccaggactggactgacaaactcttcgagactaaagcagcccctgtgggtacattaattagatctggtgtcaactcgagtgaggctctgcccattccctcccaccacgattcagtggcatctctcaggtttggacacttttggaggcccaggcagaactgctcagaagccccatgtggtgttactcaaagtgggatccttggatcatgcccagggctgcttgttaaaaggattcctgggctctaacccctctaatctaaagtgtgccgtggctcaccagtcagtttaacaagctctttcaggtggtcctcaagtcactcaggtttgactcccaacagtaatataacccggggaaccaaaaggacgctgttggggaagttaggcacagctgagctgaattagcgaagtggttctgaggtcaggatgaaggtgggggaggcgggcttgttaaatagttcaacccttagagctgccttgatgagtctacgtgctcccagcatgcctccaatgctctagggggctggctgagctacccagtttttaaacttgagaaggaagaaagctgagggctgcctacactagcccctttagaagccccaagcaggggtaatgacatggggcagcactcatttctgtagcatgcctaggctggcctctggtccccaggcaggttttataatccagccagagcaagggtctctctcaggcctggtcaccaggatgcattctcaaaagcctctgggaacatgaaactagagcattcctttcttcaaaactgtttctctagcctgaagaggaaacccaggtaggaaaaaagagtttgtcaatgtctacactgctagatagcgaatagagaatttccttcagtgtctagggtttactagggcagcggctaactcatacatccccaaagttcccttgggaagggaataaaaaatagtttctagttaacttcctcagggagaaaaccaatttggctaagccaggcttaactataggtaggactgggtgactgcaccaggcaggcctgtgcatgggttttggaggctctcctggcaaacccttatcaccctgctggtaagtgttgtccttgcttggtgtttcattggggtcggtgttgggaaggagcccagggagcttcagaatgactgccagagcgggtagggctaggggctctgagcccgcctgtctggactgccatgccagctacaacccttacctttggggtgacattgctctggcttcctgtgccattatgtgaggacaataatagcaccaagtgccattgtgaggcttaaaggagtgtgagaagcccatgaattgttcctggcatttaatactcaataaatactgtcaaatcttagatgtgtctgccatcagatgtcctgggtagtgcagccattttttagttttgttaaaatgtggaatgaagctgggcgcagaggctcacacctgtaatatcagcactttgggaagccaaggtgggcggatcacttgaggtcaggagtttgagaccagcctggtcaatgtggtgaaaccccgtctctactaaaaatacaaaaaaattagccgagcatagtgttgcatgcctgtggtcccagctactcgggagactgaggcaggagaatcgcttgaacccaggaggcagaggttgcagtgagccaagatcacgccactgcactccagcctgggtgacacagcaagactccttctcagaaaaaaaaaaatgtggagtgaataaactctccttttcgctgatgtaataagagtttagtatattaaaatccttgaaaggggaggtaaatgtatgttgaatgctaaaaggcagtaaaaatttgcatgttttctgaaagaacttgagcaagaccacaaatctgttaccttttggagaaaaaaaaggagttgaggaatgaaatatacccttgcaggctggctcagagccattaaccattaacatactggcgactttgccctgttcttcattccagtttcagtttgcatttctgcagtgccgggtggcaggcactgtgccaggtgcagatactgcaagtgcatctggtgtctgccccgtgtttcttgcccagggctggttatgacagtggtcagccatcgtttttcagccttccccttcagggaccccttgagcagaatctgcctggtgggtgaggtggagcagatgagcctcatgactgggccgaggggcccgcatgctctagctcactctggatcccatgtgcacgctcgcacacacaacacacccagcaggatgggcgtgtctagaagaatgccgagcaggtggccttggacaattcacaaccagccgagcaggtcccctcctgcgccctgtgctagatgccagctgccccagcaggcctgttgtgactgccaggccccatttaggattgttttcctttgctgtcctttgcagggtggggctcttgtatacccacagcctgctctgggcaaaattatgtagcacggtctctgctattaattttttccagtaaattaaaggctagagaagaagaagaagaaaaatcaaggatccaatattaagaaatctgagcccaaaccttctactccagtgctgaacatggtgaaggattaagcctcctatcaagaaaaacaagcctgacagcctgtagactgatagagggaggtgtgccttctctccagaaagcctacttctgcaggaacccaggagtatggaatgagccatgcaaagtctgattcaaaaaataacccaatgggcatgcacccccagtcactcatccggaatccggctggcagcctggcagcccggcagcccatggctcccatgcacagtgcttgagagcttcattgtttcctgtctgctggtgccatcaacagctctggggtggcaggggcagatcttgggctaaaggacagtggccaacagctttgggccaaaaggccacaacaagaccagccagctaagaggaggaatgtcatgtccacagcgaatacctactgcagcaaggctgtaggagactttggagaggaaggaccctgtttccaacaacttgaccatgtttcccatccagggacctctgtgcagagagtggtggtgagcaagtatttccaactgggagcccccacagagtcagtggctggtctgtgcacttgttactggactcctagcactgtgcttggcttgtggtgggtactctacaaatgctgcatgcatatgtgcgtgtgccagtggactccagccttgtgatgtaccttcatctctgtgcccttgatagggcggttccagggttgcctctgcgtgagttcaaccctcgggtatttgagcagcacgtagcctcagcccagcattgtgctggctactggggcaatctaggcagcttataaaggctgggccttgccttgaagaagcttagagatgaggttaggcatttagcacaaatgcacgtctgggctctgaatgccagaggagttcaggagatgggccctcagtgagagcggtttggcactatgggaggggcagggccaccaggtcatcgcttctcaagctcttgatgggctctccttctgtcctgcccacaagagcccagccttgggctccccatctagctgtccagacaggctgggggtggggggctgttggtgaagggagggtgggccagagccatctgctctgcacaggttgggtcacgattctattccaccactttcactggtcccttggtatccaggcacatggcagccactgctccagagagtgaggagaggggctggggggatggagcctcgcaaggagcatggacacctagcacttacgtcatcaccatcggcatctgccttacctggctacctctctgttcagcacacctgggagcagcacccttgcagcccttctcccttgacagagctgtgacattgaaccctgccctggtctggtagctgagggcccagcctccccttgcctcctttgtcccatcagcccaggccatcatgggtacagaaggtagcaatgaagtctcacactcggggtaaccaacatgcaatacttatggaaagactgtgtgatcaagggttgagagaatagtatactgaacccaaatgtacccattacatagtgtgaacaattatcaacatgcagtactcgttgaaagaaaagggatgataaaaatgcactattattgaaagtaagaaagtgtggggtctgttaaacagacaaaggagcccactgagaaagctcccaaaggccaaaactgcaacaatttgagcaacaaaataaataatgtagcattggaacataatatgaagtataaaataaacgagtccatagtgaaagaaatggttgaataaattgagaataaacatctcccatgtagaattccgggtagtttatgcaggtgctctgccttcaaacatatggagcataactccccacttctgtttgttgttttgagacagagtctcacgctgtcgcccaggttggagtgcagtggcacaatctcagctcactgcaacctctgcctcccaggttcaagcgattctcctgcctcagcttctcgagtagctgagattacaggtgtatgccaccacaccaggctaatttttgtgtttttagttgctatggggtttcatcatgttggccaggctggtctcgaactcctgacctcaagtgatccacctgcctcagcctgccaaagtgctgggattacaggcgtgagccacctccccacttcttaagcgtggactgcatatagtagctaccttctaaaggacacattcaagaaagggacaaaaagtaaccttatggaggaacctgacaaactacctcagccaggcgatgaagggtaacatcagcataaacatgatgaagcaggttgatagtatgtatccttgatgtgtgatgagaatggtactttacctctgtggccttcctccaaaaaactgttacgcatggtctgggcacggtggctcatgcctgtaatcatagcactttgggaggccaagggaggatgattgcttaagtctagcagttcaagaccagcctgggcaacatagcaagagcctgcctctaccaaaaaaaaaaaaaaaaaaatgtaattagctgcacatggtggtgtgtgcctgtggtcccacctactcaggaagctgaccaggaggattgcttgagcccaggaggttgaggctgcagtgagccatgatccactgtactctagcctgggcgacagagcaagacactgtctcttggaaaaaaaaaaaaaaacataaacccatctagtcataaggataacatcaaacaaatcccacctgagggatgttctacaaaatacctggccatacttttcaaaactgtcaaagtcatcaaaaacaaggaaagaatgagaaaccgtcaaaaccaagaggagtctaaggagacatgagacatgacagctcagtgtaatgtagtgtcctgggtgggatcttgggacagaaaaaggccattaggtaaaaactaggggaattcaaataaggtatggactttctttagtaatgtatcaaaattggttcattcattatggcaaatgccacctattagtggaagatgttaatagggaaaactgactaatgggtctgtgggaactctgtgtactatctttgcaatttttctgtcaatctcaaactattccaaaatgtttattttttaaaatgctttttttttttttttaagacagggtcttgctgtgtcatccaggctggagtacagtggcataatcatggcttactgcagcctttacttctcaggctcaagtgaccccccatcttagcctcccaagtagctgtgagcacaggtgtgtgccaccgcatccgactaatttttttttttttttttaatttttgtagagacagagtgtggctatgtcgctcaggctggtctcaaactcctgagttcaagtgatcttccagccttggcctcccaaagtgttgggattacagtcatgagccatcacacccgaactaaaaaatacattgtttttttttttttttttgagatggaatttcactcttgttgccaaggctggagtgcaagggtgcaatctcagctcaccacaacctctgcctcctgggttcaagcgattctcctacctaagcctctaagcctcccgagtagctaggattacaggtatgcaccaccatgcgcggctaattttgtatttttagtagagacggggtttctccatgttggtcaggctggtcatgaactcccaaccttaggtgatctgcctgtcttggcctcccaaagtgttgggattacaggcgtgagccaccacacccggccatgcatttttcttattgttattttgtaagcgctgtatttcctcagggggagcagagggcaagggaaagtttccattaagctgggctaatgatgagcgccctgtccctgccctgcctggttttgttcttggatgtgccagagaagcgggagggaggaacgtgaggccacctggccccagttccccagctggtggaaaacagaggcaaggagggttactgcaggaaagtgtgaggatgtgcaggaacctgttagatgtgcctgggccaggttggagaaagctggctgctgtcaggtcagctcctgggaagacggactcatcacggcctcactgagccacacggcatcacactgcactggtgtggccacacacttggtggcaagtggagacctcattagaagggtgaggggcctgccctatttgctgtcaccatccctgacctagtgacagatggcagctggtattcagggcctcagccatccagcctagaggtaaaccaagcatgtttcaccagtgccccctattccccgagacctctcaccttccttcagaggcctgcggtggtggaagggcatgggctttggaggcagcagatacgggctcgggctcaggcaccaccacttgacagctgggaaaccttgggtgatttacgtaagctctccaacctgtttctccagttgtaaaaggcaggtaatacgcctgcttcacccaccttacaaggtgagtcaaggatcaaatgagaggcggtagaacaggagggactgtcttaggggttattgtttgggcagatgaggcaagagtggtcagcactttttaagcagcaggtaaagccttggtcttggggctaattggtggtagagttttgtatatagtcacgccacatcatgttttggttaacaacagaatgcatgtacgacagtggtcccgtgagatcataatactgtatttttactgtaccttttccatgtttagattcacaaatacttaccactgtgttccagttgcctacagtatccagtacggtgacaagctgcacaggtttgtagcctaggagcaacaggctaccccatctagcctaggtgtgcggtagggtaggccatctaggtctgtgtaagtgcactccatgatgttcacacaacgacgagatcacctgactgcttttctcagggtgtatcctcgtcattaagtgacatgactgtattaggttgctttcagttgcaggtaatagtaagtccaactcacattgtctcatataactgaaaatccagaggccacgtgggcctcgggagccatgtgatcagggccatgtttctcagtctcagagcatatgtgtgtgctggcttctcacgctggtttccttctaggtagaaaaatggttataggaggcccaggccacacattctaccatcccctaataggaaagagctgcttttccccgtcatacagtgtccacgacgtctctctctttagactattttaggtcacatgcttgtgctctgaattgatcactggggcaaggacaaatcatgctgactgacttaagcctgagttactcccaacctgaacaaattactggggcaaagagagataaatgaaaattattggcttagccagtcagggcctgggcctggaggtaggagggcatcaagccctggcaaaccttttggctgccacaggtggggaggagtggcatggatgccaacagtgtccctacaggcttctatcccagtaatcactgtttgagagcaatggccatttgcctctctagcatccatttacccctttggcaacaatcctaatttgcatttggagctttgttccttccccgttcccaaaaactacgtgcttctaatgaagcctcatttccctctcaagggagaggcatgtgaccaagactttggccaattggtgcactgtattctccaagccattggactgcttcttggaaaggcacttggtttgattaaagccagtgaaacacaatgatactcgctggaaggaaggctggggtggaaccaagtgtgcctgtctgctgaacctgaccccaacaggatgtagggtctggagctattggtgctgccattttacaaccccatggagagcctgagattgaggctaatgtagaaagatggagggagggtgaggaacctaataggaccagcctaattcctggactctgcagtttgagtcaacagattgcctcttttgcttcaaaagccagtttgggtcaagttttctaccagttgcaatggtgtcttaaatcatattatactttccttcctattcaaaggcagtaaatgccaccaagcagtgcatgtgggcaactagaatgcttggtccaatccttactatttgtcacttgacactaatattacatgaaaagcatcccagtcatgaaaggtatggaagaatgctcaataataccaagaagggagagcagtgtggaactattgtttactggtattattatctcaggggtgtttcccctgattatccatgaggttctctttatgctccgctccctgtagggtctggcaggcttcccaacttatctggtgttcaaggtgggcctaagggtgaaactggagcccacctggatacagagatctgtattagttttgtgtttattgatgggagaaagtatttggggtcatccaccttgaatgctacataaatgtcttctactcaaggagtcacataataaatctctccaaaggtgcggtggctcacacccgtaatctcagcactttgggaggctgaggcaggaagattgcttgagcccaggagctcgagaccagcttgggcaacgtggtgaaaccccatttctataaaaaatacaaaaattagctagctgtggtggtgtgcacctgtggtcctagctacttgggaggctaaggcaggaagatcttctgagcccaggaggtcgaggctgcagtgagccatgattgtgccactgcactccagcctgggtgcatttgagcaagatcctatctcaaatgagtgaatagacaaatctctaggactcaccttgagggctgtcaggaaaccctctggaaaaggatgtctcatggatatgccagtgtaaactctcctgaaataaccctttctcttctctacccagactaactttacctaccctttggggcccaactcagatccctccttcttggtaaaaagccagttcagactgaagcaatcccttctattaaccacattaattattactgcaattaatctcacaataccttgaggctccgagtgctgagaggattttgccttttgttatagtgatggaaaggatgcatttcaatatgttgccttgcagtgcaaacctttgttaacagggcaaaaatagcacagggggcaggaattacattcctggatgtgcatttggcttatttacatggatttgggtgccctctaaggacaccatcttctctcccctccaagagggtcaggccacaggacatccatgttcttggcctcccatgggagagggtctctcgccagaggaagggaaagccaagtggccacagagttccagcctgtccctgtgacagcccctgcctctggccagacatccacccacccttgctaagtcagcctgctctggggctactaggcccagtccttgctgtctgtcggagacagaccatgaagtgcagtgtgtggagggctgggacatagcataccgaattaccccagggagcttggaaaacatctcttcccactctctgttaggcccacggcttcctctactggaggagacggcatgtgaggatggaactcggtcattcctctgtcaccaccgatgtgaacagtctggaatcctgcacacaggagactgacgatccctgagcaacctttagtagctcctaccattgggcattttcttggtacagatcacaaataagagacatcatagaaaatgttattcttttattatttcaaggaggtaatacatagcccaatatggcaaagcaaaagggaattagaggcagcaaatggccaggtttttctaagcgcctcatgctgcatctctgagctcctgtctgcccgcagcccacagctgcttacatgaaggccaggtcagtagacagatggcccaacttgatactccactgactgagaaagggctcaatgtgcagcacagcagaggcactgccaggacccagcacgctgggcggcaccccacgctgccaccaccagctacagaggctagtgccttagtagcagccagtgtgtctagcacttgattttattcctgtgagcctagagtgggcaggacgtgaataaatcctgagtcataagttaaggtgaaagacttagtagtgttaatactcttggtgagaaaagacaacacagtcttggaggagagtgggcttggagtctggtggaagaaagatagaaacccccagaagggcctcggcctgcaggcactgccttgaggccatcagagggggttttcacggtacatgatagggaggagtgaggcaggtgggcactggagggctgtttcctctggcacagttgaactagagggtcactttccactcataattggtttcctaggtctaagtcaccacacctggggctgaagcaagtcttgcctgtgcaccaagcgtggccttggaccctggagagatgcaaggctcagttctccagtgttgaagtggaaggactcccaactgaaggagatctttctctccccacctccagctcttttcccttacaaatgaccagggtgcaagtcgagaggcagaggcacctcctggtgcaactccaccacagtcttacagagaactcatcttggtgggacccaaagcccagccttggcatgaagcagacttattccacccatcggagggcacccagtctggtgactgaatggtggcgtgcaagtgggagtcagcagtggctctggatgccgtaatactcagatgccattcatctctgtgtgatcgtcctggctggagagctggtgaggagggactgcttcctcctggcatgcactgttcaccaaccacaccacgtgggctgatagatttttggtttgacaggtgtggaaagaatttttaaaaccagccactgtgttctccaaacccagagccattggttttgtttgacaagaaagtaccaagagaaccacagctccactgaggctaaggcttgtgtagcacagaatgcagtatgtattgaaacgtataaaccttgtctgactggggagatgggtgagcaaagagctgccgggacccaggtcctctagtcggttgcaggctctgccgatgtctcatccttaagctcctcaaaacctgggactggcttctgtagaaagtatgtagtggcctggatcaccttgtctggtccaatgttgtacactgggtgagtgggctgctgcaaagagaagaaaaggtgccagttaatcaccccggtggtccttgaaaacataacacatcctttgctccatgaaaggcacttctaagaatttagtataaggaatcagagatacacacaaagcccaaaggttcaaaaatggtgtatttgctaaaactatctagtacatgggacacaggttaatatacagccattataaacacgcatttaaatatttaacgatacaggcaaatacttacaacatattatgtgagaaaacagtatgtacaatactatctcaaactgtttttttttttttttttttttttttgagagagtcttgctctgttgcccaggctggagtgcattgacacgatcttagctcactgcaacctctgcctcctgtgttcaagcaattctcctgcctcagcctcctgagtagctgggattacaggtgtgagccaccacgcctgggtaatttttgtattttttttttttttttttgagacggagtctctcgctctgtcgcccaggctggagtgcagtggcgggatctcggctcactgcaagctccgcctcccgggttcacgccattctcctgcctcagcctcccaagtagctgggactacaggcgcccgccactacgcccggctaattttttgtatttttagtagagacggggtttcaccgttttagccgggatggtctcgatctcctgacctcgtgatccgcccgcctcggcctcccaaagtgctgggattatttttgtatttttagtagagacagggtttcaccatgttggtccggctggtctcgaactcctgacctcaggtgatccacccgcctcggcctcccaaagtgctggggttacaggtgtgagccaccacacctggtctcaaactttttaaaaagtgtatttgtacctgtgatgtatataaatagcaaaaattgtacccataccaaaatattaatagtgatatgattgtttttcattttcttttttatattttatgtatcccaattattaaaacaataaacatgtatttacatttataatcaagaaaaagggggccggacgcggtggctcatgcctgtaatcccagcattttgggaggccgaggtggatggatcacccgaggtcaggagttcaagaccagcctggccaagatggtgaaaccccgtctctacaaaaatacaaaaattagccgagcatgatggtgagtgtctgtaatcccagctagttgggaggctgaagcaggagaattgcttgaacccgggaggcggaggttgcagtgagccaagattgtgccactgcactctaacctgggcaacagcgagactctgtctcaaaaaaaaaaaaaaaagaaaaaaggaccacaaccctaatatgtagtaaggctgtcagatcatatttaaatatataaacaaaatttaaatatgaaatttaaattaaatagatgttattctagtacatcacagaaacccaaaagaaactttagatttgacacggcataatcctaggccaatattcaggattctcccactgtgggataatgaagaaggggacacaactgcaggagagattttaaaaattttgagagaatactaggagcaacctcatgctgaaacatacaaaaattcagataaaacaataatttttaaaaaccaggaaaactgccaaaattgacttaaggaatttttaaaggcctacatgaagaaattagtaacaacaattgcttattctgccacccccacataccttaaaagatactagacctagatggtttctcaggcaagtagtatcaaacctacaaagaaacagataatctctgatctatacaaaccttttaaggactgaaaaaaaaaaaggggctagtgcgggggccaggtacaatggctcacacctataatcccagcactttgggtggctgaggtaggatagcttgaggccaagagttcaagaccagactaggcaacatagcaaaaccctgtctctacaaaaaatttaaaaattagcaggttctggtggtgtgcacctgtagtccctgctacttgggaggctaaggcaggaggatagcttgagcccaggagttccaggctgcagtgagctatgatcacagcactgtactccagcatgagtgacagagtgagatcatgtctctgaaaaagaaaagaaaaagaaaaaaggtaagaggtgcaggaagctacccatttaattttatgaggctatgatattatcctgaaacactggaaaaggacaatacaataaaattttagatcaatctttcttatgaatgtacatgcaaaaaaatcctaaataaaagtactaggcaaacatactggcaaactgaatccagcagtatactgaacaaaacacacagacacagacacactgcctctactatgaccaagaagggcttatcctgggaatataaggcttaacatcagaatattaatgaaacatatcatattaaagaagaaaaatcagatgcggagaaagcattcaataaaatttaacactaccttatgactgaaactaacaaaaacaacctagcaaatcaggaataaaagtgaatatcactaacttgatataatgtaactatcacaaccttacagtaaacatcatgcttaatgatcaggttataaaaagccttcccattataatcaggagcaagagacgaatgccctctactacctttagtcagcactatgtggggatcttacccaacaatacaaggcaagaaaaataaaatggaaactaacttagacaaacttaaaactattaaagagttcaacaaggtggctggacacaagatttataaatattattagcatttctatacactagtaacaaacagttacaaaactgaaaataagaaaagattccagtcacaagagacatgaaaactgtaaattagacataactctaaccgaaaaaaaaaaaatgctagtcctttatggaaaaaattataaaaaaaacactgaaagacattaaagaaaagaaaaattatgttcataaatggaagcctaaatattgaaaagaagtcagttctctttgtactcctgggaagacaggaagaaaaaaaaaaaagttggttctctcctattaatctaaaatgtagtgcaattccaataaaaatcccattagaacttgacaggctgatcctacaattcacaggaaaaagcaaaaggcaaagaatagccaaggcaattttgaagaaaaacaacaaggcagacaggacttgcctacctgttttcagacttgcttaaaagagtgcagataggcaaacagaccaaaggaacaaaataagagagtccagaaacagggccccttcatgtatggaaacttgagggtgtggtacacatgagatacacatcagcaggaaaggttgtagacttcagtaaatggtgctggtcaattggttatccatatggaaaaaagataacattatatccaagcctcaccatacacagaaaccaaatccaagagaattaaaaatctagattaaaaaagcaagctttagactatttagaagaagttacacttaatgacttgctgcattgccttgttcattcccttcatagcacgcatcacaatttgtgatgtatttgtttaatgtgtgcctccttttgtctgcttccctcaaaaaatggtagagattccttaagttaatcctcacctaccctcccccaaaaacaaacccctgaatgacagaaaagacaaatagatttgaccacttcaaaattaaaatattaaaatatttttgtggggaaggggtgctgggggcagggtctcactctatctcccagactggagcaaacagagctcactgcagccttgactacctgggctcaagcgattctcccacctcagcctcccaaagtgctaggtttacaggtgcgaaccaccatatctggcctaaaatcttctatttaacaaaaaaacaccaaaaacaaaatgctatggtttggatgtggtttatttgtccccacaaaaattaatgttgaaatctgatccccaagatggctatgttgagaggtggggtttgtggaatgtgtttgggtttgaggggtggatccctcaggagtgccttggtgctgttcttgcagtagtgcgtgagctctcactcttgctctggggagtctggattagtccttgagggaatggattagttcctgcaagggtaggctgttataaagccaggatgctctcaggctctcctctgtttgcatgggttggcttcccctttgatttccacatgttataatgcagcacaacccttgccagaagccagagccatgcccttgaatttctcagtctatagaaccatgagctaaataaacctcttgtctttatacattacctagtctcaggtattctcttatagcaatgcaaatcagagtcacaaaatgaaaagacaagtcacaagctggaagatattcactacacacatgtaactgatagaagattagtattaaaaatatacagagaactacaaatacttaagggaaaacaactgaagttacccatcagtaagaaaatgagcacagaatatgaactggcagacaattcgcagaagacaacacaaatggccaacaaacatttgaaaatattctcaacctcaccagtaatcaggaaaacacaaaatcaaacaaataccacttcacacccatcaaattggcaaaaaggaaaaggtctgactatggatcgattcatcttacacaaccacactggggagcagttacagaggtatctatcaaagatgacaatatgtgtccccttcaacccagcaggtcccctcctggagacattctaacatgtgaacccaatgagacagataccacaacgttcactgcaacactgtaatagcaaaaaattgataactagcaggagaacagagaaacacactggggtacatttatataagggagtatcatataatagttaaaatgaataaactggagcaacacatgtgaacacagataaacctcaaaaatacaatggcaagtggaaaaagcaatgcagaatgactggtacagtaggtaccattacaaaaagtttgaaaacatgcaagcaactgttatattgcttataaaaaactatatattgcttatagatacatatgtatgtagcaatagcacaaaaacatccacaggcatgatacatgtcaaatttgggacagggttacctctggagaaggagggaggaaaaaaaactggaagagggctacataagaggcaaatagggggaaataattagggcctggaaaagctgggtggtggtttttctgattaagaatgaggttgagcatcttttcaactatctattggccatttgtgtttcttccatttgaaatgtttcccaattaaaagaaacaaagatggggccaggcgtggtggctcacacatgtaatcctggcaccttgggaggctgaggcaggcatatcacttgaggccaggagtttgagaccagcctggccaacatggggaaaccctgtctctactaaaaatacaaaaattagctgggtgtggtggtgcatgcctgtaatcccagctactcaggaggctgaggcacgagaattgcttgaacctgggaggtggaggttgcagtgagccaatatcatgccactgtactccagcctgggtgacagagtgagactttgtctcacaaaaaaaaattaaaaattaaaaaaaaaatttttttaaacaaaaaaggaaggttacaatgacacagatgagaaaataaggcagtgacctagatggtagcagcaggccatgtttacactggtggaagtagggcttagtaagagtagggaactgcacacaaaaattcatgacagtctgcatgggccctgtgatttgatcactggggacagtctccattggattcatgtccaggctcacgtctaggctcagagcacctccaggttgtcctcagctggctgcagcagtgagcatcctgccctcatagggctattgttttttcaggaaagcagacaaacacacattaaacaacacaccaccaactgagtaaagtactacaaagaatatgaacaaggcactgaggcagagcattctggggatctcattctctgaagagatggcatctaagctgagcctctgggagagacgcggcaggctgtacagccagtgccgcatggctgcagtgctatcacgagcctgctgggactcacagcctcagagtgacacgtaactgtggcctcctctaggggaagctaataccagcagtgggctaggtcctcagccctgggataaaggcacaacagctctttgacagatcagaccgcccatctggaaccctgagcttgcccagaggtgcgtctcctctgtggtcacatcctcactaacggctgcacagctcgaagggcagagggaccacaagcttccgcctgtccacacaggaaatgcagagccagttctgcttacttggaaagccttctgtccgcgaggtccctgtggagaaggggtgtgaagccctgcacccgtcttaccagagcgttttcgggcacacccaggaccacatcatgcaacatggctccgctgccgaagtgctgggctatggacaggccgctcaggcagtagcaggtgtggtagaaatcacgcgacctgtaaggacaggcagctctgagcaggcgctcctctgctccgcacacatctacaaatgtagccacaccaattcagagaccactggtgcaatcacacgtccccccccatcctccatgtggctagaggaggcatggttttcccagcagtgttatttaaagccccactggctgagcacagtggctcacacccataatcccagcaagcaggaggctgaggcaagagaacggtttgaggccaggagttcaaaaccaacttgggcaacatgggagaccccgtctctacaaaaaattaaaaattagctaggtgtggtggccgatgcctgtaattccagttacttgggaggctgaagcaggaggatcactcgagcccaagaggtgaaggctgcagtgagtcatgattgtgacactgcactccagcctgggtgacagagtgagaccctgtctcaaaaaagtaaaatacaataaaataaaagccccatcctccagccctgcccagcagtgggaactgtattttttttcttttctttctttttttaccttaaactattaaaggaaactgtaattttaaagtcagtctctccagctgtcttctggaaagggctctccaggggcagtactaatgataaattgatacacttctctagaaaaatacctaaatatctagaaatgggccacatccttcctgatacattgtgggaccaggccttcccctggatgccaagagcagcaggacgtgtgctgggatgggggaagacagagggtgggtaacaaaggtgagaggacttattttatttccctttttctaacacataagccatctcagatttgagcttaatcatttaatccactctataatagttgtcatgattacagtctctgtttacaacactgaggggttttaaaatcctgtatcctattctatttagatcagtttttttttgttttttttaaaaaaaagaagagttatctacccagcaatctgtttccctgtctgggggagggggttgcatgcaggctgggggacaagacgggcagctggaggtgccaagatcaatggcctcaaggggtgctcccaactgggtgctttttcccatacaacctagcgctatgcaggtgctgaaggtgacacctctgctcttgagatctggctctgagtaggcctgaggtgcacgcccctctgctctctcctcccctctcccttccctccccagagagaaaacactcacttgccaggtttatccagaagcccccccgcagggcactggcagcacatcaggatgtactcctgcagggcctgctgatggaacatccagtggctcatgctaagggcagggtcacctgttgaagggcaaagggtcagtaagggcccggcagatccagccaagtatcaatgacctaattccactttctcacctgggggaatagtcaaggtttcctgctccccttcctcttccattcattcttggtacaactgctatcttccccatgtcctacgcacagcatgtcccttctcctgaactttgacatgtgtcaaagagcagcaattcaaagtggcactttcactttcttgaaatgcaccctgttaacgtggatggtgatcctcaaccacatctctggcaggcagtgaaccagcctagctgtttagcttaccttcccagactgacctcggtagctgctcccaacttggtccataactctaccctggacttcaagagacattccctctagcatatctctataacttgttaaccagactgattagctcagagaactcttaatgggtaataaagtctgtttcttctacttttctaagcctaaatttaattgatctccaaagggaattctctaacttgtctctcagctcaaagaatttacctaagaaacattactagtaactgccctcctgcatcatatgataccctagcaaaaactgggtattctggtaatactactaaggtactgacaagcaactggacttcttcactctgaagtccaatcactatggtcaaagaattctgtgggccacacagttatcaagtgggaaggagggacaaatcacggacaggtgtgcagaaacatctgcatagaaatcgattaaaaatatatatacatataggatgtacactaagtccttggtcaattttatattttgatacctgggctaaaagatgcctgacaataaatcatttttaaaaaaaagatgcccaacaattggtaaatggcacctgaaagctaattgttctttcttccagtctttttggttctatgcgtttttctacctagttattataactgtgtagcttatgtttttcacttataccactataggcataaattttctattctattacataatctgcatagccatcactgtgaatagccatatagtatttcattaagtggacatataaggtaactgtatcataaaaagaactgagctaaaaatcttatatatatgtcagtatataaattcctatggtgggccaggcacgatggcttatgcctgtaatcccagcactttgggaggctgaggggggttgatcacgaggtcaggagatcgagaccatcccggctaacacggtgaaaccctgtctctactaaaaatacaaaaaaattagccggacatggtggtgggcgcctgtagtcccagctactcaggaggctgaggcaggagaatggcgtgaacccaggaggcggagtttgcagtgagctgagatcacaccactgcactccagcctgggcgacacagcgagactccatctcaaaaaaaaaaaaaaattcctatggtgaaaattataaaagtttatggtatcaataacctttcccattttggagaaaatagcaaaaaagaaaaacgggggaaaagatttctaaaaataaaaatgaaaagtttatgatacagtctataaagagattgaagcaaaatattaaactgttgaatatttcctttttttttttcttttttgagacagagtctcactctgttgcccaggttggagggcaatggcacgatctcggctcactgcaacctccgcctcccgggttcaagcgattgtcctgcctcagcctcccgagtagctgggattacaggcatgcaccaccatgcctggctaattcttgtatttttagtagagacatggtttcactatgttggtcaggctgctctctaactcctgacctcaggtgacccaccctcttttggcctcccaaagtactgggattacaggcatgggccaccgcacccagcctaaattgttgaatatttcaaacagacaataagaatttattaaatttctttaaaaagagacacagaggaaaagggtttccaaggttgagcactaggtgagggacagtggccaggtgacatttagaggccagggacaaaagcttctcgtcttcaaccctgagtcgcactcagccctgaaacacccattaagagacacaggaaactaagtccgacctaaggagaagcatccaatctcccatctcaggctggctgcaggccacatgctttgatacacttgcactattttaattcccttcctttcttttcctcacctgtaagcacagtgaactttgttgtagaagatacatacatatatgatgggacttcactctatcttcttttacttatttccaaggttgtttccagttccttgccattatgaggaatgctggactaaatctttgtcaatattatgtatgcttaagattattttcttcaaatagactgaccacggtggaattattcggttaaagggaataaacattgttaaggcttttaatagatactgataaactgctttaagaatttatagactactctcagcacaatccctgtggagtagccctgctctgcaggagctgtcaaaaataaatatataaataaactaaaaataaaaacaaagactttatatagctaccagcaaaatttaaaattttgctataccacctccagcattagcacctttttgttgttgttgttgagatgctatcttgctctgtcgcccaggctggagtgcagtggtgtgatctcagctcactgcaacctctgcctcccaggttcaagtcattctcctgtctcagcctcctgagtaccttggattacaggtacaagcccccacgcctggctaatttttgcatttttagtagagacagggtttcactatgttgatcaagccagtctcgaactcctaaaatgatctgcccaactcggcttcccaaagtgctaggattacaggcgtgagccaccacgcccggccagctttagttactttttaaaagttatcagcaattaaaatggtaaaaagaaatagtacctgatagtttattttgatttgcatgcctctgattactaattagggtgaaatttttccataacttgtgtttaatatttgcatttccttatgatggtgtctgtttggcctaatcttctgagatccaatagccaattttattaatctagctttttcttatacttgccccttgtctacatcatatgctgcatctattttctcctttttgctcctctgttttggttatgtgagtttaaaactttttaaaatttttaaaatttaattaatgtaaaacatatatatgttttatacttaatattgtaatcatactattgatttttccttcacgatttcctttttaagaaaatatttaatgtgtatggggatttttggggggatgagtgatgaaaatgttctaaaattgtcatgatggttcgcaactgaataggtaagttgtgtggtatgggaattatatctcaacaaagctattatttaaaaaagcatatttattaaactttaggaaactgcattacacatctgtacaaaatgtacatatatttcatatcctataacaaataaaagactattattataaggtaaatgataacctgtggctaaaattagagtctgaaaagaaaacgctatgtttattatataaaaaactatagactgtttcagtgacttcctatattattaaagcatagaagctcaaagttcaaaagctctacaaggagcttccagatatcctgaatttggacaccagcacacataatcacaacaagatgaaagcagatacgattatagggtgataactgcacactggaatccaccttttaaatcctttctacctcttcctgaaattataggtcgccattctaatctcattttgcatttcaaaggttccttttatctaaaaaaatcaaaagtctttccacaccataactgataggtgcagccatctgtagctcaatttcacaggtaggcaagaaaattccagggtatgtccaaaagaacatataagaaaccagtaactaccaagccaagtggaaactcacaggcctgctgctttcttattgctccacaaaacaaaaaaacaaagtaactcactgatttagtcagcacttgagatttcttaagccttttttttttttttttagacggagtcctgccctgttacccaggctggagtgcaacggcgcgatctcagctcactgcaacctccgcctccggggttcaagggattctcctgcctcagcctcctgagtagctgggattacaggcaacgtggcaccatgcctggctaattttttgtatctttagtagagatggggtttcaccatgttggccaggctggtcttgaactcctgagctcatgatccacccacctcggcctcccaaaatgctgggattacaggcttttgtgtttttttgagacaaagtcttgctctgtcgctcaggctggagttgcagtggcactctctgcctgcaacctctgcctcccagactcaagtgatccttctacctcagcctcctgagtagctaggactacaggcatgtgccaccatgtctggttaactgtttttaattttttgtagagacaagctctcactatattgcccaggctggtcttgaactcctgagctcaagaggtcctcctgctttggcctcccaaagtgctgggattatggtcatgaaccaccatgtccagcattttaaggtactaatagtaattccttcttctactcaaatactgtcatttacacatagaaggtagtcaatggcatggagccactgatggtcacttgctgggtcagggcatggcctagacccacgtgctgcactatgtagagcattctttttgctttttagttagcaatatgatcaatgccttttaaaaaatgtatttgtacatttaccaaaataaaattagtaatgcacatggtttttttttttttaaaggcacagtataatacagaaggatagaaaatctaaaaagttggccaggtatggtggctcacgcctgtaatctcagcactttgtgtggccaaggaaggtggatcacttgaggccaggagtttgagaccagccaggccaacatagtcatatcctgtctctactaaaaatagaaaacattggctgggtgtggtggtacacgcctgtaatcccagctacacaggaggctgaggcaagaaaatcaattgaaccgaggaggctacagtgagccgagattgcaccactgcactccagcctcagcaacagagtgagactctgtctcaaaaaaaaaaaaaaaaaaaaaaaaaaatctaaaaagtctccctccttctgtcttctgtctgcttctcttctcccaaaggtacccattgttcaaggggttttgtgtagggttccaggaaaagctgtgtacatctcgggctgtgtgcccaggcactgctccaggccccgcccccttacacttcatgttgtatcttgcagagctttctatatcagcccatggtatgcagctactgtttggagagatttttattatttaacccttaaccttttgataggcacttaggctgctattgaaactccacttcaatatacatcctttgctaatatccctgcaggtaaattcctgacagtgcacttgctgtgttcaaagggtaagtgcccttataatttaaatggatgtctccaaactgccctccaaaaaatgacttaacctatttacatccccactatcaaattacctgttttctcacactctccccaacatagggtatcaagttttttaatctctgccaatccaataataaaaacaaatagtgccactcttttgattagcatttcttttactacaagtgagctaaacaatttttcgttggattaatggccacctactgtggttatgagcagggcagggttcagatgccagctagtctggattcacacaaccacatactaacccttgtgagtgccaatcaggtattataaagcaatcacttaacctcactgtagtttgtttcctcatctgtaaacaatggtacctatttcatagggttgttttgagaattaaatgagaaaacatatgtgaaatgctcagtacagcccctggcatacagtgagggcttgggaagactccgctaccagtagtagtggcagttgtagtagaaaaagtaagaaggacagttctttcactgggacctctttcttcagatcctttgcctgtttttcagttgggttgtccatccatttcttactggtttgtatgattttttttcaaattaaagaaattagccattcatcacttgttataaatatttttcgcacctttttgcttgttttgtttgtagaatttccctgtttctgtaaaataacttttgttgtctttttttatgcaagaaatacctattaactatagaaagattagaaaatacaaacagaagcaaacatcacctgtaacttcacatcctagatactttctatgaattttttgtagtcaactcttcactaaaaatgggattccacacatattgctttgatatgatcacaatatattgtgactatctttctacactgcatccccttttgactcccaaagtcagtattttgccctcctttcaacacacttcccttctttacagactcctgtctgttccaagttcaagagatgccctgtgtctgagaagacaacacaggccttctcccagccaatgaaaaaagctggaagcaccaagattcataggcacccttttccatagacaaagctttgaatgccactaagccccctagaacatgtgctacaagaaacaattaaccagcagcccccctggaagactttgacaggtggtgctcctgttatagctcattccacatttccctgggattgcagaattactgagtcttatccatgccagggacaggtttgtaaaagactgaccattttaccaggggcttgacctcaccagttccaaataaagagatcaccatgaccccaagtttttttctatcttagaaatgttgggccaggcacggtggctcacgcctgtaatcccagcactttgggaggccaaggcggacagatcacctgaggtcaggagttcgagaccagcctgaccaacatggagaaaccctgtctctactaaaaatacaaaattggctgggcgtggtggtgcatgcctataatcccagctatttaggaggctaaggcaggagaattacttgaacccagggggcagaggttgcagtgatccattgcactccggcctgggcaacaagagtgaaactccgtctcaaaaaaaaataatactaaaataaaaaatgtttgacttggggaattcctgacttccctactggtggtcaaggcagagactgtgcaggctccaaagtcagtgcacttgctgacagtgcacttgctgtgttccaagggtaagtgccttatatgccttaatactgacacctaaagcccagtgggcccaggccgggaaaatgggacagaggctctgcttactttaattcagtgtcagaaatggtcacaactcaacaactcaaaggaaattaagaaactaaataatgaggctcagggccgggtgcggtggctcacgcctataatcccagcactttgggaggccgaagtgggcggatcacctgaggtaaggagttcaagaacagcctgtccaacatggtgaaaccctgtctctactaaaaatacaaaaattagccaggtgtggtggcacgcgcctgtagtcccagctactcaggaggctgaggcaggagaattgcttgaacctgggaggtggaggctgcagtgagccaagatcgtgccactgcactccagcctgggagacagagcacgactccatctcgggggcggcggggaggggggaagacggggggtggggggctcagaaacaggaaaaaaaagtatggggaggggcagaaaagaatctcatcttttacatttgagcagttacattatccaactaagtccgaagaacagcttctctttggacccagggatctcattccaaaaacagatcagcaaccagcagggccccatgacttcctctctcccacaggtctactcagagacacctgctctcacatcaagtacaccagaaagatggtgcaggagttagcaggcagactgaggtttcaagagatagagagagaatgttcccagactttttgctcactaactacttcggttttgcgttcccatttgagaccccacagaaacgaacgtggatttctctactccaatggtgcaggtggaacaaactcccatttaggcttattcaatgaatgtaaaataaaacatttctaatagtgacaactctgcagccagtcagacacggcgagtctcttctccatggtgtaggggcaacccacccctacaacccacccctacacatgggttctggttctctacccctttacgcagttgcctttcctgttgctgttgcaacagtgactgttgcaacactgagggttttcagctctgccctgcacccagaggaggtggcaatcaccacagagcccaggacaggagtgggctgctccttccagataacgcagaagcagcgcccacttcctccccgctccccgtagcaatttcaaggaagctcattctgtcgcagccaatttgaagaagcaaagaatgacactaaaccaatgaaactaaatcttactctgcattcgcatgccccacggcatgaggttccacactgggcactcaaaatccaggatagacagagctcatttcaacccctctaaaaaagcacgctgggcttccagactttgtgagtagtggagggaaatcatccagccccaagtgaacagctccccaggctcaccttgggcgtgcagtgcgcggtggagcaggggcaggagccccgcctgccagaaggagtagcagccatccaccagcttgttgcagcggccctgaaatcctccttcaaatcgcatctgccggcttgtcacccattgctgaggagacacagatgggaaaggcagttgtaggctaaaagagacaaaatccagcccgacagaatctccaggagtcaatctgtgggatggagggtttcccatcttgtggcttcttggcactctagttttggtgctctggttttctttccttccctccccacactgccatagacacagagtgaagcatttaagccaacgctgtagaggcatccagcactgatctctgctcaatgcctggcagacaactaccttttcctgggttccaaagcagtgccagtgctgagaagataaagaggccaagctggtttgtaaggagaccttcaaagtctcttaataaacatggcttaagttggaaattgaaggcaagactaccagtagctcatttctcattacttccctgctccggggagtttattaaaagcagataaatggaatttggtactacatttcttttttttttttttttttttttttttttttttgagacggagtctcgctctgtcgcccaggccggactgcggactgcagtggcgcaatctcggctcactgcaagctccgcttcccgggttcacgccattctcctgcctcagcctcccgagtagctgggaccacaggcgcccgccaccgcgcccggctaattttttgtatttttagtagagacggggtttcaccttgttagccaggatggtctcgatctcctgacctcatgatccacccgcctcggcctcccaaagtgctgggattacaggcgtgagccaccgtgcccggcctggtactacatttcatcagatgatctcaaactgctcctgacttttacttggcacctggggaaatttacccaaggtctcttagcaagtcactagcaggcctgaaagcagaagccattcattctaattaccaaatgacaactctgcccagtctgtggctgatataagaaaatcttttactttgaagctgtaaaataggtcttggtcttgatgtcactcagcggtcacacacgataccaccattccttgcttatctacaagttttctaaacacactctactacaaagatcaagatagtcatgggtttggtccctcagaatgagcagaaccaactggctgagcagatatgacatttccatttccctccctagaccacctaggccgttccagccacggacttacagagctgcctcactcaactgaaagggtacaggggagggtacttcctgtttctagagtcttactaggtaaaggtcctgaaaggagccactgggacccttgatggaagtgggggccagccctcccctaaaagctgttgtttagattattccctcttcaaggcaacacctgcccatagagagtcacagtcacaaatgcttaaaagagacagaaaacactgtactgcaggttcaggtactaatatatcctcggttgatcttaaatgaaccagggcttccagcatgtaatggaagtgggctaagcattactcaggcagagagaaagcaggcgctgcagtgggagtcggttcctcatttctacttaccgcagggcttaagtgtttttaagcagactaatttactttttccagtgcctaagcccatggatttgttctgtttccttgggctataggaattcatacttcagatatgggtcctacttctcccaaagcaaatggaagggagtagtctggattagagcaggggtccctaacccccagaccatgccaggctgcacagcaggacatgagtggtgggtgagccagtgaagcttaatctgtatttacagctgctcctcactgctcccattactgcctgagctccacttcctgacagatcagcagcagcattagattctcataggagcgcaaaccctactgtgaaccgtgtatgccaggcttctaggttgcacgctctacatgagagtctaatgcctgatgatctgtcactgtctcccatcacccccaaatgggactgtctagttgaaagaaaacaagctcagggctctcactgattctacattatggtgagttgtataattatttcattatatattacagtgtaataatagaaataaagtacacaataaatgtaatgtacttgaatcatcctgaagccatcaccccccgtcccacccccaaccccaggtccacggaaaaattatctcccacaaaactggtcccttgtgccaaaaagattattactgtgggttagagggacactaacatttattaagtacctactatgtgccaggctgtttataaatgttctctcctttaaccttaaaaaaataaggattgttatccctaccttataaaagaaaaaaatatcaagctaaaagagattagacaatttgcccaaggactcatgtctcaaatgtagtagggacagggttcaaatctagaacactgtctttataactgaggcactccctaatcacattccttatctctgcctgggagatgggacttttttgtttcatgccttattggtgttcagattttaaaacatctgagaaactcttaagttcagcatacaaagttggctgtttcagcatgagccttcaagccttcatgaatctttaaaaagactacaccgggggaggctttctgaaggtggaggcaagacactgctggttacatgtctacagggtacaacagaaactctccaggaagctcacgatgggccgcataacgggaggctggcatctgaactcagggagaggaggtgcatgtcagttgcagctggtttgctttgacgtcatggtcagggggtacatgctccccaaatgacatgacggggaatgccttctccctggtggccgtggaggtgtgtgtgtttgtgcacccactgatcatttaactacaatctagtgactccctgaagctgactgctttctgagtttcttctgaatactggccaggagcgtggggtccagacataaatgttgggctgccttctcaatgcaattagccagctctgcctaaacaactcatttaaatgtaggtactaaatgtttacacagtgcagcaggtaataaaagtttggtttcgaaatgctgcaaagctcttcttgtaacttttcctcttaggaggttctttctataacacacgataacctctaattctacgaaactgaagtataaggaaggtactctgctcacaccagatgtctgcagcacacagtctatgtagtctacacactatgtaaaaagctctaagcaggaagacagaaaggcagaagggggagccaagacagagcagctgctcactccttcctctgtgttggaacagagctaactctcttagcccttcccatagccaaactctcctgaagcctgcatgtctgagtacaatcacatcaccatgacctggggcctgagagggggatggctcaaaagatacttactaataagctcttcaagttcaaggaacgttccctcttgaggattaccagcgcggccaggccacagaaggtatagccaccatgggcttccatccctggtaccccgccaatgccaccttcccagttctgacacctaagaagagattgagaaaagcagaatgagtggccagtgagtggacgtacacaagaccaggaccatcctaggtggcagagaaaaagttcactcagattaaggtgtgaaccatcacaactatgaatgaaaagatgccaactaattaacttttggaaatgtcttttcaaaaaaaaaaaaaaaaaaaagctgggcctggtggcacccatgtgtaatcccagctgctcaggagactaaggcaagaagatcacttgaggcgaggagttcgaggctgcagtgagctatgatcacaccattgtgctccagcccgggtgaaagagtgagactaggtctccaaaaaatgtaagtataataaaaactgtaaaatgttaaaaacccagacacttagaaacagcctacttgtgtaagaaacataataattcaaattattactctttgggaaaaagttataaaatcatacatatacatatatgtacatatatacacatatatatacatatatatatatacacacatatatatacatatatatacatatatatatagtgataaccatcaagttaaaataaaattaaagagtgattgttgattctagtgatcttttatttttgaaacagggtcttaactctgttacctaggttgactgcagatcatggctcactgcagcctcaacctcctggactcaggcaatcctcccacctcagcctcctgagtagctgggactatgggcgtgccccaccatacccggaccattttttgtattttttgtagagatggggcattgccatgttacccaggctggtcttaaatttctggcctcaaggaatcctcccaccccagcatcccaaagcgttgggatgacaggcatgggccaccgcacttggcctctggtgatctttgagtacaggtctactagtaatatttttcctttttgtttttctatttgttcaaaaagtttttataatgaacctgtatactattaaaaaataaacgttatttttaaaaattataattaggccaggtggtgatggcttcttaaacagcctgcagaaccatgagccaaataaacctcttttctttctaagttacccagcctcaggtattcctttatactgacacaaaatggactaacacaagaaggacaagaaataactgacttagtagaatagagaaacctttcctacccaaaggatagggatgggagaggggcaacaaaaagcaaggtgatctgctccaataaaaggctccaggattagagatacagggaacctccacaaagtggaatgcgtctgaaccaagtttgttggttgcaaacttatataagaatcagacctttaagtcccctactcaaatccagcagaagatgggaagtttcagaggtttaatcaaaaggatctgagttccagaatatccaacaagctaagaggaggagggagcactgtaccaaatgtgattacgtgagagtcagtaatctcaacacaatacccccagccccattcctctgtgtatttcacacaaggctgccagtttcataccccaagcaggaatttagaagattcctctctgagggaactgataagcccaagggaaaaaccctacagacactgctttgagaattccccaatgaatggcttgatcctgcccactctcgcagagctccccagcagcttttcagtgctggatccttaaatatgaacagacagctgtagagtaccagacatttgaccacagtctctactatgaaagaggagaccaaaacaaacaaaaataaattggaggaaataagacagggagcaaaagaaaactttttaaagttgtatctttagataaaatattatatgaagtaagactattgagaggacaaaatatccccagaaaagaacaagagagtagataaaaaagtagtcaggaagtaaaagtagtcagggaggaaaactaaaaataggattacaaaaataaaaacaagaggattagaagataaatactaagagaatctctcaaagtataagaagaaggattaagagatggaaacgaaccatgcaatgaaatatttttatttttatttatttatttttgagacagagtctcgctctgatgccgaggctggagtacagtggcacaatcttggctcactgcaacctccgcctcctgggttcaagtgattctcctgcctcagcctcctgagtacgtgggattacaggtgcatgccaccacgcccggctaatttttgtatttttagtaaagacagggtttcaccatgttggtcaggctggtttcgaactcctgacctcgtgatctgcctgccttggcctcccaaagtgctgggattacaggtatgagccactgcacccggcagtattatttttatttatttatttattttgagatggagtctcacactgtcacctgggctggagtgcaatggtgcgatctcggctcactgcaacctctgcctcctgggttcaagcaattctcctgcctcagcctcccgagtagctgggattacaggtacccaccaccacacccggctaatgttttgtatattttgtagaggctgggtttcactatgttggccaagctggtctcgaactcctgacctcgtgatccgcccgcctcagcctcccaaagtgttaggattacaggcgtgagccaccacgcccagcctcaaagtattcttaaaagtcagacaatcaaatgtactaatgggatgtcatatttttaaaaggctggccaggtgcgggggctcatgcctgtaatcccagcactttgggagaccaaggcaggaggatcatttgaggtcaggagtttgagactaacctgatcaacatggcgaaaccccgtaaaaattagctgggtgtcgtggcgcacgcctataatcccagctacttgggaggctgaggcaggagaatcgcttgaacctgggagaaagaggttgcagtgagctggtctgcaccaccgcactccagcctgggcaacagagcaaggcaccatctcaataaataaataaataaataaataaataaataaataaataaataaataaataaataataaataaataaataagaggctgggcatggtggctcacacctgtaatcccagcacttggggaagccgcagcaggaggattacgtcagcccaggagtttgagaccaacctgggcaatgtggtgaggctttgtctctacaaaaatttaaaaaattagcggatggtggatgcctgtagtcacagctactcaggaggctgaggatgatcacttgagcctggaaagtcgaggcaacagtgaaccatgatcgtgtcactgcactccaatctgggagacacataaaacaaaaagagacgtctcaaaaaaaaaaaaaaaaaaaaaaaaaaaaaaaaaaaaaaaaaaagggcccggcgtggtggctcacgcctataatctcagcactttgggaggccgaggcaggcgatcacttgaggtcaggagttcgagaccagcctggccaacatggtaaaaccccatctctactaaaaatacaaaaattagctgggcgtggtcgtgggcttctgtagtcccagctactcaggaggctgaggcaggagaattgctggaacctgagaggcagaggttgcagtgagccgagatcacgccattgcactccagcccgggtaacaacagcaagactccgtctcaaaggaaaaaaaaaaaagagcaaacacagaaaacacaagagaagaaattatcaaagaaatactgtaataaagaatcttggtactaaagtatatgcacttccaaatcgagtgcccagcaaaatgaataaaaataatccacatcaagattcatcatcaagtttccaaacaagaataaacattccaggccaggcgaggtggctcatgtctgtaatcccagtactttgggaggctcaggagggcagatcacttgaggtcaggagtttgagaccagcctggccagtatgacgagaccctgtctctactaaaaatacaaaaattagtcaggcatggtggcaggcacctgaggttgcagtgagctgagattacgccactgcactccaacctgggtgacagagcaagactccatcacacacaaaaagaataaagattccaagccgctaaagaaggacaggatggggatagaaaaagagagacagaagaaaaaaacatacagagaattaagaatcacaatggcactgccaggtagtacagcacagtggaatccatttgatttctctgtatttctgcttaatataaaatttaaaggctgggtgtggtggctcacgcctataatcccagcactttgggaggctgaggcaggcggattgcttaagctcaggggtttaagaccagcctgggcaacatgggaaaaccccgtctctactaaaaacacaaaaattagccaggtgtggtggcatacacctgcagtcctggctacttggaaagctgaagcaggaggatcacttgaacccaggaggtcaaggctgcagtgagccaagatcacgccactgcactccagcctgggtgacgaagtgagaccctctttcaaaaaataaataaattaaattaaattaattaaattcagtatcccaccacttgacatataaggaaactatgacacagagcagtggaataacttgtccaagcacaaagctaattagaaatggcaggctggccatcgtggctcacacctgtaattccaacactttgtggggctgaggcaggaagattgcttgaaaccaggagttcaagaccagcctgggcaacacagtgagactctgtctttacaagacattttaaaaattagctaggtgttgtggtgcacacctgtggtctctgctactcaggaggctgaggtgggaagactgcttgagcccaggaggtcaaggctgcagtgagccgtgatcatatcactgcaatccagccagggcaacaagcaagaccgtgtcttcaaagaaaaaaaaaaaaagctgggcgcagtggctcatgcctgtaatccttgaactttggtaggtcaaggtgggtggatagcctgagcccaggagttcaagccccacctggacaacacagacagatcccatctctacaaattttttttttaaacattagctggttatggtggcacgcgcttgttgtcccagctacttaggaggttgagatgggaggattgcttgagcccaggaggtggtggctgcagcgagctgtgatcacaccactacactccagctcgtgcaacagagcaagactcggtctcaaaaaaagaaagagagaattgaaagacagaggaagaaagaaggaagagaagaggaaagaaagggcaaaactgggattcaaacccaggctgtctgagttccgtatctagtctgtgcctaaccagtcaacccccctgcaaatgacagctgtacactgaacaaaatacaaaaaaacagcttcctgagggttcagctgactgaaaaagggcaggcagattttggtggagtttgaaacttggaacagagaacagcatgcagttagtccctcccttcccccacaactttttctctctggtttgccctcaggatggcagccatagcccagggcggcagcagcaggccaggggtcaggggtcagggcgggcagccaacactctaatgggaagccaaccatccttctggcaggaagatgcaggctgccagaaactgaggacgaatccagaaacaggaaagtcaaagaagaaaaatcccaaattctgcatttaaactcagttcaagtttccacatacgtgctggggaaacaaagcaacttctaagcaagaactgagctctgagctgctgcatgagtgacagtttgtagcttgagtctgaccaagttgactgcctgctaaactgaaaacatcaaccccttttggggcaaaccaacagaatccataccgttctgttgtatgacacctccaccatcatatcacaatgtctaggacacaacacaacatcactcagcacaggaagactcatggagctgacatgccaactccaggacacacagatgtggaaattcccagacaagcaatttaaagcagacattataattccatacttaccacagcaaaatgaagaaaaatgcactcataaagaataaaaagatggaaaatctcagctgagaaacacaaaatataaaagagaaccaaacacaggcagtgcctactctccagctctcaactatagctgccttaccattgagcatgacagtcctcaatgaactctggttactattatcagccttattaacaatgacattggaagccagaagataatgaagcaatgcttacaaaattcagaaagactacagtttataccattgccaagttagaaatctctaaccaaataattaagtgtgagattagaacacagatacatgcaagatattaaaaatgtatctcccaggtacccttttttgggatctgttggagtacaatacttcatgaaaataagaaaaccaagaaaaaggaggacagggacttcaacgaaggagagaaatgaagtgaatttcatgctgaaaggaagcttcgggatgcctgctgtgtagcaagctgagagcaatctgtccagactgaagcaggagggcagagggctccagaaggggcaactcaaaacgcacgtgtgcacagagacaggttacctgaagggtttgactatgtttagagtaattttttatagctctgacagacaatttgggaaggaattcataagtacattcatgatatatccattaactccaggaaaatgaaactcatacaaaaaagtaaacatgatctcagcatatcatctggtatcactgtaaattatatttatatggtaatacatactactttgataaaaataaaatttttttaactaaaacagtatctcagcttggctatcattccatcatagtatatatgtgtctactataccttttgcttctttttttgagatggagtctcgccctgtcgcccaggctggagtgcagtggcgtgatctcggctcactgcaagctccgcctcctgggttcactccattctcctgcctcagcttcccgagtagctgggactacaggcgcccgccaccatgcccagctaattttttgtatttttagtagagacggggtgtcaccatgttagccaggatggtctcgatttcctgacctcatgatccgcttgccctggcctcccaaagtgctggaattacaggcgtgagccaccgcacctggcctgctttttttaaactatgaaatatttggagcatccaggaaagtacagcaaacaaaatatagaacatacacgtatctaagacctagcttagaattagccatatacacttcaggtctttgttgttgttaactattacagctgaagtctcctatgcagacttatctcatttcctttgctctcccctcagcgggaatcactatgctaaatttggtgtttatctttcgtatacatgtttttatattattaccacatgattcttctcagaaacaatacagaattctcttgcatgtttcaaattttaagtaaatgtgctaatctgtatggtttttttgtatttttttcttttcattctttcaactcaacatagagatttttccatattgatacatgtaactctagttcattcattttcactgctacattatattccgatgcaactataccacacttacccatctcgtgcttatgagcactgaatctgctttcagcttttggctcttataaacaagtcctgtgctcctctctcccattcgtgtgtgcaagggtttctgtgggagtggaattactgggtcctacgcaagggcacctttgacatactgtcaaattgctctaaaaactggttaaatcaattcaggctctcactaatattgtttaccaaagttttttatctttgccaatctaaaatataatataacattaaagaaagtttggaaaaaagaagacattttaagtatttaaaaaaatcattagataaccctaatggatctcctgtgatttttgtatttccttccaagtccctctgcattttctttatttttctgaagtagtgtcgtgaccgcctgctctccaagaggccaggagaaaccctggcttctctcaccttgctatccattcagcagtgccctcaaagaggtctggagtgatgatgttggtcagcgaggctacggaggcagcacagtatgcgcttctggaaagacagaaacgggaaacacattaagctctacggaagagctaatgaggctcagtgaactccgcgggcggactgctcgccttgcctagtaagctgtaatcacctcctgtcctcactcttggcacacggtcagtcctcctgggtctccaactgagaggtgtgacattctatttggatagagttgctcacggcatggcttcagtgaaagaacatgacattctattctccctacctccacatggtccaatctacatcagaggaaataacagccatatcaattcatgtcaaaagtggattcagctcttctttcaaagacctataatggttgccataaatctatggtatcattcaggtacttctgatatgctcattcatttggatgttagtactgtttcagagccaggatttctgtttacagccttgacacattaaagattaactatactttttctgcaacagataaactgcaaaacaggccaccaaattgtaatagatcaaacaaggataggaacaggtgagtccactccaatacagtccttaaacctctagagggagaaaagagccttgatttcaaacctctcaccagtacacacacacacacacacacacacacacacacacacacacgttaaatgaaaaaggcgcacgtctatattttttgttttgcttttgttttggtttttattgagacagggtctcactctgtcgcccaggctagagtgcagtggtatgatctcagctcactgcaacctccgcctcctgggttcaagcaattctcctgtatcagcctcccaagtagctgggattacaggcgcatgccaccatgcctggcttatttttctatttttagtggagatggggtttcgccatgttggctaggctggtttcaaactcctgacctcaagcaatccacctgccttggcctcccaaagtgctgggattacaggcataagccaccgcgcccgggctattttttaaaaaagcattattaggctgggcacagttgctcatgcctgtaatcccagcactttgggaggctgaggcaggtggatcacgaggccaggagttcaagaccaacctgaccaatattgcgaaaccccgtctccactaaaaacacaaaaattagctgggcatggtggcgtgtgcccgtagtcccaactacttgggaggctgaggcaggagaaccacttgaacccgggaggcgggggttgcagtgagccaagatcatgccactgcattccagcttgggcaacagagtgagactctgtctcaaaaaaaaaaacaaacacaaaaaattattatacttgatttaggatcattcttgctgttccatcctcccagccctaattcttctcggggcacattttatttcagcttctccctctgtcatggtatacacacacagactgcctttccttcccctctatggttttttcaaatacccggcacagggaagacaaaaatcattggtttgaattctgctcaaaaatccttctcctggccaggcatggtagctcatgcctgtaatcccagcactttgggaggctaaggcaggtggattatttgaggtcaggagttcgagactagcctggccaacatggtgagacctcgtctctactaaaaatacaaaaattagctgggcatggtggcacacgcctgtaatcccagctacttgggagaccgaggcaggagaatcgtttgaaccccagagacagaggttgcagtgagccaagatcccaccactgcgctcctgcctgggcaacagaaagaaactccatctcaaaacaaaacaaacaaaaagtatattcctaagggctcctaagaaacataaaagaagggcctagtttccatcttcttttttttttttaagataggatctcactttgttgcccaggctgcagtgcagtggcgctatcatggctcactgcaacctcaaactcctgggctcaaactgatcttgcctcagcctcctaagcagctgaggctacagatgcatgccaccacacctggctaattttttaaaaattttttgtagagacagggtcttgctgtgttacccaggttggtcttgaactcctggcctcaagtgattctctcatctcagtctctcaaagtgttgagattacagacatgagccactgccgctcggccctggtttccatcttactcagtatagatataacatgaagtcagacttactgaggtattccaaagaagtctctgcagaagctgcatgcattatgatcctaccagcatttttagcagccaaaggcacagtggaagtttagttccaccagcaggcattgggagcacacaagagtcacaagtgccaatgccaaatgtgatcatctaccagcagctaattttgaagatctgtctaatttccttgcaattgtaggcctcttaaagaggctcagatgcatttgctcttgaatcctattgtgacttgtgaggtaggaggcgacctataatacagtttgcctctcacaagtgtgaggactaagaagtgatgacagaagacaggagtcccaggtctcacgctgagatggggaggaaacgtaatacaaccttttcatgtatttctccccctttccctccacccagtcatcgcagctctcaaatttgaatttgtccactaactttccatccttgctgccatcacccaaatccaagccttcttcaacctggatcagtcttcctgctctctctccctccagccctgaaaccagagggcttttattggaacactacagtccatcactgcaattgggaaacttctaagaaaatacaaatcagatcacatcactaaactccagactccataggagatttcagggcctctgtagcctgttcccagcctgtccctccagctccactgctcccctgcccaccaggccatctacacttcaacactgaacttgtcctttcttgagcaacacatgctttctcaccaaacttctgcaaatgctagatccctgcctccaccttatcctcacagaatgatctagattatataacctagaaaggaggtctcctttcttaagaactgagaaaaaatagtgcttgctatgagttcactgtgatttgattttttacaatacactggaactacagacccttgagtaggctcatctctgaaactatcagcagtgtaacagagcagaaagatcatccagagactgctgtctatcccagaagggcagcgagctagtctccagatgtcaaactctcccatcactgctgcttttctccaagtcaaatccacccaaacaagcactcctgaggactggctgatgcttccaggcaaaggacaatgaaagaaatgccaagtgaaaaatgatggaatcggggtactagaaaccaggcaaagcaaggaaaatggatgcaatctgctagcttttctctatcattcatatctttaatcctttatgtaaatagaaagcacgggcacgaatggcagagcatcacccaaagagcaaaggtcagggaagaatatggctacagtgcttggcaggggaaccaagctgccttactggagaagtttcctagcatttatctagaacatataaataaagagcatagggaaaaaaaaagtgctggaatgaataagatagcaaataatcacagctgcaaaaggtatatgataaaataccaaaaggatcttgctatgatttgtttgcttttgcctaataatcttagtaggtttttaaaagctgcgtttcaagactgtgcatattttgggggaatagcaacagaacaggaacgaaaatgtagtgaacacgagggaaaaaaactcttttaacattttccttaagaagaatcaacacatactgatttacctcagtcgttctactggtttcactggtatacacagatcctaatctaatttttttggttggattagacaagttagagatagaagaacatcttgaactaaaggcctttgcagcctgattacctattatctgtaatgtattttatgctccacaatgttcgtggttttttcctcccctatactttcaaaccaatggttaaaccagatgcttaagccagactattaatcaacttgtgtagaagcaaacccatttacacataggcagtaagacagctttgctatagaaacctcacaaaatgtatttctcaactaaataataagaaaatggcataaaatctcaataagccactgtcttagagaaatggcttattcaatgaattccctgtatgcctcataagtaatctgccaggtgaggaagcaacttgcttggtacatcagacacttatggaagaaaataataatttcgagctaactggcaccaatcagttaatgcgattttattgcactgcactctcccggcccacaaggctctctgcacctcccagaaaaactctcatgtgcctcaggaggacctcagggattagacattctcatgatttcatcaaattcactcagaaggtatttactgaggccctgctggactttcccctcccttcctatctcagagaggtgaaggaatacattacaccatacagttatttatattgtggtatatcattttgtaccaaacaaatgtatttttaatttctaaaacaaaagcatttgtttcttatattttcacatttacataaaataagtcaagtgatcatgacacctgaggacatctgcatcacatctgaatgattctgacgtgtcactgacatgtcatcccatgtgtcattctgggacaaagcagcagcttccccatgatgttccttaggcttggcatctctaatggcagatgagctctagagtcaactgatgtggcagcctgtgcaaaaccccactcacctcacatccacctcacctccgacatgcatgagaaaggagccgtcaggttgcttcagggagtacaaatactgaagaagcttctctctgagaaacagggaaagaggtaggagaggcaacagtcagtgcgtgtcagcaggcggggaactcctctaggtttctgtcactgctggctttcactgtacctgttaatgatgtcataggcctcctcggtgccaatgatgcacaatgcattgactgctgcatatgtgggtgcaaggtgtggatactgaccgggtcctcctccaaagccaccttctgggctctgacacagctccaggaactgacacacactaggtacacagccaaagggcaaaaacaaagtcagagagcattcatgtcaaaacaccaaattcccactagattccaggcctttccaatgatcccccactccctcaaaagttgaggggaacctctcctcccacttgttgaatataacctctccccaaagggcttaattctctctccagctatcatcatttctgtctgccctcctctgagtttcgtacttaagcgcttgttggtcatgaagcagggaacacaaggctgggaagaaaccgactttcgtagctatggggtaagagtctcccgtgcttcccacacaaacctttcccagactttccactcaacttgctgccctggacctgtggtaccagcctcctcctccttgcctttgggaacctcccagcctttgaattttgccaaaacatggtgctcaactgcttctttccacactaaccatcctagtcaggatccatcacctaggcctatcatgaacatgtaaatagaggtcttctcactcccattgccacctaagcctctgtgggccactgatttctactccaccagtaagaagcaagttttgtttttttgtttttttttttgaggcggggttgccctcggtcgcccaggctgcagtgcagtggtgtgatctcagctcattgcagcatccgtctcccaggttcaagagattcttttgcctcacccttccaagtagctgggattacaggcgtgcaccatcacgcccagccaattttttgtattttcagtacagacaaggtttcaccatgctggccaggctggtcttgaactacctgacctcaagtgatccacccgccgcagcctctgcaagtgctgggattacaggtgtgagccactgcatccggctgaaaaacacatttttaatggagcctgcttccatggctgggagaacagaagagaggcaggctgctctcatgctcaccttaattgcggtaaacataagaggagctgcactgactcgccgtgagaatgcctcccagtctgcgggttcttggagaattctccacgttaattcaaacaggctcccattccctcactgaggggagctgttttctgagggtttgcctccaagcctggcatcaggctgcccagaggttacagtcttgctttaggtgaaatcaagagagccctatcatcagtccggggtcttccgaagtgcaccagaaagggtgccccaggaaagccctggttatcaagctgtttctccacagctcagcagggtcacagccttcccgccaggagaaacctccatttacaacaagcaaactgtctttgcagtgttcatggggccttctttcctgggcgctttcacctcattatttccttgctactgctgccagaaagactacatagcctactctccaagaagacacaagtttataactgtttgccaacatcacatttaattgctttcgatttcagagttcccattatccgggcagagaaagcaaaagcaaacgctgctgccttgctctgtgagttctgaaacgtcacaggttaaaacaacacatacttctttttgcacctacaattttactgtagaaaacacaaggattgaaactgaagttgaaaacaattatgtggcactatggtttttgtttttgattttgagagagggtcttactctgtcggccaggctgcaggacagcggcataatcacggctcactgcagcctcaacctccccagactcaagctatcctcccacctcagcctcccaagtagctagaattacaggcatgagccaccacgcctggctagtttttgtattttttataaagatggggtttcgccatgttgcccaggctagtcttgaactcctgggctcaagcaatcctcccacctcggactcccaaagtgctgaggtcacaggtgtgagccatcatgcccagcatgtgacacatttttaacagcaattaatttctgtagagaacttgaatttgttccttctttccaaatcgtcatcaattcttatgacatttcccagaaacaaatagttaataagctcatgccctaacaaaggctggctgcactagcataccaaaaggtttctgtaccacaaaaagttttagctgatacaaaacttaacagcacattttttaaaagaaagaaaaagagtcacctggttatccactccctttcccagctcctaagatagaatcgtgccgaacgcaacactactgaccctaaagcctcgaattagttaggatctgaatgtaccagacacaccttgataccatccctccatgccaacctccctcagctgacatgctgcatctgactgtctggggctgtgctagagaactggaggttgggcttctcttgatctcagacacttccgtattacagaacattctgatcccaaggctttccaacttgcaccttaaggaattggcaagttgactatgaactaccagctgtcattcacagacttcttagcaattctgaagaccaaaatgttaatgatacttctacatatttaaaaaaaacaaacaaacaaaaaaaaggagccaggcatagtggcttgtgcctgtaattccagtactttgggaggccaaggcaggaggattgcttgaagccagtagttcaagaccagcctgggcaacacagtgagaccccagctctacaaaaaaatatttttttttcccacaaatgtagggggagaaaaacttatcatagagacaagaagttcaccaataaataaaaaattacaagcaaaaaacattgtacaaacaccaagtggcacattttgtgaaaaacaagtattcacaaaatcattcctttagaatatgactgaaagctgcaatacatcaattttctttaacgtcagcaaggcatttcattctagcttacgtgccaattaccagcaaagtgggaaactatcttctatatcatggatcttcaaacccaaaatgtgtgcatcagaatctgtagaaagctaataaaagaatacagagacccagtcctgctgaggtggaaaagatcctgggcctttgtatttttaccaaattctcaggtgattcagatacatgcaaagcttgagccatcactagtccttgctgcacaactaaaattacttggggggtgttttaaaaaaatcccaacacccaagccacacctaattccaattaaaccggaatcactatgggtgggacccaggtggcagtattttttttaaactccccacgtgattccaatgttcagccaggtatcagtgcttctcaaacttgagttgcatagaaattacctgtggatcttgctaaactgcagctctaattcagtagaactagatgggtctgagagtcctctttttttttttttttaggagatggagtgtccctctgtcgcccaggctggagtgcagttgagcgatctcagctcactgcaagctctgcctcctgggttcaagtgattctcctccctcagcctcccgagtagctgggactacaggtgcatgccgccacgcccagctaatttttgtattttttagtagagtcagggtttcactgtgttgcccaggctggtctcgaactcccgagctcagacaatccgcccgccttggcctcccaaagtgctaggattacaggcgtgagccaccatgcccggctgagagtcctcatttctaataagttcccaggtgatagcaatgctcctggtctggggaccacattttgagtagcaatgagatacatctgtgctgtccaataggcagccactagccacatgaggcaatttaaattctcaattaattaaaatagaaaattcagctcttcagtcacacaagacacatttcaagtactccacaactaactgtggctagtggccaatatagaacacgtatagatgtttatagacacctatagacatttacagaatatagaacattttcattatcacagaaagttctgctggacaccaccacttttatcattccatcattaaagagtatgtaaatcttgtaagagggtcaagttcaaagcagggatatcagcgattgcctctcagccttataaggagtttacttgggactcttaggtgatggctgaggactgatctaaagtgattgattctggccaggcgtggtggctcatgcctgtaatcccagcactttggctgaggtgagggggatcacttgagctcaggagttcaaggccagcctgggcaacatggcaaaaccccatctctacaagaattataaaaattaaccaggcacgttggcacccacctctagccccagctactcaggaggctgaggtgggaggatcacttgagcttggggaagtccaggttgcagtgagctgtgattgtgccactgcattccagcccagacaatagagtgagaccctgtctcaatcaattaatcaatgttgattctaaacaccgtcatcagtttggatgaaggattcaaaggcatgtacagtaaataagcatataatacaaaatgagcagcaaaacaaatcagaaaccaataagaataaaacaaatgcaacaggtacaaatagcaagaattacgcttagagatggcaggggtgggggatgggtaaggcacatgaatatgggaaatgactaggaacatagcaggaaaagaccagtaataagggtccacgagttgtgaagaacaacaataaaaatgcttgttaaaagcatcataaatgcagtattagtcagaactgtatctggctctagcctccattttccacctcaaagggaattcacatgagagttgtaaaaatgactactttttttttttttaagtatttggctgggtgtggtggctcgtgcctgtaatccctagactttgggaggccaaggcaggaggatcacttaaggccaagagtttgagaccagcttaggcaatacagcgagaccttatctctatttttaaaataatataaaaagcttaatattacagacaatcacagtgagaaagctacccagcaaaatacctcaaatatacaaaggataattacataaacattctagtaggtaaaaactgagactaatttgtagcaagaagtatttaggttacataaaaaacttcagcactagactaggctatcatagacagacttaaggcctaggataagttataaaaattatagctatgttctgcacaattgggcaggtttaaaaaaaaaaaaacagaaaaaaagattacagctttggaaataggaacagtcatccatgggcagaacggcttaggaggggatgtaaatgcaagatgcatgagctggcatcacatcaagcttgttctcgtactaactaaaacagcttcagcttgatatagtgaagaggaaatctccttccctaggtagaatatgacaatggacaggtgaagacgggcagcatctcttgttgattccgggtggcctctgctgctcacagagtcagacgtgttatttgactcttcatcaagcaccggcaagtctctggatggctgctgttctggaagaatggtcaggtcgaaagttggctactataggccgggcgcagtggctcacgcctataatcctagcactttgggaggccgacgtgggcggatcacttaaggccaggagtttgagaccagcctggccaacatggtgaaaccccatctctactaaaaatacaaaaattagccaggcatagtggcatgcgcccgtagtcccagctgcttgggaggctgaagcacgagaatcgcttgaacccggaaggtggaagttgcagtgagctgagattgcaccagtgccctccagcctgggggacacagcaagactgcctcaaaggaaaaaaaagttggctactttagagcagagtttctcaactgttgacactggggctcagtaattctttggtgcagggaccgtcctgtagaggatatttagcagcacctctgacctgcacccaccaggtgccaacagcacctggccaggaaaaatgcccaggagacaaaggcctagatatggtgtcctcactgaaaggtaaggaaacatacaaactagacttaaaaattaaaaggaaaaatatttaaggggctattccggggataagctactaacaaccttttgaaagggaaaggataaaacactgaaatagcaaaatttgaatttatctttggaaaaatcttacaagctgaaatgtcctaaaatggtttttaagttaaaggcaatttttaaatcttacagaagctaaaaacataactttaacagtgcgatggtctccctgtgaattttattttgctctgtttcactgaagctgctttcagtaacaaagaatgggattctcattagaggatgcttccttcagtgccaaaaccattaagcaaagcaaatgtacttagtctagttccaaaatattaattcattttagataaacacatataaatgtgtgcatataacctcttaaaagagggaagctaggccgggtgcggtggctcacatctgtaatcccaacactttgggaagccaagacaggtgtatcacctgaggtcaggagttcaagaccagcctggccaacatgttgaaagcctgtctttacaaaatacaaaaattagctgggcgtggtggcacacccctgtaatcctagctacttgggaagctgaggcaggagaatcacttgaacccgggaggtggaggttgcagtgagctgagatcatgccactgcactacagcctggcaacaagagcaaaactccgtctcaaaaaaaaaaaaaaaaggccgggcgcggtggctcatgcctgtaatcccagcactttgggaggctgaggcaggtggatcacctgaggtcaggagttcgagaccaacttggccaacatggtaaaacccaatctctactaaaaatacaaaaattagccgggtgtggtggctcccgcctgtatgcctgtagtcccagctactcgggaggccgaggcaggagaattgcttgaacccaggaggtggaggttgcagtgagccaagatcgtgccactgcactccagtctgggcaacagagcgagactctcaaaaaaaaaagaggcaagctgaagtcctacctatggactgggcatggtggctcacgcctataatcccagtgttttgggaggctaaggcaggaggatcaattgagcccaggagattgagaccagcccaggcaacacagcaaggcactgtctctaccaaaaataaagaaaacattccaggctatgaatacattattcttgaaacctctgataccagcagtaacaacctcgccttgctggctttggtcagcggtcatagcagctgacaaaagtattttgtccactagagggaacccagcttatcatattgttccctaaacaaatagaagcacagcagtgaacaaaataggaaagagaaacctttgtgtaagtgtagggggcgtgtgtgttacatgcaggggaaaagaaggcaggaaaataataaaactgcagagctagactttttgactctaggtcaccttaatatatttgtatgaagaaagaaaactgaacgcatttcaaagcatttcatttccctgtgcaagataaataaaaaggcaatattctatttcagctagtctaaaaaaaatcttctatttatatagaagtccttaagatttatctgtatcttactaaaaataatctatttccttatgggtcagagccagtaggctttgttcataacaagtgttttctgcacctagaagtaaccacctcctaggcacaaagcaaaatacattattgggaagtctaagaaatgtttaaaagttcactaaatcaatgcgtagaagaaccacaggtaaagcttttaaggcatctgtgaagcagaaactctcattaactgtcaagtggtttttgaaataaggacaaatcagcttatttttaaaccattccttttttaattacaaaataataaaagatcattgtagaaacttcagaaaatgcaagtaagcttaaaaaaaatgttttgtttgtttgttttttgagacaacagtctccttctgttacccaggctggagtgcagtggtgtgatctcggctcactgcaacctctgcctcccggattcaagcaattctcctgcttcagtctcccgagtagctgggattacaggtgccagccaccacatctggctattttttgtatttttagtagagacagggtttcaccatgttggccagactggtctcgaactcctgacctcaagtaatccgcctgtctcagcctctcaaagtcctgggattacagccatgagccactacatccagccagaaagttcttctttttctttttctttttttgagatggagtttcactcttgttgcccaggctggagtgcagtggtgcaatcttggctcaccgcaacctccgcctcccgggttcaagcgagtctcctgcctcagcctcctgagtaggagccgggagtgcagtaacagaaggagactcttgtctcaaaaaacaaacaaacagcctcctgagtaggattacaggcatgcgccaccacgcttggctaattttgtatttttagtagagacggggtttctccatgttggccaggctggtctcaaactcccgacctcaggtgatccacccacttcgttctcccaaagtgctgggattacaggtgtgagccaccgcgcctggcctttttttttttttttttttaagacagagtctcactctgtcctccaggctggagtagagtggcatgatcttggctcgtcgcaacgtccacctcccagattcaagcaattctcctgccttagtctcccgagtagctgggattacaggcatacaccaccaagccaggctaatttttatatttttagtagagacaagatttccccatgttggccaggctggtctcgaactcttgatctcaggtgatctgccgaccttggcctccccaagccctgggattacaggtgtgagacaccgtgcccagcccagaaagtttataaaatcacttttaaccccatcgtccagaaataactactacatgtatctttctggttctatctatgcatatcatcatctatatttttaatgtatgtaaattaaatcttttaaactattttcatttcacatctctctatataaatacatatattttaacatacaaatatacacattcatatatttattgagacagggtcttgctctgttgcccaggctggaatgcagtggtgccatcatggctcactgcagcctcaaacccctgaactcctgtctcggcctcctgagcagctagaactagaagtgtgcaccaccacgcccagctatttttatttttatttttgaaatggagtctcactatgtcgcccagactggtcttgaattcctgggccccagtggtcctctgaccgtggcctcccaaagtgctggggttacaggtgtgatcatgcgtggccacatttatacattttttaatggttatatagtatttcacagaatgtactgcaccataaatgacttatgttttattttttaaatttatgtattttatttatttatttttttgagatggagtgtcactctgttgcccggactggagtgcaaaggcgcaatctcgactcactgcaacctccgcctcctaggttcaagcgattctcctgcctcagcctcccgagtagctgggatgacaggcatgcaccaccatgcccagctaatttttgtattttagtagagatggggtttcaccatgttggccaggctggtctcaaactcctgacctcaagtgatccacccacctcaacctcccaaagtgcttgggattacaggcgtgagccaccacacccagctttacatttaaaaaaaattttttttaaacattctctactgttgatatttaatttagattgcttccaatgaaaggccctttaaaggctcctctcttcctatgtgacattgccccagaagcggcgctgacacttcctcagaaaagccttcactataaaacaccaagtacacagcctagaaaaaaactcagtcgattttggctcgagttcttccacctcaggcaccccctgtgattctctcttccagtttttcatgggtctgcggcctcctccatccagcgttcagatccaggctcacagaaatccccattttttctttcttctctcacacccaactttcccattgtgcaagagtgaagggaaaactttccaaatatcctgattgtgtaggagtgaagggaaaacttcccaaacaatccccaggcccccgagctggtatttcaaaaacacacgaggctggatgtggtggctcacacctgttatcccagcactttgggaggccgaggcaggtagatcagctgaggtcaggagttcaagaccagcctggtcaatatggtgaaagcctacctctactaaaaatacaaaaattagccaggcacggtggtgggtgcctgtaatcccagctactcaggaggctgaggcaggagaatcgcttgaacccgggaagcagaggcagcagtgagctgagactgtgccactgcaccccagcctgggtgacagagtgaaactctgtctcaaaaaaaaaaaaaaaaaaaaccacgtgggcctttctttgacaattaaattcctgttactgcagaaactgtgtccaactctccttccagtgctggaagcagccaggcttgcagtggcatcccgatgatcaaaacaatgcacttgcctctccctcagaaagcatcctacgtaccacaagggttaatggcctaattctttattatcttccccatccacattcatcacaagacaccctgcccaggaaggcaagaatgagaggttattgttaagacagaatgaatgagacaatgtgcagttctgttcctctgacctgacaatgtgactgaggcaggggctctgtgaccagagaggggccccggctaggcctctgtgtgtcccagcacagctgcctccttgtgctgtggagaaacaaacctggctcagaagtctctcatcccagatgcttcgacctcaagagcaccagaggaagctgagaaattcgagatgctgcctagagcccatgctgcctctcagtggatctcttggatccaattcctggctgccctttcttattccaggtatccctaggactggagtcatgatcagtcttttcttctttaatatataaatggtgatgagtgtctgggaatgagatgccagatcacgaatgccatctgtacaaggatcttgggaagaagctcagttgcttagatctctaatcatcgatcaggtttaggaaaactgagagtcatggcatttgtatgccacaccagtaacacatccagtcccatcaagagctacatggtcgctccaagcaccgggagcggggaggtacttctatagaggtgcgtaggaaaggcaaaggcatttttgttcactggactggcacgtgcttccccacagaagctgttcaaatgcatactgtactttctggcaaaatcttgtctctcagagttgatgattaagacttttctcaaagaccagagtcaagagccaaaagaaaaggccacagaagaaaccagaatccttctcttggaagttcaaagtcttgttctacccaccagcttacattagttttctaaagtggaggagtttcaggaagttgccggaggtcatgagaagagcaaagatttctttgtggcactgtttttttccattccaaacaaacaaaacagaaacaaaacaaaatcccaaactcaaaatacaatttcagagaacaccccagatttcccaaagacagactcactctgtagccactatctgggggatgggttcatctagcagttccaagctgtgcaggatccaatagcagagccatgggcggctggcatccagacactgggagagagacaggagagaaaacatcccttattcacaatcactccaagacactgctgccaaggctgtatctgtctcactcccagcagcctggcaagggggaggagggcacccttgctcaaacaacaatcagtgaataaaggacactttgctttgtggccttagccaggagctgaaatgaccatctgttaaaaaaaaaaaaaaaaaaaaaaaagataacaaggctgggcgcggtggttcatgcctgtaatcccagcactttgggaggccaaggtgggtggatcatttaaggtcaggagttcaagaccagcctggccaacatggcgaaaccctgtctctattaaaattacaaaaattagctgggcatagtgatgtgcgcctgtaatcccagcgacttgggaggccgaagcaggagaatcacttgaacccgggaggcagaggttgcagtgagccgagatggcaccactgcactccagcctaggcgacagagcaagactccgtctcaaaaaaaaaaaagaaagaaaagaaaaaaaagacaacaggattaaaaaaaagatgaccctgaacccagtggatccctccctggcaggcatctaaggaaggctgagcagaggacttcctacaggccaggaggttaggggctgctattttctcggtatagaaccaaggagatatacattctctgaagagatttcctagcttaactcaatcactgattcaacaaatatttgatagtatctacttgtgccaagcactgtattagacactggggggatgataataaaatttggtttctaccgtttatttttttgagacagggtctcgctctgtcacccaggctagagtgcagtggtatgatctcagctcactgcagcctcaacctcccgggctcaagcaatcctcccacctcagcctcctaagtagctgggactacgggcacacaccactatgcctggctaattttttaagtttttatagagacagcatcccactatgttgcccaggctggtcttgaactcctgggctgaagcaattcacctgcctgagcctcccaaagtgctgagattacaggcattagccaccatgcctgaactggtttctgttcttgagatgcttgggatatagaatgtgtgtggttacctgtaggggaagagagcactggacagacatataagttacctcatgtctttctggaaccaacacgtgtacatatacctggagaaatgctgtaatggacgaaaacagagttttgagggagcacgtggaagagactgactaattctgcctggggagctaggaaaggcttccaaaggcaaaatgcagacggctcttgatcctaattaaaccataaatgattattgagcattcaaggctaggcagggtaggtaggagtactgccccagttttataaattaaaatatataaatgaggtccaaagattaacctttttcagattataaaaatagcaaatgtcagaggtgagacaagaacctaggtttttagagtcaatccagtgttctttccgttggcccaagctgctctcttcaaaactatgctgatatcccaagctgtggctaacccaccacctggaaggtaggctggtgagctactgaagacactgccagggatgcagcttaagtttgaatcccagctcctcatcttactcgctatgtgcctttgagcaaatgacttaattttactatgcccatttcattatctgcaaaaaacaagagattgatctacctcatgtagttacaagatttaaataagagaatgcaactgggcgcagtagctcacgcctgtaaccccagagcctcaggaggctgaggcaggtggatcacttgaggtcaggagctcgagaccagcctggccaatatggtgaaaccctgtctctactaaaaatacaaaaattagccaggcgtgatggtgcacacctgtaatcctggccactcagaaggctgaggcaagagaatcgcttgaacctgaggcggaggttgcagtgactcacgatcatgccactgcactccagcctgggaaatacagcgagactccatctcataaattatgagagaatgcatggtaagctttcagcacactgttcaataaattgttagctgatatggtaccaactgtaacataactattgaggacttgagtcaaggattgaaaattcatagcccacaggccaaatctagcccatggatgtgtattgtttaactggtagtagctgcaacatttgtcaggagagtcacatgaaaacgtgatttccggcttcatttggaggaagaaaaaaaaaaaaggaaacaaagatgatttggcaaccctgggtctgcattcccagatggcagtaatgggcaggaaagaagttaagggcacagggtctccagttagcctcagtctccatgcagcccacttcactgatttatgctgcctgcctgggccctacaggcatttgagttggcaaatcattgccacaaataatcaaatgtggaacccaaataaaaagcagattaaaaatagagatgctgctctgtgttaagcagggcagaaagactggagacttcctgttcacattcaccctttgcctgccgctcagtcccatccaacatctgtcccctccaccgtcacccagtcctgacgttgctctgggaaatattaaagatctactcttaaacagtaatgttaaattgcaaggaccactctctatactggtcctctagtcagtatagaaattagatcttattacaagaaagggttttttgtctctttaatgaagatatgaaaagtaatgtacttactagaaggagtggtgaagttggaaaatttgtaaccatcacgatacagacttaacaggtttggacaatagtcctcaataaatgagcgagaaattagatcagcttatagggcaaagggttaagggtgaacaggtaactggcatttagccagctgtcaaggaggtctagataaagcacgtgaaccccttagtcatcatctagtaacagaagaaagccccatcctatctagggtgctccactcactctggaagagactaggttctgccctttcagggctgagtcccagctctgtgacagcaccctacctcctgccagagccacagagaacaaagagtgactctgcaacaggtcagccccaacagtcttttacgtttaaatagaaaaaggaggaggatttggtggataatttgacagcaagagttcctgggtaatgtgtttacctcataggcatctgtcagttgtcgaaggcctcttttcagataatggaagtgcttctccctctgcaaaacaagcctggaaagacaaacagtttataagcccattctaatagcttatgcttccaccatacacacgtatgtgcacgtacacacacacgggtaaacactcagcttcaggacgtccccctgcaatcactgactggataaccagcaacttctctggttccaaagagcaactaaaccagagaaaagaagctcttgtctgaatgtctctaaagcatctgaaaaccatgccagctgacatttagagtgcgattgtctcctaaaggcagtgactttgggctaacggaaaagccgcaatgagcacacgcagccaggcaatgacagtccacccagaaacttcctccagcatctaagaacagatatctttgtgcctccccatcctataagcaatttaaatctgagcctcgccacttccctgcctcagccgctgtcatttcagtcaccccgtctgggatgacttctccaaggcccataatttactccctgcctgcctctcggttatccaactattattctctccctgaaattccacctcccacgtgtgacccacagccctggccagaggaccgtgttctgcagccagtcgctgtccttggctttcaagtcagcaatactggctttaagatggaatgtgccgcccatggccacctgcacaggccgggcaaagcacagaggctgcacttctttcttggtctggcagaagagcctgtgtgactagggaaggaaacaaaaagcacagattgtcaagatgttccccgtgcttgcagattacagaaacaaaggaaagagaaccattccctttgctaggtagtcaattccacaattgtttatcaaattcccactgtacttggctcagagtaagagccttcatgcagtctttttttttttttttttttttcctgagacggagtctcgctctgtcacccaggctggagtgcagtggtgtgatttcagcttactgcaacctccacctcttgggttcaagctattctcctgcctcagccacctgagtagctgggattacaggcacgtgccaccacacccagctaatttttgtatttttagtggagacgggggtttcaccatgttgcccaggctggtcttgaactcctgacctcaggtaatcccctgccttggcctcccaaaatgctgggattacaggcgtgagccaccgcacccagcccttcatgtagtctttacctcaaaaactcttccaattcagaaatgaggtaagtatatcaatggctacaaggaaagaatgggtaggttttgcaagggaaaaacatactactgaggctcaaaagggaggggatatctcatgaagaaaggaatgatcaggaaagtttgtgtgaaaaaggaggaatgtgcgatgagtggccctggcagaaggagaaaattttaattcaattttaattcaagtttaaatagctgcaggtggctaatggctactctactatgctgcacaggtatcaagtgtacaagaggagtgacaggtgggagaatctgacctcaatacagggatgaaagaggaatgggaggaaagcaggagtactgccccagtttaaaaacaaacaaacaaacaaaaaaacaaggatctgggatgctgactaaggcatttctactcaatttactaggcaaagggaagtcctgaaggtttttgagatgaggaaagaaatgatcagaactgtgctttggagaaacagtaggtagtcagtatgtgtttacaaactgaagtatctgaaaatatcgcagtgggcagacagatggggtggggagacagggttagaagctctgaggagctgacccagttggggctacttagggcccgaactagtgtgtgacccgtgatcagctgacttttggatgtgtgggtcttaggatgctgggactgcattcaggtgatgatgtcaatcaggctgctggacacacacgtgaggctcaggagagggattcaggttacacacacagactacgaagcatttgtctgcacacaagtgacaggtgaagccacagaaggtgagagggcagagagagaagtttggaaacaaaactgtgggaagacccatctctaagggtttggaggagccagtgaaggagagaaacaggagagtttacatatgctagggaagagcaaaggaagtgtcatgtcacaggccatcagggaggagagaatttcaggaaggtgtttaacagtggcagatgctgcagcaagactgaggggaaaagacaacaaaccacagaagggctagagacctccaagagcattcagagcagaggtgaaggcaaattgtaaacaagagaaggccagactcagtttctctttcaggaaagtccactcaggacgcagggagcacccatctgtgtgggcagagtgttgtccagcactggggtagaggctgctctgtaccctagagcgacagtccagaggtggacacacatgtgaaaatgacaagcagagccctgtccaataaacgctgtgatcagccacgggaagagatggagggtcagaaaactcttcccaaagggaagagcattgagtttaaggctggaaagacatgagttaagcaggcaaaatgaagaaaacaccatgacacatttgagttagtttagttcagctggatcaaaagtacaaggcagtaagcagagaaattccacattagaaatgcaaaagctcagaggaaatccatagggaaggtctgtaaagaggatggaggagggctgggatgagggtatagtaggagaggtgagcctggaataaggaaggatgctgcattctttgagcgagaaatgatgggtacgaagctagcgaaatataggtctctgatgtgggaagaaggaaacaggaaagtcaggtgggtcagcctcgattttctcaggaactaggagtcaagatggtgggagagctgtggagtggccacggtggtgggtgtgttagggaatctacatgagacgaataaaaggattataaggcagttagtgaagcgccagtgaaattaagaaatataacatgttggtgaagccagtcagcagcctcaggagaaaccaagcctgctgacaccttggtcttagacttctggcctccagaaatgtgaaaaaataaatctctgtggtttaatgcaccccatctgtgataccgtcttatggcagcccaagctgactaataccctcaccggtccttcattctcaactcacctctatccaaaaatcttttctgtgtaggaagttaagaaagaaaaggtagagctcttcctatttttacctgaacaattcagccccaaaaccattcaattacatggagcagaataagacaggtttcgtgcaggacttgagggggtgcagggtgggatgcaggctgtcagctcaagtggatgaggagggcccccgtctcactgtgcagagggtgacaggagagcaagtgggtaaatctattaaggctatgggaagtcaggtttccactgtctgagaaggaacttacacatctatgtgtactgggtaatgatttaaatagaatttcttatgaggggtgagcccactgggcttccagactcttcacaatgtgcctccacccacactactctccaacctcatctccgcccctgagctctggtcatgctgccttctttgagctccgctcctttcagtctcctggctttagcacatgctgttccctctgcctggaacactctccccatcctttaagttagccacccctattccacctacagattcagcttaaatgtcactttctgtaagaagccttccctaacttcccaatccaaattagattctcccagtgattctctctctcaaattatcccatcggtaactgtatatttgtgttcatttgtttaatgtccacctcccccactagaccaagagcccagcaggggcaggcccagggctagccttgctcactctggcttccctgagcccagcagagtgtcctgtcctttggagactctctagatactgctgctgaaagagaggatcacacaaaggcagcagaatggaatgagagcaaagccacttcctccccccaaacctgggccatcctggaaaacatgcatttgattgtgacagatgagaggacaggggattcagtccattgctggttcctggggactttctaaactcactaaagccaggggcctctctagtcaaaaaataagcacctggcatgtaagcaataaagcaatcgaggaaaggtgaacttatttgtgagaccttggaaagaacaacagtaagaagggaatacatcctctacctgctcaggatctgggaaattctaaaattgtatcacatacaggaatagtagaaaacacgggagctaagctggtgcctgtgagagacctgctttgaggactttaactcagagtattctggcttcagagccattgtcagcacttaacctccagggctctattagcacagggacattatcaatatttctcacttctgaggagcacccgtctccttgcccaggagaaaacaaatttaaaaactacatgtgagcgaggtatctgtgtagtttatgcatttcaggtttcttattaaagccaaggtgataaatgcaaaagggtacattcaaaagggtgtgaaaccgtgacaatacccacagggaagaaaaaatgaattttcatgggaaagcagacatgaataaacaaaaccatgaaaagcatggtcaaaaagctccttgggactgactacctcactccaggtagacagtcccaaccttagagaagaaaatcatttctgggaaggggattaagtatagaatgtactgacattcagctccaggcttgactttcagcccagtctgctattcagctttggccctggaacactgaataggcaaatgcctacttcagcatcatcacaggcatccctggacctgtgcgtggtctgtggtcctgggcatgtgtgtgagtctgtcccatttgatcagcatcatgacctcagacacacaaacaagccctgccatctagatttactgctaacagctaaccatgcacttcagctaacagtgaaggttacttcctgtattaaagtgtcagacttttaaattttgactattaatatgttaaatattgagactgtgataatgatttaaaattctgataaattttctaatttattcttatatcctcgcttattctatgatggtgatgtttgccttcagccttatattgatatgttgaattatatactcagccattcagccaaaatgtatagtatctccaatattaattagcatcctttaaaacactcaatttcataggcaacaatgataaaaacgggtaattgtgaaattcctgaaactaacccagagccctgatatattctatttccacaaggatccgagcccaggaggaacactttttttttcccacccatacttgacctaccagctatgaatcaggggatttcactcctttaatatcatctaccaccactctcaaaaaacaactgcttcctcccagactataacctcccattttccctcatatctcagtgtgaataaaagtctttcttcagctcatgagctaaggaaaaacaaattttaaaaaaggaatgaaagagaccaagggctctatcctgatggtaagtgaaaagggaatgtcaaataatcaaaggttcatgtgagaaacagaggctgtgtgtccccagagcccaggcagtggacagtgactcagcccgatcgggtgagtcatcgggggtacaaccacaacaacaaagcccctccaaaagcaatcacccacaccctcaccattatgaagtcttgtcccctctggggaggctaagcttgaaccagcttgtgcctaggggcagcgaactgccaaggataccattacatttaagagagctcgttctcccaagctatttaaataaatggcgtcatttgctaatctctagctgtatctcatgacaagaggaataattcattttattgaggtcagagcattgggttaatgcagagatttggtttagcagttaagggaaagactatactagtaagctgatatttttcctcctttccttccccag

SEQ ID NO: 735286 - DNA, 71565 bp, Homo sapiens
cggcgaggtcggtcattctgcctgtccggtagcaccacgaaacacctgccactgacacctccccaccagcccccgagggttcgcgcaggcatcccgagccgcgccccctggtccgccgcagccagattccctcccgggcgggttacgcccctaggcgcaaaacggaaccactccgtatgaagaagacaaagtataaccagtcacaccaaagagaggcagcattatttagacagccggctactcccccagagactccacccagtcccctgggcccggcgtccagcgcgcagacggtgcccggctccaggagttccagctccctccacgtgtcctgtcttcccagcagcctcctctgccgcctcgggaggaaaatctcctgacaactcgcggtctgcggactacgactcccaggaggcgccgcgccgcggctctccccgcccccccccgcccccccccccctccccgggacgcgcaggcgccttgggctccgtcaacaagccgggctggcgtcgcctggatgcggtttcttccgggatttgtagtttttctggagctacccgggccgtctgttagagggacaagaactacaagtctcggctgccccagcgctgcgagcctggtcacgtggcgggggccgaccgggcgtgcgtgccgccgttgatccggtgctgcagtgaggagcgtggttcttgcccgtgttgtgtgtgtgtgtgagtgagagagcgagtgagtgagtgagtgagtgtgtgtgtgggggggactcggcttgttgttgtcggtgacttccccctccccttcaccccttcccctccccgccgccgctgcagtggccgctccctgggccgtaggaaatgagcgataacgatgacatcgaggtggagagcgacgaagagcaaccgaggtttcaatctgcggctgacaaacgggctcatcataatgcactggaacgaaaacgtagggaccacatcaaagacagctttcacagtttgcgggactcagtcccatcactccaaggagagaaggcatcccgggcccaaatcctagacaaagccacagaatatatccagtatatgcgaaggaaaaaccacacacaccagcaagatattgacgacctcaagcggcagaatgctcttctggagcagcaaggggaaagcgagagctgatcaagttctttgttcctggggaattcacttctcttcctccctcatggaagatgcaagtaaaaggaaatgcaagtaatccgtgcactggagaaggcgaggtcaagtgcccaactgcagaccaactacccctcctcagacaacagcctctacaccaacgccaagggcagcaccatctctgccttcgatgggggctcggactccagctcggagtctgagcctgaagagccccaaagcaggaagaagctccggatggaggccagctaagccactcggggcaggccagcaataaaaactgtctgtctccatcgtctcatcctcctttcagttcgttggtagagccctcagaaccatttaagagactctttatttttctctttctcccttttttttttaaatttttatttttacgtagaagctcttggacaacagctctcgttctccttccccatttccactgtatattttttaatgtattcccttcagggattccctgtccccaacaggaatttttaaaccaaaacaccccaacttggcagctttttctgtggaggacagacggccggccggacctctgagcacatagtgtcctgcccaccctaccagctcctccagccctgccgggcacatgcccgggggacgcctgccctgcccaggtggcctcctggcccgccctcacctctgatagactttgtgaatctgaactgctctactttgagaagatgaccggtttggagtaatcagaatgaaccctcctcctttttaagggttttttttttttcctttttctaaaaagctatgtatcgctcctattgaaagaccagatccttagagaagtttgtggtatagcttctctcagccagctgtttaagcctgcggcgccagcctcacggagggccgtgtgacactctcgtggtatgtatgggagatggcagcagtgaagcagcagccaccagggagtggccatttggggttgggacagggagggtgttttgggtggcatagaggttttgtattgagggccagtgatgatgttttgatatttatttcctgctacttaaatttgaatctgagtgaattgtacctatttctgatgatgtcggtcttgcaaagcgacagattcataaagtaatgatgaaatctttctttcttcccgtgtgtatttctaagaaatagagccaactgattttgtatgtaaataccaagagcaatttacctggtactaaacccgcaccccagtgcggacccttcccagccctcatcccacttcctttcctactgtcctggaacctgtctccattgtgtgatccagccctggttctggctgtggtcagcagatcccagtgaagggttttgtgtgtttaggcctcatttctttgtctttttcctactccgttcctggcatttgctgatttctagtgtatactctgtagtctcagttcgtgtttgattccattccatggaaataaaaagtatgttgtacatactgccgaagaattgtcttgcaagttaaggcttccccctttactataagactataaataaaaacttattttatcctttcttggtggtggtgtcttcttacccttgttaaggccaaggtggttgatgagagacccctctggaagctgttagggcctcaatgtaagtctgagtgagaagtggaggtggcttacccggtcttgcagaaccaggagcagccataagccagagttgcttcccctttctcagctcagcctgagagagtaaatgggtggtgatggctttgttcattggatgaggcttttgaggttcaacagggatgtagccttagctgtggcaacatttctagatctagtttctgctaagcaagtgacctttgggggaattggtagcccagagctgtggttcaggttctcctggtaatgagtgcccagttcagaggtggctgttctccaggacctttcagtttctagatagttccagtttattaagaggaggcagcagagctgccaaggactggaagtcaagaaggctccaactgcaccgagttagctctactcagactgggacccaacaccagcctgaacttgtttgaccttggaagaaaaaggaattatggccagaacgcagctcagtgttggttttcctgtctggctgacaggaaatactgctgttcctagacccagagaggaagtcaagtcaaatcagttcttggatttgtcaccatctttagagtggtggagagcactgtggctcctatcaattgtatgtcaaatccgtaatatctttttttgtttaatgggagctggggcagatgggtcttgtcaatttgaaacatgatcaagcctccaaaggccatgattacattaaggaaaagaaaaatgctgggaaagcaagatcccatttataaaggcacttcttttcaagatagaggaaagaaactgcagtaaggaagaaatggaaatgagaatcagcttattgcctaaagccctcaaggttaacatgctttcctctttttcattgcccttaactatatctctttgtatatctgggcttaagtatacagttggtttgcttagtattggtgttagaagtgagctgtgggtgaagccatgttgatgcagagatggaaggcatgtgaagctggcacccagtagggagatagcaaacaggaaggggcagtcaagccagcatgaggacaggtggtgtccctgagagccagtccctggctccagtgtattggctggacaaaggattgagtttaggcttctctagatttcagtaaaccagttcagacaaggggcacagtggctaggtggctggttcacctaggaaaatccaaaccacctgattgacatggtgagcggactttggcacagggtggaggtaccactggaagcagcttcctgggcaggaacacagggcaggggagctccgcctggaaactgctcagctgaaaaggccaagtcaaagtcacagccaagcaagccccttctggtatgtgtgtctaggaagcgagtgtgagtattccctcaggataccaaagtcggaccatagcttactctctcacagtaatggtaatctctggtttattttttatattactctggacactcacttacacaaaaccagataagctgtagatttgcttggtcactgtggcaggtggcttcactgaggagtctgttaagcgtgctatttccctacctttacagttgccccaagtgcaagggtatttaaaatggcccagtttttaaagttcttgatacgctaaccccattgtaaaacatcaacaacttcttaggtaaagaatctaagctcacagagctgtcatcttagctgagacaggtttaaaaaacaagactgagtagacaataggagccagagccctgaactgggactgaagtaagcagaattctgtttctgatagtatcatgtgtgttttatgcttggcctctgaaagcagactggctgggttcacagtcctgtctctgccactcggtggctgtgttacttctcccagcctcagcatctttatctataaaatgaggataataatagcactagcctcatgagatggttatgaggcttaaatgagataatgcttataatgtgcttgacctcaggaccaagcaagcactgaggtgcctctgctgtcattatctacacaaagcatgtaaccagggctgactcagcaaggtggaaaaagccagctcccagacacctttcctaaagtgagtaagggttgacttcttggtatatcacaaatgcttcccactcctcagagatgtgccccatccttaccaggcacagtgactaaagagagcaaggtgacaccaggactggactgacaaactcttcgagactaaagcagcccctgtgggtacattaattagatctggtgtcaactcgagtgaggctctgcccattccctcccaccacgattcagtggcatctctcaggtttggacacttttggaggcccaggcagaactgctcagaagccccatgtggtgttactcaaagtgggatccttggatcatgcccagggctgcttgttaaaaggattcctgggctctaacccctctaatctaaagtgtgccgtggctcaccagtcagtttaacaagctctttcaggtggtcctcaagtcactcaggtttgactcccaacagtaatataacccggggaaccaaaaggacgctgttggggaagttaggcacagctgagctgaattagcgaagtggttctgaggtcaggatgaaggtgggggaggcgggcttgttaaatagttcaacccttagagctgccttgatgagtctacgtgctcccagcatgcctccaatgctctagggggctggctgagctacccagtttttaaacttgagaaggaagaaagctgagggctgcctacactagcccctttagaagccccaagcaggggtaatgacatggggcagcactcatttctgtagcatgcctaggctggcctctggtccccaggcaggttttataatccagccagagcaagggtctctctcaggcctggtcaccaggatgcattctcaaaagcctctgggaacatgaaactagagcattcctttcttcaaaactgtttctctagcctgaagaggaaacccaggtaggaaaaaagagtttgtcaatgtctacactgctagatagcgaatagagaatttccttcagtgtctagggtttactagggcagcggctaactcatacatccccaaagttcccttgggaagggaataaaaaatagtttctagttaacttcctcagggagaaaaccaatttggctaagccaggcttaactataggtaggactgggtgactgcaccaggcaggcctgtgcatgggttttggaggctctcctggcaaacccttatcaccctgctggtaagtgttgtccttgcttggtgtttcattggggtcggtgttgggaaggagcccagggagcttcagaatgactgccagagcgggtagggctaggggctctgagcccgcctgtctggactgccatgccagctacaacccttacctttggggtgacattgctctggcttcctgtgccattatgtgaggacaataatagcaccaagtgccattgtgaggcttaaaggagtgtgagaagcccatgaattgttcctggcatttaatactcaataaatactgtcaaatcttagatgtgtctgccatcagatgtcctgggtagtgcagccattttttagttttgttaaaatgtggaatgaagctgggcgcagaggctcacacctgtaatatcagcactttgggaagccaaggtgggcggatcacttgaggtcaggagtttgagaccagcctggtcaatgtggtgaaaccccgtctctactaaaaatacaaaaaaattagccgagcatagtgttgcatgcctgtggtcccagctactcgggagactgaggcaggagaatcgcttgaacccaggaggcagaggttgcagtgagccaagatcacgccactgcactccagcctgggtgacacagcaagactccttctcagaaaaaaaaaaatgtggagtgaataaactctccttttcgctgatgtaataagagtttagtatattaaaatccttgaaaggggaggtaaatgtatgttgaatgctaaaaggcagtaaaaatttgcatgttttctgaaagaacttgagcaagaccacaaatctgttaccttttggagaaaaaaaaggagttgaggaatgaaatatacccttgcaggctggctcagagccattaaccattaacatactggcgactttgccctgttcttcattccagtttcagtttgcatttctgcagtgccgggtggcaggcactgtgccaggtgcagatactgcaagtgcatctggtgtctgccccgtgtttcttgcccagggctggttatgacagtggtcagccatcgtttttcagccttccccttcagggaccccttgagcagaatctgcctggtgggtgaggtggagcagatgagcctcatgactgggccgaggggcccgcatgctctagctcactctggatcccatgtgcacgctcgcacacacaacacacccagcaggatgggcgtgtctagaagaatgccgagcaggtggccttggacaattcacaaccagccgagcaggtcccctcctgcgccctgtgctagatgccagctgccccagcaggcctgttgtgactgccaggccccatttaggattgttttcctttgctgtcctttgcagggtggggctcttgtatacccacagcctgctctgggcaaaattatgtagcacggtctctgctattaattttttccagtaaattaaaggctagagaagaagaagaagaaaaatcaaggatccaatattaagaaatctgagcccaaaccttctactccagtgctgaacatggtgaaggattaagcctcctatcaagaaaaacaagcctgacagcctgtagactgatagagggaggtgtgccttctctccagaaagcctacttctgcaggaacccaggagtatggaatgagccatgcaaagtctgattcaaaaaataacccaatgggcatgcacccccagtcactcatccggaatccggctggcagcctggcagcccggcagcccatggctcccatgcacagtgcttgagagcttcattgtttcctgtctgctggtgccatcaacagctctggggtggcaggggcagatcttgggctaaaggacagtggccaacagctttgggccaaaaggccacaacaagaccagccagctaagaggaggaatgtcatgtccacagcgaatacctactgcagcaaggctgtaggagactttggagaggaaggaccctgtttccaacaacttgaccatgtttcccatccagggacctctgtgcagagagtggtggtgagcaagtatttccaactgggagcccccacagagtcagtggctggtctgtgcacttgttactggactcctagcactgtgcttggcttgtggtgggtactctacaaatgctgcatgcatatgtgcgtgtgccagtggactccagccttgtgatgtaccttcatctctgtgcccttgatagggcggttccagggttgcctctgcgtgagttcaaccctcgggtatttgagcagcacgtagcctcagcccagcattgtgctggctactggggcaatctaggcagcttataaaggctgggccttgccttgaagaagcttagagatgaggttaggcatttagcacaaatgcacgtctgggctctgaatgccagaggagttcaggagatgggccctcagtgagagcggtttggcactatgggaggggcagggccaccaggtcatcgcttctcaagctcttgatgggctctccttctgtcctgcccacaagagcccagccttgggctccccatctagctgtccagacaggctgggggtggggggctgttggtgaagggagggtgggccagagccatctgctctgcacaggttgggtcacgattctattccaccactttcactggtcccttggtatccaggcacatggcagccactgctccagagagtgaggagaggggctggggggatggagcctcgcaaggagcatggacacctagcacttacgtcatcaccatcggcatctgccttacctggctacctctctgttcagcacacctgggagcagcacccttgcagcccttctcccttgacagagctgtgacattgaaccctgccctggtctggtagctgagggcccagcctccccttgcctcctttgtcccatcagcccaggccatcatgggtacagaaggtagcaatgaagtctcacactcggggtaaccaacatgcaatacttatggaaagactgtgtgatcaagggttgagagaatagtatactgaacccaaatgtacccattacatagtgtgaacaattatcaacatgcagtactcgttgaaagaaaagggatgataaaaatgcactattattgaaagtaagaaagtgtggggtctgttaaacagacaaaggagcccactgagaaagctcccaaaggccaaaactgcaacaatttgagcaacaaaataaataatgtagcattggaacataatatgaagtataaaataaacgagtccatagtgaaagaaatggttgaataaattgagaataaacatctcccatgtagaattccgggtagtttatgcaggtgctctgccttcaaacatatggagcataactccccacttctgtttgttgttttgagacagagtctcacgctgtcgcccaggttggagtgcagtggcacaatctcagctcactgcaacctctgcctcccaggttcaagcgattctcctgcctcagcttctcgagtagctgagattacaggtgtatgccaccacaccaggctaatttttgtgtttttagttgctatggggtttcatcatgttggccaggctggtctcgaactcctgacctcaagtgatccacctgcctcagcctgccaaagtgctgggattacaggcgtgagccacctccccacttcttaagcgtggactgcatatagtagctaccttctaaaggacacattcaagaaagggacaaaaagtaaccttatggaggaacctgacaaactacctcagccaggcgatgaagggtaacatcagcataaacatgatgaagcaggttgatagtatgtatccttgatgtgtgatgagaatggtactttacctctgtggccttcctccaaaaaactgttacgcatggtctgggcacggtggctcatgcctgtaatcatagcactttgggaggccaagggaggatgattgcttaagtctagcagttcaagaccagcctgggcaacatagcaagagcctgcctctaccaaaaaaaaaaaaaaaaaaatgtaattagctgcacatggtggtgtgtgcctgtggtcccacctactcaggaagctgaccaggaggattgcttgagcccaggaggttgaggctgcagtgagccatgatccactgtactctagcctgggcgacagagcaagacactgtctcttggaaaaaaaaaaaaaaacataaacccatctagtcataaggataacatcaaacaaatcccacctgagggatgttctacaaaatacctggccatacttttcaaaactgtcaaagtcatcaaaaacaaggaaagaatgagaaaccgtcaaaaccaagaggagtctaaggagacatgagacatgacagctcagtgtaatgtagtgtcctgggtgggatcttgggacagaaaaaggccattaggtaaaaactaggggaattcaaataaggtatggactttctttagtaatgtatcaaaattggttcattcattatggcaaatgccacctattagtggaagatgttaatagggaaaactgactaatgggtctgtgggaactctgtgtactatctttgcaatttttctgtcaatctcaaactattccaaaatgtttattttttaaaatgctttttttttttttttaagacagggtcttgctgtgtcatccaggctggagtacagtggcataatcatggcttactgcagcctttacttctcaggctcaagtgaccccccatcttagcctcccaagtagctgtgagcacaggtgtgtgccaccgcatccgactaatttttttttttttttttaatttttgtagagacagagtgtggctatgtcgctcaggctggtctcaaactcctgagttcaagtgatcttccagccttggcctcccaaagtgttgggattacagtcatgagccatcacacccgaactaaaaaatacattgtttttttttttttttttgagatggaatttcactcttgttgccaaggctggagtgcaagggtgcaatctcagctcaccacaacctctgcctcctgggttcaagcgattctcctacctaagcctctaagcctcccgagtagctaggattacaggtatgcaccaccatgcgcggctaattttgtatttttagtagagacggggtttctccatgttggtcaggctggtcatgaactcccaaccttaggtgatctgcctgtcttggcctcccaaagtgttgggattacaggcgtgagccaccacacccggccatgcatttttcttattgttattttgtaagcgctgtatttcctcagggggagcagagggcaagggaaagtttccattaagctgggctaatgatgagcgccctgtccctgccctgcctggttttgttcttggatgtgccagagaagcgggagggaggaacgtgaggccacctggccccagttccccagctggtggaaaacagaggcaaggagggttactgcaggaaagtgtgaggatgtgcaggaacctgttagatgtgcctgggccaggttggagaaagctggctgctgtcaggtcagctcctgggaagacggactcatcacggcctcactgagccacacggcatcacactgcactggtgtggccacacacttggtggcaagtggagacctcattagaagggtgaggggcctgccctatttgctgtcaccatccctgacctagtgacagatggcagctggtattcagggcctcagccatccagcctagaggtaaaccaagcatgtttcaccagtgccccctattccccgagacctctcaccttccttcagaggcctgcggtggtggaagggcatgggctttggaggcagcagatacgggctcgggctcaggcaccaccacttgacagctgggaaaccttgggtgatttacgtaagctctccaacctgtttctccagttgtaaaaggcaggtaatacgcctgcttcacccaccttacaaggtgagtcaaggatcaaatgagaggcggtagaacaggagggactgtcttaggggttattgtttgggcagatgaggcaagagtggtcagcactttttaagcagcaggtaaagccttggtcttggggctaattggtggtagagttttgtatatagtcacgccacatcatgttttggttaacaacagaatgcatgtacgacagtggtcccgtgagatcataatactgtatttttactgtaccttttccatgtttagattcacaaatacttaccactgtgttccagttgcctacagtatccagtacggtgacaagctgcacaggtttgtagcctaggagcaacaggctaccccatctagcctaggtgtgcggtagggtaggccatctaggtctgtgtaagtgcactccatgatgttcacacaacgacgagatcacctgactgcttttctcagggtgtatcctcgtcattaagtgacatgactgtattaggttgctttcagttgcaggtaatagtaagtccaactcacattgtctcatataactgaaaatccagaggccacgtgggcctcgggagccatgtgatcagggccatgtttctcagtctcagagcatatgtgtgtgctggcttctcacgctggtttccttctaggtagaaaaatggttataggaggcccaggccacacattctaccatcccctaataggaaagagctgcttttccccgtcatacagtgtccacgacgtctctctctttagactattttaggtcacatgcttgtgctctgaattgatcactggggcaaggacaaatcatgctgactgacttaagcctgagttactcccaacctgaacaaattactggggcaaagagagataaatgaaaattattggcttagccagtcagggcctgggcctggaggtaggagggcatcaagccctggcaaaccttttggctgccacaggtggggaggagtggcatggatgccaacagtgtccctacaggcttctatcccagtaatcactgtttgagagcaatggccatttgcctctctagcatccatttacccctttggcaacaatcctaatttgcatttggagctttgttccttccccgttcccaaaaactacgtgcttctaatgaagcctcatttccctctcaagggagaggcatgtgaccaagactttggccaattggtgcactgtattctccaagccattggactgcttcttggaaaggcacttggtttgattaaagccagtgaaacacaatgatactcgctggaaggaaggctggggtggaaccaagtgtgcctgtctgctgaacctgaccccaacaggatgtagggtctggagctattggtgctgccattttacaaccccatggagagcctgagattgaggctaatgtagaaagatggagggagggtgaggaacctaataggaccagcctaattcctggactctgcagtttgagtcaacagattgcctcttttgcttcaaaagccagtttgggtcaagttttctaccagttgcaatggtgtcttaaatcatattatactttccttcctattcaaaggcagtaaatgccaccaagcagtgcatgtgggcaactagaatgcttggtccaatccttactatttgtcacttgacactaatattacatgaaaagcatcccagtcatgaaaggtatggaagaatgctcaataataccaagaagggagagcagtgtggaactattgtttactggtattattatctcaggggtgtttcccctgattatccatgaggttctctttatgctccgctccctgtagggtctggcaggcttcccaacttatctggtgttcaaggtgggcctaagggtgaaactggagcccacctggatacagagatctgtattagttttgtgtttattgatgggagaaagtatttggggtcatccaccttgaatgctacataaatgtcttctactcaaggagtcacataataaatctctccaaaggtgcggtggctcacacccgtaatctcagcactttgggaggctgaggcaggaagattgcttgagcccaggagctcgagaccagcttgggcaacgtggtgaaaccccatttctataaaaaatacaaaaattagctagctgtggtggtgtgcacctgtggtcctagctacttgggaggctaaggcaggaagatcttctgagcccaggaggtcgaggctgcagtgagccatgattgtgccactgcactccagcctgggtgcatttgagcaagatcctatctcaaatgagtgaatagacaaatctctaggactcaccttgagggctgtcaggaaaccctctggaaaaggatgtctcatggatatgccagtgtaaactctcctgaaataaccctttctcttctctacccagactaactttacctaccctttggggcccaactcagatccctccttcttggtaaaaagccagttcagactgaagcaatcccttctattaaccacattaattattactgcaattaatctcacaataccttgaggctccgagtgctgagaggattttgccttttgttatagtgatggaaaggatgcatttcaatatgttgccttgcagtgcaaacctttgttaacagggcaaaaatagcacagggggcaggaattacattcctggatgtgcatttggcttatttacatggatttgggtgccctctaaggacaccatcttctctcccctccaagagggtcaggccacaggacatccatgttcttggcctcccatgggagagggtctctcgccagaggaagggaaagccaagtggccacagagttccagcctgtccctgtgacagcccctgcctctggccagacatccacccacccttgctaagtcagcctgctctggggctactaggcccagtccttgctgtctgtcggagacagaccatgaagtgcagtgtgtggagggctgggacatagcataccgaattaccccagggagcttggaaaacatctcttcccactctctgttaggcccacggcttcctctactggaggagacggcatgtgaggatggaactcggtcattcctctgtcaccaccgatgtgaacagtctggaatcctgcacacaggagactgacgatccctgagcaacctttagtagctcctaccattgggcattttcttggtacagatcacaaataagagacatcatagaaaatgttattcttttattatttcaaggaggtaatacatagcccaatatggcaaagcaaaagggaattagaggcagcaaatggccaggtttttctaagcgcctcatgctgcatctctgagctcctgtctgcccgcagcccacagctgcttacatgaaggccaggtcagtagacagatggcccaacttgatactccactgactgagaaagggctcaatgtgcagcacagcagaggcactgccaggacccagcacgctgggcggcaccccacgctgccaccaccagctacagaggctagtgccttagtagcagccagtgtgtctagcacttgattttattcctgtgagcctagagtgggcaggacgtgaataaatcctgagtcataagttaaggtgaaagacttagtagtgttaatactcttggtgagaaaagacaacacagtcttggaggagagtgggcttggagtctggtggaagaaagatagaaacccccagaagggcctcggcctgcaggcactgccttgaggccatcagagggggttttcacggtacatgatagggaggagtgaggcaggtgggcactggagggctgtttcctctggcacagttgaactagagggtcactttccactcataattggtttcctaggtctaagtcaccacacctggggctgaagcaagtcttgcctgtgcaccaagcgtggccttggaccctggagagatgcaaggctcagttctccagtgttgaagtggaaggactcccaactgaaggagatctttctctccccacctccagctcttttcccttacaaatgaccagggtgcaagtcgagaggcagaggcacctcctggtgcaactccaccacagtcttacagagaactcatcttggtgggacccaaagcccagccttggcatgaagcagacttattccacccatcggagggcacccagtctggtgactgaatggtggcgtgcaagtgggagtcagcagtggctctggatgccgtaatactcagatgccattcatctctgtgtgatcgtcctggctggagagctggtgaggagggactgcttcctcctggcatgcactgttcaccaaccacaccacgtgggctgatagatttttggtttgacaggtgtggaaagaatttttaaaaccagccactgtgttctccaaacccagagccattggttttgtttgacaagaaagtaccaagagaaccacagctccactgaggctaaggcttgtgtagcacagaatgcagtatgtattgaaacgtataaaccttgtctgactggggagatgggtgagcaaagagctgccgggacccaggtcctctagtcggttgcaggctctgccgatgtctcatccttaagctcctcaaaacctgggactggcttctgtagaaagtatgtagtggcctggatcaccttgtctggtccaatgttgtacactgggtgagtgggctgctgcaaagagaagaaaaggtgccagttaatcaccccggtggtccttgaaaacataacacatcctttgctccatgaaaggcacttctaagaatttagtataaggaatcagagatacacacaaagcccaaaggttcaaaaatggtgtatttgctaaaactatctagtacatgggacacaggttaatatacagccattataaacacgcatttaaatatttaacgatacaggcaaatacttacaacatattatgtgagaaaacagtatgtacaatactatctcaaactgtttttttttttttttttttttttttgagagagtcttgctctgttgcccaggctggagtgcattgacacgatcttagctcactgcaacctctgcctcctgtgttcaagcaattctcctgcctcagcctcctgagtagctgggattacaggtgtgagccaccacgcctgggtaatttttgtattttttttttttttttttgagacggagtctctcgctctgtcgcccaggctggagtgcagtggcgggatctcggctcactgcaagctccgcctcccgggttcacgccattctcctgcctcagcctcccaagtagctgggactacaggcgcccgccactacgcccggctaattttttgtatttttagtagagacggggtttcaccgttttagccgggatggtctcgatctcctgacctcgtgatccgcccgcctcggcctcccaaagtgctgggattatttttgtatttttagtagagacagggtttcaccatgttggtccggctggtctcgaactcctgacctcaggtgatccacccgcctcggcctcccaaagtgctggggttacaggtgtgagccaccacacctggtctcaaactttttaaaaagtgtatttgtacctgtgatgtatataaatagcaaaaattgtacccataccaaaatattaatagtgatatgattgtttttcattttcttttttatattttatgtatcccaattattaaaacaataaacatgtatttacatttataatcaagaaaaagggggccggacgcggtggctcatgcctgtaatcccagcattttgggaggccgaggtggatggatcacccgaggtcaggagttcaagaccagcctggccaagatggtgaaaccccgtctctacaaaaatacaaaaattagccgagcatgatggtgagtgtctgtaatcccagctagttgggaggctgaagcaggagaattgcttgaacccgggaggcggaggttgcagtgagccaagattgtgccactgcactctaacctgggcaacagcgagactctgtctcaaaaaaaaaaaaaaaagaaaaaaggaccacaaccctaatatgtagtaaggctgtcagatcatatttaaatatataaacaaaatttaaatatgaaatttaaattaaatagatgttattctagtacatcacagaaacccaaaagaaactttagatttgacacggcataatcctaggccaatattcaggattctcccactgtgggataatgaagaaggggacacaactgcaggagagattttaaaaattttgagagaatactaggagcaacctcatgctgaaacatacaaaaattcagataaaacaataatttttaaaaaccaggaaaactgccaaaattgacttaaggaatttttaaaggcctacatgaagaaattagtaacaacaattgcttattctgccacccccacataccttaaaagatactagacctagatggtttctcaggcaagtagtatcaaacctacaaagaaacagataatctctgatctatacaaaccttttaaggactgaaaaaaaaaaaggggctagtgcgggggccaggtacaatggctcacacctataatcccagcactttgggtggctgaggtaggatagcttgaggccaagagttcaagaccagactaggcaacatagcaaaaccctgtctctacaaaaaatttaaaaattagcaggttctggtggtgtgcacctgtagtccctgctacttgggaggctaaggcaggaggatagcttgagcccaggagttccaggctgcagtgagctatgatcacagcactgtactccagcatgagtgacagagtgagatcatgtctctgaaaaagaaaagaaaaagaaaaaaggtaagaggtgcaggaagctacccatttaattttatgaggctatgatattatcctgaaacactggaaaaggacaatacaataaaattttagatcaatctttcttatgaatgtacatgcaaaaaaatcctaaataaaagtactaggcaaacatactggcaaactgaatccagcagtatactgaacaaaacacacagacacagacacactgcctctactatgaccaagaagggcttatcctgggaatataaggcttaacatcagaatattaatgaaacatatcatattaaagaagaaaaatcagatgcggagaaagcattcaataaaatttaacactaccttatgactgaaactaacaaaaacaacctagcaaatcaggaataaaagtgaatatcactaacttgatataatgtaactatcacaaccttacagtaaacatcatgcttaatgatcaggttataaaaagccttcccattataatcaggagcaagagacgaatgccctctactacctttagtcagcactatgtggggatcttacccaacaatacaaggcaagaaaaataaaatggaaactaacttagacaaacttaaaactattaaagagttcaacaaggtggctggacacaagatttataaatattattagcatttctatacactagtaacaaacagttacaaaactgaaaataagaaaagattccagtcacaagagacatgaaaactgtaaattagacataactctaaccgaaaaaaaaaaaatgctagtcctttatggaaaaaattataaaaaaaacactgaaagacattaaagaaaagaaaaattatgttcataaatggaagcctaaatattgaaaagaagtcagttctctttgtactcctgggaagacaggaagaaaaaaaaaaaagttggttctctcctattaatctaaaatgtagtgcaattccaataaaaatcccattagaacttgacaggctgatcctacaattcacaggaaaaagcaaaaggcaaagaatagccaaggcaattttgaagaaaaacaacaaggcagacaggacttgcctacctgttttcagacttgcttaaaagagtgcagataggcaaacagaccaaaggaacaaaataagagagtccagaaacagggccccttcatgtatggaaacttgagggtgtggtacacatgagatacacatcagcaggaaaggttgtagacttcagtaaatggtgctggtcaattggttatccatatggaaaaaagataacattatatccaagcctcaccatacacagaaaccaaatccaagagaattaaaaatctagattaaaaaagcaagctttagactatttagaagaagttacacttaatgacttgctgcattgccttgttcattcccttcatagcacgcatcacaatttgtgatgtatttgtttaatgtgtgcctccttttgtctgcttccctcaaaaaatggtagagattccttaagttaatcctcacctaccctcccccaaaaacaaacccctgaatgacagaaaagacaaatagatttgaccacttcaaaattaaaatattaaaatatttttgtggggaaggggtgctgggggcagggtctcactctatctcccagactggagcaaacagagctcactgcagccttgactacctgggctcaagcgattctcccacctcagcctcccaaagtgctaggtttacaggtgcgaaccaccatatctggcctaaaatcttctatttaacaaaaaaacaccaaaaacaaaatgctatggtttggatgtggtttatttgtccccacaaaaattaatgttgaaatctgatccccaagatggctatgttgagaggtggggtttgtggaatgtgtttgggtttgaggggtggatccctcaggagtgccttggtgctgttcttgcagtagtgcgtgagctctcactcttgctctggggagtctggattagtccttgagggaatggattagttcctgcaagggtaggctgttataaagccaggatgctctcaggctctcctctgtttgcatgggttggcttcccctttgatttccacatgttataatgcagcacaacccttgccagaagccagagccatgcccttgaatttctcagtctatagaaccatgagctaaataaacctcttgtctttatacattacctagtctcaggtattctcttatagcaatgcaaatcagagtcacaaaatgaaaagacaagtcacaagctggaagatattcactacacacatgtaactgatagaagattagtattaaaaatatacagagaactacaaatacttaagggaaaacaactgaagttacccatcagtaagaaaatgagcacagaatatgaactggcagacaattcgcagaagacaacacaaatggccaacaaacatttgaaaatattctcaacctcaccagtaatcaggaaaacacaaaatcaaacaaataccacttcacacccatcaaattggcaaaaaggaaaaggtctgactatggatcgattcatcttacacaaccacactggggagcagttacagaggtatctatcaaagatgacaatatgtgtccccttcaacccagcaggtcccctcctggagacattctaacatgtgaacccaatgagacagataccacaacgttcactgcaacactgtaatagcaaaaaattgataactagcaggagaacagagaaacacactggggtacatttatataagggagtatcatataatagttaaaatgaataaactggagcaacacatgtgaacacagataaacctcaaaaatacaatggcaagtggaaaaagcaatgcagaatgactggtacagtaggtaccattacaaaaagtttgaaaacatgcaagcaactgttatattgcttataaaaaactatatattgcttatagatacatatgtatgtagcaatagcacaaaaacatccacaggcatgatacatgtcaaatttgggacagggttacctctggagaaggagggaggaaaaaaaactggaagagggctacataagaggcaaatagggggaaataattagggcctggaaaagctgggtggtggtttttctgattaagaatgaggttgagcatcttttcaactatctattggccatttgtgtttcttccatttgaaatgtttcccaattaaaagaaacaaagatggggccaggcgtggtggctcacacatgtaatcctggcaccttgggaggctgaggcaggcatatcacttgaggccaggagtttgagaccagcctggccaacatggggaaaccctgtctctactaaaaatacaaaaattagctgggtgtggtggtgcatgcctgtaatcccagctactcaggaggctgaggcacgagaattgcttgaacctgggaggtggaggttgcagtgagccaatatcatgccactgtactccagcctgggtgacagagtgagactttgtctcacaaaaaaaaattaaaaattaaaaaaaaaatttttttaaacaaaaaaggaaggttacaatgacacagatgagaaaataaggcagtgacctagatggtagcagcaggccatgtttacactggtggaagtagggcttagtaagagtagggaactgcacacaaaaattcatgacagtctgcatgggccctgtgatttgatcactggggacagtctccattggattcatgtccaggctcacgtctaggctcagagcacctccaggttgtcctcagctggctgcagcagtgagcatcctgccctcatagggctattgttttttcaggaaagcagacaaacacacattaaacaacacaccaccaactgagtaaagtactacaaagaatatgaacaaggcactgaggcagagcattctggggatctcattctctgaagagatggcatctaagctgagcctctgggagagacgcggcaggctgtacagccagtgccgcatggctgcagtgctatcacgagcctgctgggactcacagcctcagagtgacacgtaactgtggcctcctctaggggaagctaataccagcagtgggctaggtcctcagccctgggataaaggcacaacagctctttgacagatcagaccgcccatctggaaccctgagcttgcccagaggtgcgtctcctctgtggtcacatcctcactaacggctgcacagctcgaagggcagagggaccacaagcttccgcctgtccacacaggaaatgcagagccagttctgcttacttggaaagccttctgtccgcgaggtccctgtggagaaggggtgtgaagccctgcacccgtcttaccagagcgttttcgggcacacccaggaccacatcatgcaacatggctccgctgccgaagtgctgggctatggacaggccgctcaggcagtagcaggtgtggtagaaatcacgcgacctgtaaggacaggcagctctgagcaggcgctcctctgctccgcacacatctacaaatgtagccacaccaattcagagaccactggtgcaatcacacgtccccccccatcctccatgtggctagaggaggcatggttttcccagcagtgttatttaaagccccactggctgagcacagtggctcacacccataatcccagcaagcaggaggctgaggcaagagaacggtttgaggccaggagttcaaaaccaacttgggcaacatgggagaccccgtctctacaaaaaattaaaaattagctaggtgtggtggccgatgcctgtaattccagttacttgggaggctgaagcaggaggatcactcgagcccaagaggtgaaggctgcagtgagtcatgattgtgacactgcactccagcctgggtgacagagtgagaccctgtctcaaaaaagtaaaatacaataaaataaaagccccatcctccagccctgcccagcagtgggaactgtattttttttcttttctttctttttttaccttaaactattaaaggaaactgtaattttaaagtcagtctctccagctgtcttctggaaagggctctccaggggcagtactaatgataaattgatacacttctctagaaaaatacctaaatatctagaaatgggccacatccttcctgatacattgtgggaccaggccttcccctggatgccaagagcagcaggacgtgtgctgggatgggggaagacagagggtgggtaacaaaggtgagaggacttattttatttccctttttctaacacataagccatctcagatttgagcttaatcatttaatccactctataatagttgtcatgattacagtctctgtttacaacactgaggggttttaaaatcctgtatcctattctatttagatcagtttttttttgttttttttaaaaaaaagaagagttatctacccagcaatctgtttccctgtctgggggagggggttgcatgcaggctgggggacaagacgggcagctggaggtgccaagatcaatggcctcaaggggtgctcccaactgggtgctttttcccatacaacctagcgctatgcaggtgctgaaggtgacacctctgctcttgagatctggctctgagtaggcctgaggtgcacgcccctctgctctctcctcccctctcccttccctccccagagagaaaacactcacttgccaggtttatccagaagcccccccgcagggcactggcagcacatcaggatgtactcctgcagggcctgctgatggaacatccagtggctcatgctaagggcagggtcacctgttgaagggcaaagggtcagtaagggcccggcagatccagccaagtatcaatgacctaattccactttctcacctgggggaatagtcaaggtttcctgctccccttcctcttccattcattcttggtacaactgctatcttccccatgtcctacgcacagcatgtcccttctcctgaactttgacatgtgtcaaagagcagcaattcaaagtggcactttcactttcttgaaatgcaccctgttaacgtggatggtgatcctcaaccacatctctggcaggcagtgaaccagcctagctgtttagcttaccttcccagactgacctcggtagctgctcccaacttggtccataactctaccctggacttcaagagacattccctctagcatatctctataacttgttaaccagactgattagctcagagaactcttaatgggtaataaagtctgtttcttctacttttctaagcctaaatttaattgatctccaaagggaattctctaacttgtctctcagctcaaagaatttacctaagaaacattactagtaactgccctcctgcatcatatgataccctagcaaaaactgggtattctggtaatactactaaggtactgacaagcaactggacttcttcactctgaagtccaatcactatggtcaaagaattctgtgggccacacagttatcaagtgggaaggagggacaaatcacggacaggtgtgcagaaacatctgcatagaaatcgattaaaaatatatatacatataggatgtacactaagtccttggtcaattttatattttgatacctgggctaaaagatgcctgacaataaatcatttttaaaaaaaagatgcccaacaattggtaaatggcacctgaaagctaattgttctttcttccagtctttttggttctatgcgtttttctacctagttattataactgtgtagcttatgtttttcacttataccactataggcataaattttctattctattacataatctgcatagccatcactgtgaatagccatatagtatttcattaagtggacatataaggtaactgtatcataaaaagaactgagctaaaaatcttatatatatgtcagtatataaattcctatggtgggccaggcacgatggcttatgcctgtaatcccagcactttgggaggctgaggggggttgatcacgaggtcaggagatcgagaccatcccggctaacacggtgaaaccctgtctctactaaaaatacaaaaaaattagccggacatggtggtgggcgcctgtagtcccagctactcaggaggctgaggcaggagaatggcgtgaacccaggaggcggagtttgcagtgagctgagatcacaccactgcactccagcctgggcgacacagcgagactccatctcaaaaaaaaaaaaaaattcctatggtgaaaattataaaagtttatggtatcaataacctttcccattttggagaaaatagcaaaaaagaaaaacgggggaaaagatttctaaaaataaaaatgaaaagtttatgatacagtctataaagagattgaagcaaaatattaaactgttgaatatttcctttttttttttcttttttgagacagagtctcactctgttgcccaggttggagggcaatggcacgatctcggctcactgcaacctccgcctcccgggttcaagcgattgtcctgcctcagcctcccgagtagctgggattacaggcatgcaccaccatgcctggctaattcttgtatttttagtagagacatggtttcactatgttggtcaggctgctctctaactcctgacctcaggtgacccaccctcttttggcctcccaaagtactgggattacaggcatgggccaccgcacccagcctaaattgttgaatatttcaaacagacaataagaatttattaaatttctttaaaaagagacacagaggaaaagggtttccaaggttgagcactaggtgagggacagtggccaggtgacatttagaggccagggacaaaagcttctcgtcttcaaccctgagtcgcactcagccctgaaacacccattaagagacacaggaaactaagtccgacctaaggagaagcatccaatctcccatctcaggctggctgcaggccacatgctttgatacacttgcactattttaattcccttcctttcttttcctcacctgtaagcacagtgaactttgttgtagaagatacatacatatatgatgggacttcactctatcttcttttacttatttccaaggttgtttccagttccttgccattatgaggaatgctggactaaatctttgtcaatattatgtatgcttaagattattttcttcaaatagactgaccacggtggaattattcggttaaagggaataaacattgttaaggcttttaatagatactgataaactgctttaagaatttatagactactctcagcacaatccctgtggagtagccctgctctgcaggagctgtcaaaaataaatatataaataaactaaaaataaaaacaaagactttatatagctaccagcaaaatttaaaattttgctataccacctccagcattagcacctttttgttgttgttgttgagatgctatcttgctctgtcgcccaggctggagtgcagtggtgtgatctcagctcactgcaacctctgcctcccaggttcaagtcattctcctgtctcagcctcctgagtaccttggattacaggtacaagcccccacgcctggctaatttttgcatttttagtagagacagggtttcactatgttgatcaagccagtctcgaactcctaaaatgatctgcccaactcggcttcccaaagtgctaggattacaggcgtgagccaccacgcccggccagctttagttactttttaaaagttatcagcaattaaaatggtaaaaagaaatagtacctgatagtttattttgatttgcatgcctctgattactaattagggtgaaatttttccataacttgtgtttaatatttgcatttccttatgatggtgtctgtttggcctaatcttctgagatccaatagccaattttattaatctagctttttcttatacttgccccttgtctacatcatatgctgcatctattttctcctttttgctcctctgttttggttatgtgagtttaaaactttttaaaatttttaaaatttaattaatgtaaaacatatatatgttttatacttaatattgtaatcatactattgatttttccttcacgatttcctttttaagaaaatatttaatgtgtatggggatttttggggggatgagtgatgaaaatgttctaaaattgtcatgatggttcgcaactgaataggtaagttgtgtggtatgggaattatatctcaacaaagctattatttaaaaaagcatatttattaaactttaggaaactgcattacacatctgtacaaaatgtacatatatttcatatcctataacaaataaaagactattattataaggtaaatgataacctgtggctaaaattagagtctgaaaagaaaacgctatgtttattatataaaaaactatagactgtttcagtgacttcctatattattaaagcatagaagctcaaagttcaaaagctctacaaggagcttccagatatcctgaatttggacaccagcacacataatcacaacaagatgaaagcagatacgattatagggtgataactgcacactggaatccaccttttaaatcctttctacctcttcctgaaattataggtcgccattctaatctcattttgcatttcaaaggttccttttatctaaaaaaatcaaaagtctttccacaccataactgataggtgcagccatctgtagctcaatttcacaggtaggcaagaaaattccagggtatgtccaaaagaacatataagaaaccagtaactaccaagccaagtggaaactcacaggcctgctgctttcttattgctccacaaaacaaaaaaacaaagtaactcactgatttagtcagcacttgagatttcttaagccttttttttttttttttagacggagtcctgccctgttacccaggctggagtgcaacggcgcgatctcagctcactgcaacctccgcctccggggttcaagggattctcctgcctcagcctcctgagtagctgggattacaggcaacgtggcaccatgcctggctaattttttgtatctttagtagagatggggtttcaccatgttggccaggctggtcttgaactcctgagctcatgatccacccacctcggcctcccaaaatgctgggattacaggcttttgtgtttttttgagacaaagtcttgctctgtcgctcaggctggagttgcagtggcactctctgcctgcaacctctgcctcccagactcaagtgatccttctacctcagcctcctgagtagctaggactacaggcatgtgccaccatgtctggttaactgtttttaattttttgtagagacaagctctcactatattgcccaggctggtcttgaactcctgagctcaagaggtcctcctgctttggcctcccaaagtgctgggattatggtcatgaaccaccatgtccagcattttaaggtactaatagtaattccttcttctactcaaatactgtcatttacacatagaaggtagtcaatggcatggagccactgatggtcacttgctgggtcagggcatggcctagacccacgtgctgcactatgtagagcattctttttgctttttagttagcaatatgatcaatgccttttaaaaaatgtatttgtacatttaccaaaataaaattagtaatgcacatggtttttttttttttaaaggcacagtataatacagaaggatagaaaatctaaaaagttggccaggtatggtggctcacgcctgtaatctcagcactttgtgtggccaaggaaggtggatcacttgaggccaggagtttgagaccagccaggccaacatagtcatatcctgtctctactaaaaatagaaaacattggctgggtgtggtggtacacgcctgtaatcccagctacacaggaggctgaggcaagaaaatcaattgaaccgaggaggctacagtgagccgagattgcaccactgcactccagcctcagcaacagagtgagactctgtctcaaaaaaaaaaaaaaaaaaaaaaaaaaatctaaaaagtctccctccttctgtcttctgtctgcttctcttctcccaaaggtacccattgttcaaggggttttgtgtagggttccaggaaaagctgtgtacatctcgggctgtgtgcccaggcactgctccaggccccgcccccttacacttcatgttgtatcttgcagagctttctatatcagcccatggtatgcagctactgtttggagagatttttattatttaacccttaaccttttgataggcacttaggctgctattgaaactccacttcaatatacatcctttgctaatatccctgcaggtaaattcctgacagtgcacttgctgtgttcaaagggtaagtgcccttataatttaaatggatgtctccaaactgccctccaaaaaatgacttaacctatttacatccccactatcaaattacctgttttctcacactctccccaacatagggtatcaagttttttaatctctgccaatccaataataaaaacaaatagtgccactcttttgattagcatttcttttactacaagtgagctaaacaatttttcgttggattaatggccacctactgtggttatgagcagggcagggttcagatgccagctagtctggattcacacaaccacatactaacccttgtgagtgccaatcaggtattataaagcaatcacttaacctcactgtagtttgtttcctcatctgtaaacaatggtacctatttcatagggttgttttgagaattaaatgagaaaacatatgtgaaatgctcagtacagcccctggcatacagtgagggcttgggaagactccgctaccagtagtagtggcagttgtagtagaaaaagtaagaaggacagttctttcactgggacctctttcttcagatcctttgcctgtttttcagttgggttgtccatccatttcttactggtttgtatgattttttttcaaattaaagaaattagccattcatcacttgttataaatatttttcgcacctttttgcttgttttgtttgtagaatttccctgtttctgtaaaataacttttgttgtctttttttatgcaagaaatacctattaactatagaaagattagaaaatacaaacagaagcaaacatcacctgtaacttcacatcctagatactttctatgaattttttgtagtcaactcttcactaaaaatgggattccacacatattgctttgatatgatcacaatatattgtgactatctttctacactgcatccccttttgactcccaaagtcagtattttgccctcctttcaacacacttcccttctttacagactcctgtctgttccaagttcaagagatgccctgtgtctgagaagacaacacaggccttctcccagccaatgaaaaaagctggaagcaccaagattcataggcacccttttccatagacaaagctttgaatgccactaagccccctagaacatgtgctacaagaaacaattaaccagcagcccccctggaagactttgacaggtggtgctcctgttatagctcattccacatttccctgggattgcagaattactgagtcttatccatgccagggacaggtttgtaaaagactgaccattttaccaggggcttgacctcaccagttccaaataaagagatcaccatgaccccaagtttttttctatcttagaaatgttgggccaggcacggtggctcacgcctgtaatcccagcactttgggaggccaaggcggacagatcacctgaggtcaggagttcgagaccagcctgaccaacatggagaaaccctgtctctactaaaaatacaaaattggctgggcgtggtggtgcatgcctataatcccagctatttaggaggctaaggcaggagaattacttgaacccagggggcagaggttgcagtgatccattgcactccggcctgggcaacaagagtgaaactccgtctcaaaaaaaaataatactaaaataaaaaatgtttgacttggggaattcctgacttccctactggtggtcaaggcagagactgtgcaggctccaaagtcagtgcacttgctgacagtgcacttgctgtgttccaagggtaagtgccttatatgccttaatactgacacctaaagcccagtgggcccaggccgggaaaatgggacagaggctctgcttactttaattcagtgtcagaaatggtcacaactcaacaactcaaaggaaattaagaaactaaataatgaggctcagggccgggtgcggtggctcacgcctataatcccagcactttgggaggccgaagtgggcggatcacctgaggtaaggagttcaagaacagcctgtccaacatggtgaaaccctgtctctactaaaaatacaaaaattagccaggtgtggtggcacgcgcctgtagtcccagctactcaggaggctgaggcaggagaattgcttgaacctgggaggtggaggctgcagtgagccaagatcgtgccactgcactccagcctgggagacagagcacgactccatctcgggggcggcggggaggggggaagacggggggtggggggctcagaaacaggaaaaaaaagtatggggaggggcagaaaagaatctcatcttttacatttgagcagttacattatccaactaagtccgaagaacagcttctctttggacccagggatctcattccaaaaacagatcagcaaccagcagggccccatgacttcctctctcccacaggtctactcagagacacctgctctcacatcaagtacaccagaaagatggtgcaggagttagcaggcagactgaggtttcaagagatagagagagaatgttcccagactttttgctcactaactacttcggttttgcgttcccatttgagaccccacagaaacgaacgtggatttctctactccaatggtgcaggtggaacaaactcccatttaggcttattcaatgaatgtaaaataaaacatttctaatagtgacaactctgcagccagtcagacacggcgagtctcttctccatggtgtaggggcaacccacccctacaacccacccctacacatgggttctggttctctacccctttacgcagttgcctttcctgttgctgttgcaacagtgactgttgcaacactgagggttttcagctctgccctgcacccagaggaggtggcaatcaccacagagcccaggacaggagtgggctgctccttccagataacgcagaagcagcgcccacttcctccccgctccccgtagcaatttcaaggaagctcattctgtcgcagccaatttgaagaagcaaagaatgacactaaaccaatgaaactaaatcttactctgcattcgcatgccccacggcatgaggttccacactgggcactcaaaatccaggatagacagagctcatttcaacccctctaaaaaagcacgctgggcttccagactttgtgagtagtggagggaaatcatccagccccaagtgaacagctccccaggctcaccttgggcgtgcagtgcgcggtggagcaggggcaggagccccgcctgccagaaggagtagcagccatccaccagcttgttgcagcggccctgaaatcctccttcaaatcgcatctgccggcttgtcacccattgctgaggagacacagatgggaaaggcagttgtaggctaaaagagacaaaatccagcccgacagaatctccaggagtcaatctgtgggatggagggtttcccatcttgtggcttcttggcactctagttttggtgctctggttttctttccttccctccccacactgccatagacacagagtgaagcatttaagccaacgctgtagaggcatccagcactgatctctgctcaatgcctggcagacaactaccttttcctgggttccaaagcagtgccagtgctgagaagataaagaggccaagctggtttgtaaggagaccttcaaagtctcttaataaacatggcttaagttggaaattgaaggcaagactaccagtagctcatttctcattacttccctgctccggggagtttattaaaagcagataaatggaatttggtactacatttcttttttttttttttttttttttttttttttttgagacggagtctcgctctgtcgcccaggccggactgcggactgcagtggcgcaatctcggctcactgcaagctccgcttcccgggttcacgccattctcctgcctcagcctcccgagtagctgggaccacaggcgcccgccaccgcgcccggctaattttttgtatttttagtagagacggggtttcaccttgttagccaggatggtctcgatctcctgacctcatgatccacccgcctcggcctcccaaagtgctgggattacaggcgtgagccaccgtgcccggcctggtactacatttcatcagatgatctcaaactgctcctgacttttacttggcacctggggaaatttacccaaggtctcttagcaagtcactagcaggcctgaaagcagaagccattcattctaattaccaaatgacaactctgcccagtctgtggctgatataagaaaatcttttactttgaagctgtaaaataggtcttggtcttgatgtcactcagcggtcacacacgataccaccattccttgcttatctacaagttttctaaacacactctactacaaagatcaagatagtcatgggtttggtccctcagaatgagcagaaccaactggctgagcagatatgacatttccatttccctccctagaccacctaggccgttccagccacggacttacagagctgcctcactcaactgaaagggtacaggggagggtacttcctgtttctagagtcttactaggtaaaggtcctgaaaggagccactgggacccttgatggaagtgggggccagccctcccctaaaagctgttgtttagattattccctcttcaaggcaacacctgcccatagagagtcacagtcacaaatgcttaaaagagacagaaaacactgtactgcaggttcaggtactaatatatcctcggttgatcttaaatgaaccagggcttccagcatgtaatggaagtgggctaagcattactcaggcagagagaaagcaggcgctgcagtgggagtcggttcctcatttctacttaccgcagggcttaagtgtttttaagcagactaatttactttttccagtgcctaagcccatggatttgttctgtttccttgggctataggaattcatacttcagatatgggtcctacttctcccaaagcaaatggaagggagtagtctggattagagcaggggtccctaacccccagaccatgccaggctgcacagcaggacatgagtggtgggtgagccagtgaagcttaatctgtatttacagctgctcctcactgctcccattactgcctgagctccacttcctgacagatcagcagcagcattagattctcataggagcgcaaaccctactgtgaaccgtgtatgccaggcttctaggttgcacgctctacatgagagtctaatgcctgatgatctgtcactgtctcccatcacccccaaatgggactgtctagttgaaagaaaacaagctcagggctctcactgattctacattatggtgagttgtataattatttcattatatattacagtgtaataatagaaataaagtacacaataaatgtaatgtacttgaatcatcctgaagccatcaccccccgtcccacccccaaccccaggtccacggaaaaattatctcccacaaaactggtcccttgtgccaaaaagattattactgtgggttagagggacactaacatttattaagtacctactatgtgccaggctgtttataaatgttctctcctttaaccttaaaaaaataaggattgttatccctaccttataaaagaaaaaaatatcaagctaaaagagattagacaatttgcccaaggactcatgtctcaaatgtagtagggacagggttcaaatctagaacactgtctttataactgaggcactccctaatcacattccttatctctgcctgggagatgggacttttttgtttcatgccttattggtgttcagattttaaaacatctgagaaactcttaagttcagcatacaaagttggctgtttcagcatgagccttcaagccttcatgaatctttaaaaagactacaccgggggaggctttctgaaggtggaggcaagacactgctggttacatgtctacagggtacaacagaaactctccaggaagctcacgatgggccgcataacgggaggctggcatctgaactcagggagaggaggtgcatgtcagttgcagctggtttgctttgacgtcatggtcagggggtacatgctccccaaatgacatgacggggaatgccttctccctggtggccgtggaggtgtgtgtgtttgtgcacccactgatcatttaactacaatctagtgactccctgaagctgactgctttctgagtttcttctgaatactggccaggagcgtggggtccagacataaatgttgggctgccttctcaatgcaattagccagctctgcctaaacaactcatttaaatgtaggtactaaatgtttacacagtgcagcaggtaataaaagtttggtttcgaaatgctgcaaagctcttcttgtaacttttcctcttaggaggttctttctataacacacgataacctctaattctacgaaactgaagtataaggaaggtactctgctcacaccagatgtctgcagcacacagtctatgtagtctacacactatgtaaaaagctctaagcaggaagacagaaaggcagaagggggagccaagacagagcagctgctcactccttcctctgtgttggaacagagctaactctcttagcccttcccatagccaaactctcctgaagcctgcatgtctgagtacaatcacatcaccatgacctggggcctgagagggggatggctcaaaagatacttactaataagctcttcaagttcaaggaacgttccctcttgaggattaccagcgcggccaggccacagaaggtatagccaccatgggcttccatccctggtaccccgccaatgccaccttcccagttctgacacctaagaagagattgagaaaagcagaatgagtggccagtgagtggacgtacacaagaccaggaccatcctaggtggcagagaaaaagttcactcagattaaggtgtgaaccatcacaactatgaatgaaaagatgccaactaattaacttttggaaatgtcttttcaaaaaaaaaaaaaaaaaaaagctgggcctggtggcacccatgtgtaatcccagctgctcaggagactaaggcaagaagatcacttgaggcgaggagttcgaggctgcagtgagctatgatcacaccattgtgctccagcccgggtgaaagagtgagactaggtctccaaaaaatgtaagtataataaaaactgtaaaatgttaaaaacccagacacttagaaacagcctacttgtgtaagaaacataataattcaaattattactctttgggaaaaagttataaaatcatacatatacatatatgtacatatatacacatatatatacatatatatatatacacacatatatatacatatatatacatatatatatagtgataaccatcaagttaaaataaaattaaagagtgattgttgattctagtgatcttttatttttgaaacagggtcttaactctgttacctaggttgactgcagatcatggctcactgcagcctcaacctcctggactcaggcaatcctcccacctcagcctcctgagtagctgggactatgggcgtgccccaccatacccggaccattttttgtattttttgtagagatggggcattgccatgttacccaggctggtcttaaatttctggcctcaaggaatcctcccaccccagcatcccaaagcgttgggatgacaggcatgggccaccgcacttggcctctggtgatctttgagtacaggtctactagtaatatttttcctttttgtttttctatttgttcaaaaagtttttataatgaacctgtatactattaaaaaataaacgttatttttaaaaattataattaggccaggtggtgatggcttcttaaacagcctgcagaaccatgagccaaataaacctcttttctttctaagttacccagcctcaggtattcctttatactgacacaaaatggactaacacaagaaggacaagaaataactgacttagtagaatagagaaacctttcctacccaaaggatagggatgggagaggggcaacaaaaagcaaggtgatctgctccaataaaaggctccaggattagagatacagggaacctccacaaagtggaatgcgtctgaaccaagtttgttggttgcaaacttatataagaatcagacctttaagtcccctactcaaatccagcagaagatgggaagtttcagaggtttaatcaaaaggatctgagttccagaatatccaacaagctaagaggaggagggagcactgtaccaaatgtgattacgtgagagtcagtaatctcaacacaatacccccagccccattcctctgtgtatttcacacaaggctgccagtttcataccccaagcaggaatttagaagattcctctctgagggaactgataagcccaagggaaaaaccctacagacactgctttgagaattccccaatgaatggcttgatcctgcccactctcgcagagctccccagcagcttttcagtgctggatccttaaatatgaacagacagctgtagagtaccagacatttgaccacagtctctactatgaaagaggagaccaaaacaaacaaaaataaattggaggaaataagacagggagcaaaagaaaactttttaaagttgtatctttagataaaatattatatgaagtaagactattgagaggacaaaatatccccagaaaagaacaagagagtagataaaaaagtagtcaggaagtaaaagtagtcagggaggaaaactaaaaataggattacaaaaataaaaacaagaggattagaagataaatactaagagaatctctcaaagtataagaagaaggattaagagatggaaacgaaccatgcaatgaaatatttttatttttatttatttatttttgagacagagtctcgctctgatgccgaggctggagtacagtggcacaatcttggctcactgcaacctccgcctcctgggttcaagtgattctcctgcctcagcctcctgagtacgtgggattacaggtgcatgccaccacgcccggctaatttttgtatttttagtaaagacagggtttcaccatgttggtcaggctggtttcgaactcctgacctcgtgatctgcctgccttggcctcccaaagtgctgggattacaggtatgagccactgcacccggcagtattatttttatttatttatttattttgagatggagtctcacactgtcacctgggctggagtgcaatggtgcgatctcggctcactgcaacctctgcctcctgggttcaagcaattctcctgcctcagcctcccgagtagctgggattacaggtacccaccaccacacccggctaatgttttgtatattttgtagaggctgggtttcactatgttggccaagctggtctcgaactcctgacctcgtgatccgcccgcctcagcctcccaaagtgttaggattacaggcgtgagccaccacgcccagcctcaaagtattcttaaaagtcagacaatcaaatgtactaatgggatgtcatatttttaaaaggctggccaggtgcgggggctcatgcctgtaatcccagcactttgggagaccaaggcaggaggatcatttgaggtcaggagtttgagactaacctgatcaacatggcgaaaccccgtaaaaattagctgggtgtcgtggcgcacgcctataatcccagctacttgggaggctgaggcaggagaatcgcttgaacctgggagaaagaggttgcagtgagctggtctgcaccaccgcactccagcctgggcaacagagcaaggcaccatctcaataaataaataaataaataaataaataaataaataaataaataaataaataaataataaataaataaataagaggctgggcatggtggctcacacctgtaatcccagcacttggggaagccgcagcaggaggattacgtcagcccaggagtttgagaccaacctgggcaatgtggtgaggctttgtctctacaaaaatttaaaaaattagcggatggtggatgcctgtagtcacagctactcaggaggctgaggatgatcacttgagcctggaaagtcgaggcaacagtgaaccatgatcgtgtcactgcactccaatctgggagacacataaaacaaaaagagacgtctcaaaaaaaaaaaaaaaaaaaaaaaaaaaaaaaaaaaaaaaaaaagggcccggcgtggtggctcacgcctataatctcagcactttgggaggccgaggcaggcgatcacttgaggtcaggagttcgagaccagcctggccaacatggtaaaaccccatctctactaaaaatacaaaaattagctgggcgtggtcgtgggcttctgtagtcccagctactcaggaggctgaggcaggagaattgctggaacctgagaggcagaggttgcagtgagccgagatcacgccattgcactccagcccgggtaacaacagcaagactccgtctcaaaggaaaaaaaaaaaagagcaaacacagaaaacacaagagaagaaattatcaaagaaatactgtaataaagaatcttggtactaaagtatatgcacttccaaatcgagtgcccagcaaaatgaataaaaataatccacatcaagattcatcatcaagtttccaaacaagaataaacattccaggccaggcgaggtggctcatgtctgtaatcccagtactttgggaggctcaggagggcagatcacttgaggtcaggagtttgagaccagcctggccagtatgacgagaccctgtctctactaaaaatacaaaaattagtcaggcatggtggcaggcacctgaggttgcagtgagctgagattacgccactgcactccaacctgggtgacagagcaagactccatcacacacaaaaagaataaagattccaagccgctaaagaaggacaggatggggatagaaaaagagagacagaagaaaaaaacatacagagaattaagaatcacaatggcactgccaggtagtacagcacagtggaatccatttgatttctctgtatttctgcttaatataaaatttaaaggctgggtgtggtggctcacgcctataatcccagcactttgggaggctgaggcaggcggattgcttaagctcaggggtttaagaccagcctgggcaacatgggaaaaccccgtctctactaaaaacacaaaaattagccaggtgtggtggcatacacctgcagtcctggctacttggaaagctgaagcaggaggatcacttgaacccaggaggtcaaggctgcagtgagccaagatcacgccactgcactccagcctgggtgacgaagtgagaccctctttcaaaaaataaataaattaaattaaattaattaaattcagtatcccaccacttgacatataaggaaactatgacacagagcagtggaataacttgtccaagcacaaagctaattagaaatggcaggctggccatcgtggctcacacctgtaattccaacactttgtggggctgaggcaggaagattgcttgaaaccaggagttcaagaccagcctgggcaacacagtgagactctgtctttacaagacattttaaaaattagctaggtgttgtggtgcacacctgtggtctctgctactcaggaggctgaggtgggaagactgcttgagcccaggaggtcaaggctgcagtgagccgtgatcatatcactgcaatccagccagggcaacaagcaagaccgtgtcttcaaagaaaaaaaaaaaaagctgggcgcagtggctcatgcctgtaatccttgaactttggtaggtcaaggtgggtggatagcctgagcccaggagttcaagccccacctggacaacacagacagatcccatctctacaaattttttttttaaacattagctggttatggtggcacgcgcttgttgtcccagctacttaggaggttgagatgggaggattgcttgagcccaggaggtggtggctgcagcgagctgtgatcacaccactacactccagctcgtgcaacagagcaagactcggtctcaaaaaaagaaagagagaattgaaagacagaggaagaaagaaggaagagaagaggaaagaaagggcaaaactgggattcaaacccaggctgtctgagttccgtatctagtctgtgcctaaccagtcaacccccctgcaaatgacagctgtacactgaacaaaatacaaaaaaacagcttcctgagggttcagctgactgaaaaagggcaggcagattttggtggagtttgaaacttggaacagagaacagcatgcagttagtccctcccttcccccacaactttttctctctggtttgccctcaggatggcagccatagcccagggcggcagcagcaggccaggggtcaggggtcagggcgggcagccaacactctaatgggaagccaaccatccttctggcaggaagatgcaggctgccagaaactgaggacgaatccagaaacaggaaagtcaaagaagaaaaatcccaaattctgcatttaaactcagttcaagtttccacatacgtgctggggaaacaaagcaacttctaagcaagaactgagctctgagctgctgcatgagtgacagtttgtagcttgagtctgaccaagttgactgcctgctaaactgaaaacatcaaccccttttggggcaaaccaacagaatccataccgttctgttgtatgacacctccaccatcatatcacaatgtctaggacacaacacaacatcactcagcacaggaagactcatggagctgacatgccaactccaggacacacagatgtggaaattcccagacaagcaatttaaagcagacattataattccatacttaccacagcaaaatgaagaaaaatgcactcataaagaataaaaagatggaaaatctcagctgagaaacacaaaatataaaagagaaccaaacacaggcagtgcctactctccagctctcaactatagctgccttaccattgagcatgacagtcctcaatgaactctggttactattatcagccttattaacaatgacattggaagccagaagataatgaagcaatgcttacaaaattcagaaagactacagtttataccattgccaagttagaaatctctaaccaaataattaagtgtgagattagaacacagatacatgcaagatattaaaaatgtatctcccaggtacccttttttgggatctgttggagtacaatacttcatgaaaataagaaaaccaagaaaaaggaggacagggacttcaacgaaggagagaaatgaagtgaatttcatgctgaaaggaagcttcgggatgcctgctgtgtagcaagctgagagcaatctgtccagactgaagcaggagggcagagggctccagaaggggcaactcaaaacgcacgtgtgcacagagacaggttacctgaagggtttgactatgtttagagtaattttttatagctctgacagacaatttgggaaggaattcataagtacattcatgatatatccattaactccaggaaaatgaaactcatacaaaaaagtaaacatgatctcagcatatcatctggtatcactgtaaattatatttatatggtaatacatactactttgataaaaataaaatttttttaactaaaacagtatctcagcttggctatcattccatcatagtatatatgtgtctactataccttttgcttctttttttgagatggagtctcgccctgtcgcccaggctggagtgcagtggcgtgatctcggctcactgcaagctccgcctcctgggttcactccattctcctgcctcagcttcccgagtagctgggactacaggcgcccgccaccatgcccagctaattttttgtatttttagtagagacggggtgtcaccatgttagccaggatggtctcgatttcctgacctcatgatccgcttgccctggcctcccaaagtgctggaattacaggcgtgagccaccgcacctggcctgctttttttaaactatgaaatatttggagcatccaggaaagtacagcaaacaaaatatagaacatacacgtatctaagacctagcttagaattagccatatacacttcaggtctttgttgttgttaactattacagctgaagtctcctatgcagacttatctcatttcctttgctctcccctcagcgggaatcactatgctaaatttggtgtttatctttcgtatacatgtttttatattattaccacatgattcttctcagaaacaatacagaattctcttgcatgtttcaaattttaagtaaatgtgctaatctgtatggtttttttgtatttttttcttttcattctttcaactcaacatagagatttttccatattgatacatgtaactctagttcattcattttcactgctacattatattccgatgcaactataccacacttacccatctcgtgcttatgagcactgaatctgctttcagcttttggctcttataaacaagtcctgtgctcctctctcccattcgtgtgtgcaagggtttctgtgggagtggaattactgggtcctacgcaagggcacctttgacatactgtcaaattgctctaaaaactggttaaatcaattcaggctctcactaatattgtttaccaaagttttttatctttgccaatctaaaatataatataacattaaagaaagtttggaaaaaagaagacattttaagtatttaaaaaaatcattagataaccctaatggatctcctgtgatttttgtatttccttccaagtccctctgcattttctttatttttctgaagtagtgtcgtgaccgcctgctctccaagaggccaggagaaaccctggcttctctcaccttgctatccattcagcagtgccctcaaagaggtctggagtgatgatgttggtcagcgaggctacggaggcagcacagtatgcgcttctggaaagacagaaacgggaaacacattaagctctacggaagagctaatgaggctcagtgaactccgcgggcggactgctcgccttgcctagtaagctgtaatcacctcctgtcctcactcttggcacacggtcagtcctcctgggtctccaactgagaggtgtgacattctatttggatagagttgctcacggcatggcttcagtgaaagaacatgacattctattctccctacctccacatggtccaatctacatcagaggaaataacagccatatcaattcatgtcaaaagtggattcagctcttctttcaaagacctataatggttgccataaatctatggtatcattcaggtacttctgatatgctcattcatttggatgttagtactgtttcagagccaggatttctgtttacagccttgacacattaaagattaactatactttttctgcaacagataaactgcaaaacaggccaccaaattgtaatagatcaaacaaggataggaacaggtgagtccactccaatacagtccttaaacctctagagggagaaaagagccttgatttcaaacctctcaccagtacacacacacacacacacacacacacacacacacacacacgttaaatgaaaaaggcgcacgtctatattttttgttttgcttttgttttggtttttattgagacagggtctcactctgtcgcccaggctagagtgcagtggtatgatctcagctcactgcaacctccgcctcctgggttcaagcaattctcctgtatcagcctcccaagtagctgggattacaggcgcatgccaccatgcctggcttatttttctatttttagtggagatggggtttcgccatgttggctaggctggtttcaaactcctgacctcaagcaatccacctgccttggcctcccaaagtgctgggattacaggcataagccaccgcgcccgggctattttttaaaaaagcattattaggctgggcacagttgctcatgcctgtaatcccagcactttgggaggctgaggcaggtggatcacgaggccaggagttcaagaccaacctgaccaatattgcgaaaccccgtctccactaaaaacacaaaaattagctgggcatggtggcgtgtgcccgtagtcccaactacttgggaggctgaggcaggagaaccacttgaacccgggaggcgggggttgcagtgagccaagatcatgccactgcattccagcttgggcaacagagtgagactctgtctcaaaaaaaaaaacaaacacaaaaaattattatacttgatttaggatcattcttgctgttccatcctcccagccctaattcttctcggggcacattttatttcagcttctccctctgtcatggtatacacacacagactgcctttccttcccctctatggttttttcaaatacccggcacagggaagacaaaaatcattggtttgaattctgctcaaaaatccttctcctggccaggcatggtagctcatgcctgtaatcccagcactttgggaggctaaggcaggtggattatttgaggtcaggagttcgagactagcctggccaacatggtgagacctcgtctctactaaaaatacaaaaattagctgggcatggtggcacacgcctgtaatcccagctacttgggagaccgaggcaggagaatcgtttgaaccccagagacagaggttgcagtgagccaagatcccaccactgcgctcctgcctgggcaacagaaagaaactccatctcaaaacaaaacaaacaaaaagtatattcctaagggctcctaagaaacataaaagaagggcctagtttccatcttcttttttttttttaagataggatctcactttgttgcccaggctgcagtgcagtggcgctatcatggctcactgcaacctcaaactcctgggctcaaactgatcttgcctcagcctcctaagcagctgaggctacagatgcatgccaccacacctggctaattttttaaaaattttttgtagagacagggtcttgctgtgttacccaggttggtcttgaactcctggcctcaagtgattctctcatctcagtctctcaaagtgttgagattacagacatgagccactgccgctcggccctggtttccatcttactcagtatagatataacatgaagtcagacttactgaggtattccaaagaagtctctgcagaagctgcatgcattatgatcctaccagcatttttagcagccaaaggcacagtggaagtttagttccaccagcaggcattgggagcacacaagagtcacaagtgccaatgccaaatgtgatcatctaccagcagctaattttgaagatctgtctaatttccttgcaattgtaggcctcttaaagaggctcagatgcatttgctcttgaatcctattgtgacttgtgaggtaggaggcgacctataatacagtttgcctctcacaagtgtgaggactaagaagtgatgacagaagacaggagtcccaggtctcacgctgagatggggaggaaacgtaatacaaccttttcatgtatttctccccctttccctccacccagtcatcgcagctctcaaatttgaatttgtccactaactttccatccttgctgccatcacccaaatccaagccttcttcaacctggatcagtcttcctgctctctctccctccagccctgaaaccagagggcttttattggaacactacagtccatcactgcaattgggaaacttctaagaaaatacaaatcagatcacatcactaaactccagactccataggagatttcagggcctctgtagcctgttcccagcctgtccctccagctccactgctcccctgcccaccaggccatctacacttcaacactgaacttgtcctttcttgagcaacacatgctttctcaccaaacttctgcaaatgctagatccctgcctccaccttatcctcacagaatgatctagattatataacctagaaaggaggtctcctttcttaagaactgagaaaaaatagtgcttgctatgagttcactgtgatttgattttttacaatacactggaactacagacccttgagtaggctcatctctgaaactatcagcagtgtaacagagcagaaagatcatccagagactgctgtctatcccagaagggcagcgagctagtctccagatgtcaaactctcccatcactgctgcttttctccaagtcaaatccacccaaacaagcactcctgaggactggctgatgcttccaggcaaaggacaatgaaagaaatgccaagtgaaaaatgatggaatcggggtactagaaaccaggcaaagcaaggaaaatggatgcaatctgctagcttttctctatcattcatatctttaatcctttatgtaaatagaaagcacgggcacgaatggcagagcatcacccaaagagcaaaggtcagggaagaatatggctacagtgcttggcaggggaaccaagctgccttactggagaagtttcctagcatttatctagaacatataaataaagagcatagggaaaaaaaaagtgctggaatgaataagatagcaaataatcacagctgcaaaaggtatatgataaaataccaaaaggatcttgctatgatttgtttgcttttgcctaataatcttagtaggtttttaaaagctgcgtttcaagactgtgcatattttgggggaatagcaacagaacaggaacgaaaatgtagtgaacacgagggaaaaaaactcttttaacattttccttaagaagaatcaacacatactgatttacctcagtcgttctactggtttcactggtatacacagatcctaatctaatttttttggttggattagacaagttagagatagaagaacatcttgaactaaaggcctttgcagcctgattacctattatctgtaatgtattttatgctccacaatgttcgtggttttttcctcccctatactttcaaaccaatggttaaaccagatgcttaagccagactattaatcaacttgtgtagaagcaaacccatttacacataggcagtaagacagctttgctatagaaacctcacaaaatgtatttctcaactaaataataagaaaatggcataaaatctcaataagccactgtcttagagaaatggcttattcaatgaattccctgtatgcctcataagtaatctgccaggtgaggaagcaacttgcttggtacatcagacacttatggaagaaaataataatttcgagctaactggcaccaatcagttaatgcgattttattgcactgcactctcccggcccacaaggctctctgcacctcccagaaaaactctcatgtgcctcaggaggacctcagggattagacattctcatgatttcatcaaattcactcagaaggtatttactgaggccctgctggactttcccctcccttcctatctcagagaggtgaaggaatacattacaccatacagttatttatattgtggtatatcattttgtaccaaacaaatgtatttttaatttctaaaacaaaagcatttgtttcttatattttcacatttacataaaataagtcaagtgatcatgacacctgaggacatctgcatcacatctgaatgattctgacgtgtcactgacatgtcatcccatgtgtcattctgggacaaagcagcagcttccccatgatgttccttaggcttggcatctctaatggcagatgagctctagagtcaactgatgtggcagcctgtgcaaaaccccactcacctcacatccacctcacctccgacatgcatgagaaaggagccgtcaggttgcttcagggagtacaaatactgaagaagcttctctctgagaaacagggaaagaggtaggagaggcaacagtcagtgcgtgtcagcaggcggggaactcctctaggtttctgtcactgctggctttcactgtacctgttaatgatgtcataggcctcctcggtgccaatgatgcacaatgcattgactgctgcatatgtgggtgcaaggtgtggatactgaccgggtcctcctccaaagccaccttctgggctctgacacagctccaggaactgacacacactaggtacacagccaaagggcaaaaacaaagtcagagagcattcatgtcaaaacaccaaattcccactagattccaggcctttccaatgatcccccactccctcaaaagttgaggggaacctctcctcccacttgttgaatataacctctccccaaagggcttaattctctctccagctatcatcatttctgtctgccctcctctgagtttcgtacttaagcgcttgttggtcatgaagcagggaacacaaggctgggaagaaaccgactttcgtagctatggggtaagagtctcccgtgcttcccacacaaacctttcccagactttccactcaacttgctgccctggacctgtggtaccagcctcctcctccttgcctttgggaacctcccagcctttgaattttgccaaaacatggtgctcaactgcttctttccacactaaccatcctagtcaggatccatcacctaggcctatcatgaacatgtaaatagaggtcttctcactcccattgccacctaagcctctgtgggccactgatttctactccaccagtaagaagcaagttttgtttttttgtttttttttttgaggcggggttgccctcggtcgcccaggctgcagtgcagtggtgtgatctcagctcattgcagcatccgtctcccaggttcaagagattcttttgcctcacccttccaagtagctgggattacaggcgtgcaccatcacgcccagccaattttttgtattttcagtacagacaaggtttcaccatgctggccaggctggtcttgaactacctgacctcaagtgatccacccgccgcagcctctgcaagtgctgggattacaggtgtgagccactgcatccggctgaaaaacacatttttaatggagcctgcttccatggctgggagaacagaagagaggcaggctgctctcatgctcaccttaattgcggtaaacataagaggagctgcactgactcgccgtgagaatgcctcccagtctgcgggttcttggagaattctccacgttaattcaaacaggctcccattccctcactgaggggagctgttttctgagggtttgcctccaagcctggcatcaggctgcccagaggttacagtcttgctttaggtgaaatcaagagagccctatcatcagtccggggtcttccgaagtgcaccagaaagggtgccccaggaaagccctggttatcaagctgtttctccacagctcagcagggtcacagccttcccgccaggagaaacctccatttacaacaagcaaactgtctttgcagtgttcatggggccttctttcctgggcgctttcacctcattatttccttgctactgctgccagaaagactacatagcctactctccaagaagacacaagtttataactgtttgccaacatcacatttaattgctttcgatttcagagttcccattatccgggcagagaaagcaaaagcaaacgctgctgccttgctctgtgagttctgaaacgtcacaggttaaaacaacacatacttctttttgcacctacaattttactgtagaaaacacaaggattgaaactgaagttgaaaacaattatgtggcactatggtttttgtttttgattttgagagagggtcttactctgtcggccaggctgcaggacagcggcataatcacggctcactgcagcctcaacctccccagactcaagctatcctcccacctcagcctcccaagtagctagaattacaggcatgagccaccacgcctggctagtttttgtattttttataaagatggggtttcgccatgttgcccaggctagtcttgaactcctgggctcaagcaatcctcccacctcggactcccaaagtgctgaggtcacaggtgtgagccatcatgcccagcatgtgacacatttttaacagcaattaatttctgtagagaacttgaatttgttccttctttccaaatcgtcatcaattcttatgacatttcccagaaacaaatagttaataagctcatgccctaacaaaggctggctgcactagcataccaaaaggtttctgtaccacaaaaagttttagctgatacaaaacttaacagcacattttttaaaagaaagaaaaagagtcacctggttatccactccctttcccagctcctaagatagaatcgtgccgaacgcaacactactgaccctaaagcctcgaattagttaggatctgaatgtaccagacacaccttgataccatccctccatgccaacctccctcagctgacatgctgcatctgactgtctggggctgtgctagagaactggaggttgggcttctcttgatctcagacacttccgtattacagaacattctgatcccaaggctttccaacttgcaccttaaggaattggcaagttgactatgaactaccagctgtcattcacagacttcttagcaattctgaagaccaaaatgttaatgatacttctacatatttaaaaaaaacaaacaaacaaaaaaaaggagccaggcatagtggcttgtgcctgtaattccagtactttgggaggccaaggcaggaggattgcttgaagccagtagttcaagaccagcctgggcaacacagtgagaccccagctctacaaaaaaatatttttttttcccacaaatgtagggggagaaaaacttatcatagagacaagaagttcaccaataaataaaaaattacaagcaaaaaacattgtacaaacaccaagtggcacattttgtgaaaaacaagtattcacaaaatcattcctttagaatatgactgaaagctgcaatacatcaattttctttaacgtcagcaaggcatttcattctagcttacgtgccaattaccagcaaagtgggaaactatcttctatatcatggatcttcaaacccaaaatgtgtgcatcagaatctgtagaaagctaataaaagaatacagagacccagtcctgctgaggtggaaaagatcctgggcctttgtatttttaccaaattctcaggtgattcagatacatgcaaagcttgagccatcactagtccttgctgcacaactaaaattacttggggggtgttttaaaaaaatcccaacacccaagccacacctaattccaattaaaccggaatcactatgggtgggacccaggtggcagtattttttttaaactccccacgtgattccaatgttcagccaggtatcagtgcttctcaaacttgagttgcatagaaattacctgtggatcttgctaaactgcagctctaattcagtagaactagatgggtctgagagtcctctttttttttttttttaggagatggagtgtccctctgtcgcccaggctggagtgcagttgagcgatctcagctcactgcaagctctgcctcctgggttcaagtgattctcctccctcagcctcccgagtagctgggactacaggtgcatgccgccacgcccagctaatttttgtattttttagtagagtcagggtttcactgtgttgcccaggctggtctcgaactcccgagctcagacaatccgcccgccttggcctcccaaagtgctaggattacaggcgtgagccaccatgcccggctgagagtcctcatttctaataagttcccaggtgatagcaatgctcctggtctggggaccacattttgagtagcaatgagatacatctgtgctgtccaataggcagccactagccacatgaggcaatttaaattctcaattaattaaaatagaaaattcagctcttcagtcacacaagacacatttcaagtactccacaactaactgtggctagtggccaatatagaacacgtatagatgtttatagacacctatagacatttacagaatatagaacattttcattatcacagaaagttctgctggacaccaccacttttatcattccatcattaaagagtatgtaaatcttgtaagagggtcaagttcaaagcagggatatcagcgattgcctctcagccttataaggagtttacttgggactcttaggtgatggctgaggactgatctaaagtgattgattctggccaggcgtggtggctcatgcctgtaatcccagcactttggctgaggtgagggggatcacttgagctcaggagttcaaggccagcctgggcaacatggcaaaaccccatctctacaagaattataaaaattaaccaggcacgttggcacccacctctagccccagctactcaggaggctgaggtgggaggatcacttgagcttggggaagtccaggttgcagtgagctgtgattgtgccactgcattccagcccagacaatagagtgagaccctgtctcaatcaattaatcaatgttgattctaaacaccgtcatcagtttggatgaaggattcaaaggcatgtacagtaaataagcatataatacaaaatgagcagcaaaacaaatcagaaaccaataagaataaaacaaatgcaacaggtacaaatagcaagaattacgcttagagatggcaggggtgggggatgggtaaggcacatgaatatgggaaatgactaggaacatagcaggaaaagaccagtaataagggtccacgagttgtgaagaacaacaataaaaatgcttgttaaaagcatcataaatgcagtattagtcagaactgtatctggctctagcctccattttccacctcaaagggaattcacatgagagttgtaaaaatgactactttttttttttttaagtatttggctgggtgtggtggctcgtgcctgtaatccctagactttgggaggccaaggcaggaggatcacttaaggccaagagtttgagaccagcttaggcaatacagcgagaccttatctctatttttaaaataatataaaaagcttaatattacagacaatcacagtgagaaagctacccagcaaaatacctcaaatatacaaaggataattacataaacattctagtaggtaaaaactgagactaatttgtagcaagaagtatttaggttacataaaaaacttcagcactagactaggctatcatagacagacttaaggcctaggataagttataaaaattatagctatgttctgcacaattgggcaggtttaaaaaaaaaaaaacagaaaaaaagattacagctttggaaataggaacagtcatccatgggcagaacggcttaggaggggatgtaaatgcaagatgcatgagctggcatcacatcaagcttgttctcgtactaactaaaacagcttcagcttgatatagtgaagaggaaatctccttccctaggtagaatatgacaatggacaggtgaagacgggcagcatctcttgttgattccgggtggcctctgctgctcacagagtcagacgtgttatttgactcttcatcaagcaccggcaagtctctggatggctgctgttctggaagaatggtcaggtcgaaagttggctactataggccgggcgcagtggctcacgcctataatcctagcactttgggaggccgacgtgggcggatcacttaaggccaggagtttgagaccagcctggccaacatggtgaaaccccatctctactaaaaatacaaaaattagccaggcatagtggcatgcgcccgtagtcccagctgcttgggaggctgaagcacgagaatcgcttgaacccggaaggtggaagttgcagtgagctgagattgcaccagtgccctccagcctgggggacacagcaagactgcctcaaaggaaaaaaaagttggctactttagagcagagtttctcaactgttgacactggggctcagtaattctttggtgcagggaccgtcctgtagaggatatttagcagcacctctgacctgcacccaccaggtgccaacagcacctggccaggaaaaatgcccaggagacaaaggcctagatatggtgtcctcactgaaaggtaaggaaacatacaaactagacttaaaaattaaaaggaaaaatatttaaggggctattccggggataagctactaacaaccttttgaaagggaaaggataaaacactgaaatagcaaaatttgaatttatctttggaaaaatcttacaagctgaaatgtcctaaaatggtttttaagttaaaggcaatttttaaatcttacagaagctaaaaacataactttaacagtgcgatggtctccctgtgaattttattttgctctgtttcactgaagctgctttcagtaacaaagaatgggattctcattagaggatgcttccttcagtgccaaaaccattaagcaaagcaaatgtacttagtctagttccaaaatattaattcattttagataaacacatataaatgtgtgcatataacctcttaaaagagggaagctaggccgggtgcggtggctcacatctgtaatcccaacactttgggaagccaagacaggtgtatcacctgaggtcaggagttcaagaccagcctggccaacatgttgaaagcctgtctttacaaaatacaaaaattagctgggcgtggtggcacacccctgtaatcctagctacttgggaagctgaggcaggagaatcacttgaacccgggaggtggaggttgcagtgagctgagatcatgccactgcactacagcctggcaacaagagcaaaactccgtctcaaaaaaaaaaaaaaaaggccgggcgcggtggctcatgcctgtaatcccagcactttgggaggctgaggcaggtggatcacctgaggtcaggagttcgagaccaacttggccaacatggtaaaacccaatctctactaaaaatacaaaaattagccgggtgtggtggctcccgcctgtatgcctgtagtcccagctactcgggaggccgaggcaggagaattgcttgaacccaggaggtggaggttgcagtgagccaagatcgtgccactgcactccagtctgggcaacagagcgagactctcaaaaaaaaaagaggcaagctgaagtcctacctatggactgggcatggtggctcacgcctataatcccagtgttttgggaggctaaggcaggaggatcaattgagcccaggagattgagaccagcccaggcaacacagcaaggcactgtctctaccaaaaataaagaaaacattccaggctatgaatacattattcttgaaacctctgataccagcagtaacaacctcgccttgctggctttggtcagcggtcatagcagctgacaaaagtattttgtccactagagggaacccagcttatcatattgttccctaaacaaatagaagcacagcagtgaacaaaataggaaagagaaacctttgtgtaagtgtagggggcgtgtgtgttacatgcaggggaaaagaaggcaggaaaataataaaactgcagagctagactttttgactctaggtcaccttaatatatttgtatgaagaaagaaaactgaacgcatttcaaagcatttcatttccctgtgcaagataaataaaaaggcaatattctatttcagctagtctaaaaaaaatcttctatttatatagaagtccttaagatttatctgtatcttactaaaaataatctatttccttatgggtcagagccagtaggctttgttcataacaagtgttttctgcacctagaagtaaccacctcctaggcacaaagcaaaatacattattgggaagtctaagaaatgtttaaaagttcactaaatcaatgcgtagaagaaccacaggtaaagcttttaaggcatctgtgaagcagaaactctcattaactgtcaagtggtttttgaaataaggacaaatcagcttatttttaaaccattccttttttaattacaaaataataaaagatcattgtagaaacttcagaaaatgcaagtaagcttaaaaaaaatgttttgtttgtttgttttttgagacaacagtctccttctgttacccaggctggagtgcagtggtgtgatctcggctcactgcaacctctgcctcccggattcaagcaattctcctgcttcagtctcccgagtagctgggattacaggtgccagccaccacatctggctattttttgtatttttagtagagacagggtttcaccatgttggccagactggtctcgaactcctgacctcaagtaatccgcctgtctcagcctctcaaagtcctgggattacagccatgagccactacatccagccagaaagttcttctttttctttttctttttttgagatggagtttcactcttgttgcccaggctggagtgcagtggtgcaatcttggctcaccgcaacctccgcctcccgggttcaagcgagtctcctgcctcagcctcctgagtaggagccgggagtgcagtaacagaaggagactcttgtctcaaaaaacaaacaaacagcctcctgagtaggattacaggcatgcgccaccacgcttggctaattttgtatttttagtagagacggggtttctccatgttggccaggctggtctcaaactcccgacctcaggtgatccacccacttcgttctcccaaagtgctgggattacaggtgtgagccaccgcgcctggcctttttttttttttttttttaagacagagtctcactctgtcctccaggctggagtagagtggcatgatcttggctcgtcgcaacgtccacctcccagattcaagcaattctcctgccttagtctcccgagtagctgggattacaggcatacaccaccaagccaggctaatttttatatttttagtagagacaagatttccccatgttggccaggctggtctcgaactcttgatctcaggtgatctgccgaccttggcctccccaagccctgggattacaggtgtgagacaccgtgcccagcccagaaagtttataaaatcacttttaaccccatcgtccagaaataactactacatgtatctttctggttctatctatgcatatcatcatctatatttttaatgtatgtaaattaaatcttttaaactattttcatttcacatctctctatataaatacatatattttaacatacaaatatacacattcatatatttattgagacagggtcttgctctgttgcccaggctggaatgcagtggtgccatcatggctcactgcagcctcaaacccctgaactcctgtctcggcctcctgagcagctagaactagaagtgtgcaccaccacgcccagctatttttatttttatttttgaaatggagtctcactatgtcgcccagactggtcttgaattcctgggccccagtggtcctctgaccgtggcctcccaaagtgctggggttacaggtgtgatcatgcgtggccacatttatacattttttaatggttatatagtatttcacagaatgtactgcaccataaatgacttatgttttattttttaaatttatgtattttatttatttatttttttgagatggagtgtcactctgttgcccggactggagtgcaaaggcgcaatctcgactcactgcaacctccgcctcctaggttcaagcgattctcctgcctcagcctcccgagtagctgggatgacaggcatgcaccaccatgcccagctaatttttgtattttagtagagatggggtttcaccatgttggccaggctggtctcaaactcctgacctcaagtgatccacccacctcaacctcccaaagtgcttgggattacaggcgtgagccaccacacccagctttacatttaaaaaaaattttttttaaacattctctactgttgatatttaatttagattgcttccaatgaaaggccctttaaaggctcctctcttcctatgtgacattgccccagaagcggcgctgacacttcctcagaaaagccttcactataaaacaccaagtacacagcctagaaaaaaactcagtcgattttggctcgagttcttccacctcaggcaccccctgtgattctctcttccagtttttcatgggtctgcggcctcctccatccagcgttcagatccaggctcacagaaatccccattttttctttcttctctcacacccaactttcccattgtgcaagagtgaagggaaaactttccaaatatcctgattgtgtaggagtgaagggaaaacttcccaaacaatccccaggcccccgagctggtatttcaaaaacacacgaggctggatgtggtggctcacacctgttatcccagcactttgggaggccgaggcaggtagatcagctgaggtcaggagttcaagaccagcctggtcaatatggtgaaagcctacctctactaaaaatacaaaaattagccaggcacggtggtgggtgcctgtaatcccagctactcaggaggctgaggcaggagaatcgcttgaacccgggaagcagaggcagcagtgagctgagactgtgccactgcaccccagcctgggtgacagagtgaaactctgtctcaaaaaaaaaaaaaaaaaaaaccacgtgggcctttctttgacaattaaattcctgttactgcagaaactgtgtccaactctccttccagtgctggaagcagccaggcttgcagtggcatcccgatgatcaaaacaatgcacttgcctctccctcagaaagcatcctacgtaccacaagggttaatggcctaattctttattatcttccccatccacattcatcacaagacaccctgcccaggaaggcaagaatgagaggttattgttaagacagaatgaatgagacaatgtgcagttctgttcctctgacctgacaatgtgactgaggcaggggctctgtgaccagagaggggccccggctaggcctctgtgtgtcccagcacagctgcctccttgtgctgtggagaaacaaacctggctcagaagtctctcatcccagatgcttcgacctcaagagcaccagaggaagctgagaaattcgagatgctgcctagagcccatgctgcctctcagtggatctcttggatccaattcctggctgccctttcttattccaggtatccctaggactggagtcatgatcagtcttttcttctttaatatataaatggtgatgagtgtctgggaatgagatgccagatcacgaatgccatctgtacaaggatcttgggaagaagctcagttgcttagatctctaatcatcgatcaggtttaggaaaactgagagtcatggcatttgtatgccacaccagtaacacatccagtcccatcaagagctacatggtcgctccaagcaccgggagcggggaggtacttctatagaggtgcgtaggaaaggcaaaggcatttttgttcactggactggcacgtgcttccccacagaagctgttcaaatgcatactgtactttctggcaaaatcttgtctctcagagttgatgattaagacttttctcaaagaccagagtcaagagccaaaagaaaaggccacagaagaaaccagaatccttctcttggaagttcaaagtcttgttctacccaccagcttacattagttttctaaagtggaggagtttcaggaagttgccggaggtcatgagaagagcaaagatttctttgtggcactgtttttttccattccaaacaaacaaaacagaaacaaaacaaaatcccaaactcaaaatacaatttcagagaacaccccagatttcccaaagacagactcactctgtagccactatctgggggatgggttcatctagcagttccaagctgtgcaggatccaatagcagagccatgggcggctggcatccagacactgggagagagacaggagagaaaacatcccttattcacaatcactccaagacactgctgccaaggctgtatctgtctcactcccagcagcctggcaagggggaggagggcacccttgctcaaacaacaatcagtgaataaaggacactttgctttgtggccttagccaggagctgaaatgaccatctgttaaaaaaaaaaaaaaaaaaaaaaaagataacaaggctgggcgcggtggttcatgcctgtaatcccagcactttgggaggccaaggtgggtggatcatttaaggtcaggagttcaagaccagcctggccaacatggcgaaaccctgtctctattaaaattacaaaaattagctgggcatagtgatgtgcgcctgtaatcccagcgacttgggaggccgaagcaggagaatcacttgaacccgggaggcagaggttgcagtgagccgagatggcaccactgcactccagcctaggcgacagagcaagactccgtctcaaaaaaaaaaaagaaagaaaagaaaaaaaagacaacaggattaaaaaaaagatgaccctgaacccagtggatccctccctggcaggcatctaaggaaggctgagcagaggacttcctacaggccaggaggttaggggctgctattttctcggtatagaaccaaggagatatacattctctgaagagatttcctagcttaactcaatcactgattcaacaaatatttgatagtatctacttgtgccaagcactgtattagacactggggggatgataataaaatttggtttctaccgtttatttttttgagacagggtctcgctctgtcacccaggctagagtgcagtggtatgatctcagctcactgcagcctcaacctcccgggctcaagcaatcctcccacctcagcctcctaagtagctgggactacgggcacacaccactatgcctggctaattttttaagtttttatagagacagcatcccactatgttgcccaggctggtcttgaactcctgggctgaagcaattcacctgcctgagcctcccaaagtgctgagattacaggcattagccaccatgcctgaactggtttctgttcttgagatgcttgggatatagaatgtgtgtggttacctgtaggggaagagagcactggacagacatataagttacctcatgtctttctggaaccaacacgtgtacatatacctggagaaatgctgtaatggacgaaaacagagttttgagggagcacgtggaagagactgactaattctgcctggggagctaggaaaggcttccaaaggcaaaatgcagacggctcttgatcctaattaaaccataaatgattattgagcattcaaggctaggcagggtaggtaggagtactgccccagttttataaattaaaatatataaatgaggtccaaagattaacctttttcagattataaaaatagcaaatgtcagaggtgagacaagaacctaggtttttagagtcaatccagtgttctttccgttggcccaagctgctctcttcaaaactatgctgatatcccaagctgtggctaacccaccacctggaaggtaggctggtgagctactgaagacactgccagggatgcagcttaagtttgaatcccagctcctcatcttactcgctatgtgcctttgagcaaatgacttaattttactatgcccatttcattatctgcaaaaaacaagagattgatctacctcatgtagttacaagatttaaataagagaatgcaactgggcgcagtagctcacgcctgtaaccccagagcctcaggaggctgaggcaggtggatcacttgaggtcaggagctcgagaccagcctggccaatatggtgaaaccctgtctctactaaaaatacaaaaattagccaggcgtgatggtgcacacctgtaatcctggccactcagaaggctgaggcaagagaatcgcttgaacctgaggcggaggttgcagtgactcacgatcatgccactgcactccagcctgggaaatacagcgagactccatctcataaattatgagagaatgcatggtaagctttcagcacactgttcaataaattgttagctgatatggtaccaactgtaacataactattgaggacttgagtcaaggattgaaaattcatagcccacaggccaaatctagcccatggatgtgtattgtttaactggtagtagctgcaacatttgtcaggagagtcacatgaaaacgtgatttccggcttcatttggaggaagaaaaaaaaaaaaggaaacaaagatgatttggcaaccctgggtctgcattcccagatggcagtaatgggcaggaaagaagttaagggcacagggtctccagttagcctcagtctccatgcagcccacttcactgatttatgctgcctgcctgggccctacaggcatttgagttggcaaatcattgccacaaataatcaaatgtggaacccaaataaaaagcagattaaaaatagagatgctgctctgtgttaagcagggcagaaagactggagacttcctgttcacattcaccctttgcctgccgctcagtcccatccaacatctgtcccctccaccgtcacccagtcctgacgttgctctgggaaatattaaagatctactcttaaacagtaatgttaaattgcaaggaccactctctatactggtcctctagtcagtatagaaattagatcttattacaagaaagggttttttgtctctttaatgaagatatgaaaagtaatgtacttactagaaggagtggtgaagttggaaaatttgtaaccatcacgatacagacttaacaggtttggacaatagtcctcaataaatgagcgagaaattagatcagcttatagggcaaagggttaagggtgaacaggtaactggcatttagccagctgtcaaggaggtctagataaagcacgtgaaccccttagtcatcatctagtaacagaagaaagccccatcctatctagggtgctccactcactctggaagagactaggttctgccctttcagggctgagtcccagctctgtgacagcaccctacctcctgccagagccacagagaacaaagagtgactctgcaacaggtcagccccaacagtcttttacgtttaaatagaaaaaggaggaggatttggtggataatttgacagcaagagttcctgggtaatgtgtttacctcataggcatctgtcagttgtcgaaggcctcttttcagataatggaagtgcttctccctctgcaaaacaagcctggaaagacaaacagtttataagcccattctaatagcttatgcttccaccatacacacgtatgtgcacgtacacacacacgggtaaacactcagcttcaggacgtccccctgcaatcactgactggataaccagcaacttctctggttccaaagagcaactaaaccagagaaaagaagctcttgtctgaatgtctctaaagcatctgaaaaccatgccagctgacatttagagtgcgattgtctcctaaaggcagtgactttgggctaacggaaaagccgcaatgagcacacgcagccaggcaatgacagtccacccagaaacttcctccagcatctaagaacagatatctttgtgcctccccatcctataagcaatttaaatctgagcctcgccacttccctgcctcagccgctgtcatttcagtcaccccgtctgggatgacttctccaaggcccataatttactccctgcctgcctctcggttatccaactattattctctccctgaaattccacctcccacgtgtgacccacagccctggccagaggaccgtgttctgcagccagtcgctgtccttggctttcaagtcagcaatactggctttaagatggaatgtgccgcccatggccacctgcacaggccgggcaaagcacagaggctgcacttctttcttggtctggcagaagagcctgtgtgactagggaaggaaacaaaaagcacagattgtcaagatgttccccgtgcttgcagattacagaaacaaaggaaagagaaccattccctttgctaggtagtcaattccacaattgtttatcaaattcccactgtacttggctcagagtaagagccttcatgcagtctttttttttttttttttttttcctgagacggagtctcgctctgtcacccaggctggagtgcagtggtgtgatttcagcttactgcaacctccacctcttgggttcaagctattctcctgcctcagccacctgagtagctgggattacaggcacgtgccaccacacccagctaatttttgtatttttagtggagacgggggtttcaccatgttgcccaggctggtcttgaactcctgacctcaggtaatcccctgccttggcctcccaaaatgctgggattacaggcgtgagccaccgcacccagcccttcatgtagtctttacctcaaaaactcttccaattcagaaatgaggtaagtatatcaatggctacaaggaaagaatgggtaggttttgcaagggaaaaacatactactgaggctcaaaagggaggggatatctcatgaagaaaggaatgatcaggaaagtttgtgtgaaaaaggaggaatgtgcgatgagtggccctggcagaaggagaaaattttaattcaattttaattcaagtttaaatagctgcaggtggctaatggctactctactatgctgcacaggtatcaagtgtacaagaggagtgacaggtgggagaatctgacctcaatacagggatgaaagaggaatgggaggaaagcaggagtactgccccagtttaaaaacaaacaaacaaacaaaaaaacaaggatctgggatgctgactaaggcatttctactcaatttactaggcaaagggaagtcctgaaggtttttgagatgaggaaagaaatgatcagaactgtgctttggagaaacagtaggtagtcagtatgtgtttacaaactgaagtatctgaaaatatcgcagtgggcagacagatggggtggggagacagggttagaagctctgaggagctgacccagttggggctacttagggcccgaactagtgtgtgacccgtgatcagctgacttttggatgtgtgggtcttaggatgctgggactgcattcaggtgatgatgtcaatcaggctgctggacacacacgtgaggctcaggagagggattcaggttacacacacagactacgaagcatttgtctgcacacaagtgacaggtgaagccacagaaggtgagagggcagagagagaagtttggaaacaaaactgtgggaagacccatctctaagggtttggaggagccagtgaaggagagaaacaggagagtttacatatgctagggaagagcaaaggaagtgtcatgtcacaggccatcagggaggagagaatttcaggaaggtgtttaacagtggcagatgctgcagcaagactgaggggaaaagacaacaaaccacagaagggctagagacctccaagagcattcagagcagaggtgaaggcaaattgtaaacaagagaaggccagactcagtttctctttcaggaaagtccactcaggacgcagggagcacccatctgtgtgggcagagtgttgtccagcactggggtagaggctgctctgtaccctagagcgacagtccagaggtggacacacatgtgaaaatgacaagcagagccctgtccaataaacgctgtgatcagccacgggaagagatggagggtcagaaaactcttcccaaagggaagagcattgagtttaaggctggaaagacatgagttaagcaggcaaaatgaagaaaacaccatgacacatttgagttagtttagttcagctggatcaaaagtacaaggcagtaagcagagaaattccacattagaaatgcaaaagctcagaggaaatccatagggaaggtctgtaaagaggatggaggagggctgggatgagggtatagtaggagaggtgagcctggaataaggaaggatgctgcattctttgagcgagaaatgatgggtacgaagctagcgaaatataggtctctgatgtgggaagaaggaaacaggaaagtcaggtgggtcagcctcgattttctcaggaactaggagtcaagatggtgggagagctgtggagtggccacggtggtgggtgtgttagggaatctacatgagacgaataaaaggattataaggcagttagtgaagcgccagtgaaattaagaaatataacatgttggtgaagccagtcagcagcctcaggagaaaccaagcctgctgacaccttggtcttagacttctggcctccagaaatgtgaaaaaataaatctctgtggtttaatgcaccccatctgtgataccgtcttatggcagcccaagctgactaataccctcaccggtccttcattctcaactcacctctatccaaaaatcttttctgtgtaggaagttaagaaagaaaaggtagagctcttcctatttttacctgaacaattcagccccaaaaccattcaattacatggagcagaataagacaggtttcgtgcaggacttgagggggtgcagggtgggatgcaggctgtcagctcaagtggatgaggagggcccccgtctcactgtgcagagggtgacaggagagcaagtgggtaaatctattaaggctatgggaagtcaggtttccactgtctgagaaggaacttacacatctatgtgtactgggtaatgatttaaatagaatttcttatgaggggtgagcccactgggcttccagactcttcacaatgtgcctccacccacactactctccaacctcatctccgcccctgagctctggtcatgctgccttctttgagctccgctcctttcagtctcctggctttagcacatgctgttccctctgcctggaacactctccccatcctttaagttagccacccctattccacctacagattcagcttaaatgtcactttctgtaagaagccttccctaacttcccaatccaaattagattctcccagtgattctctctctcaaattatcccatcggtaactgtatatttgtgttcatttgtttaatgtccacctcccccactagaccaagagcccagcaggggcaggcccagggctagccttgctcactctggcttccctgagcccagcagagtgtcctgtcctttggagactctctagatactgctgctgaaagagaggatcacacaaaggcagcagaatggaatgagagcaaagccacttcctccccccaaacctgggccatcctggaaaacatgcatttgattgtgacagatgagaggacaggggattcagtccattgctggttcctggggactttctaaactcactaaagccaggggcctctctagtcaaaaaataagcacctggcatgtaagcaataaagcaatcgaggaaaggtgaacttatttgtgagaccttggaaagaacaacagtaagaagggaatacatcctctacctgctcaggatctgggaaattctaaaattgtatcacatacaggaatagtagaaaacacgggagctaagctggtgcctgtgagagacctgctttgaggactttaactcagagtattctggcttcagagccattgtcagcacttaacctccagggctctattagcacagggacattatcaatatttctcacttctgaggagcacccgtctccttgcccaggagaaaacaaatttaaaaactacatgtgagcgaggtatctgtgtagtttatgcatttcaggtttcttattaaagccaaggtgataaatgcaaaagggtacattcaaaagggtgtgaaaccgtgacaatacccacagggaagaaaaaatgaattttcatgggaaagcagacatgaataaacaaaaccatgaaaagcatggtcaaaaagctccttgggactgactacctcactccaggtagacagtcccaaccttagagaagaaaatcatttctgggaaggggattaagtatagaatgtactgacattcagctccaggcttgactttcagcccagtctgctattcagctttggccctggaacactgaataggcaaatgcctacttcagcatcatcacaggcatccctggacctgtgcgtggtctgtggtcctgggcatgtgtgtgagtctgtcccatttgatcagcatcatgacctcagacacacaaacaagccctgccatctagatttactgctaacagctaaccatgcacttcagctaacagtgaaggttacttcctgtattaaagtgtcagacttttaaattttgactattaatatgttaaatattgagactgtgataatgatttaaaattctgataaattttctaatttattcttatatcctcgcttattctatgatggtgatgtttgccttcagccttatattgatatgttgaattatatactcagccattcagccaaaatgtatagtatctccaatattaattagcatcctttaaaacactcaatttcataggcaacaatgataaaaacgggtaattgtgaaattcctgaaactaacccagagccctgatatattctatttccacaaggatccgagcccaggaggaacactttttttttcccacccatacttgacctaccagctatgaatcaggggatttcactcctttaatatcatctaccaccactctcaaaaaacaactgcttcctcccagactataacctcccattttccctcatatctcagtgtgaataaaagtctttcttcagctcatgagctaaggaaaaacaaattttaaaaaaggaatgaaagagaccaagggctctatcctgatggtaagtgaaaagggaatgtcaaataatcaaaggttcatgtgagaaacagaggctgtgtgtccccagagcccaggcagtggacagtgactcagcccgatcgggtgagtcatcgggggtacaaccacaacaacaaagcccctccaaaagcaatcacccacaccctcaccattatgaagtcttgtcccctctggggaggctaagcttgaaccagcttgtgcctaggggcagcgaactgccaaggataccattacatttaagagagctcgttctcccaagctatttaaataaatggcgtcatttgctaatctctagctgtatctcatgacaagaggaataattcattttattgaggtcagagcattgggttaatgcagagatttggtttagcagttaagggaaagactatactagtaagctgatatttttcctcctttccttccccag

SEQ ID NO: 735287 - DNA, 2054 bp, Homo sapiens
cggcgaggtcggtcattctgcctgtccggtagcaccacgaaacacctgccactgacacctccccaccagcccccgagggttcgcgcaggcatcccgagccgcgccccctggtccgccgcagccagattccctcccgggcgggttacgcccctaggcgcaaaacggaaccactccgtatgaagaagacaaagtataaccagtcacaccaaagagaggcagcattatttagacagccggctactcccccagagactccacccagtcccctgggcccggcgtccagcgcgcagacggtgcccggctccaggagttccagctccctccacgtgtcctgtcttcccagcagcctcctctgccgcctcgggaggaaaatctcctgacaactcgcggtctgcggactacgactcccaggaggcgccgcgccgcggctctccccgcccccccccgcccccccccccctccccgggacgcgcaggcgccttgggctccgtcaacaagccgggctggcgtcgcctggatgcggtttcttccgggatttgtagtttttctggagctacccgggccgtctgttagagggacaagaactacaagtctcggctgccccagcgctgcgagcctggtcacgtggcgggggccgaccgggcgtgcgtgccgccgttgatccggtgctgcagtgaggagcgtggttcttgcccgtgttgtgtgtgtgtgtgagtgagagagcgagtgagtgagtgagtgagtgtgtgtgtgggggggactcggcttgttgttgtcggtgacttccccctccccttcaccccttcccctccccgccgccgctgcagtggccgctccctgggccgtaggaaatgagcgataacgatgacatcgaggtggagagcgacgaagagcaaccgaggtttcaatctgcggctgacaaacgggctcatcataatgcactggaacgaaaacgtagggaccacatcaaagacagctttcacagtttgcgggactcagtcccatcactccaaggagagaaggcatcccgggcccaaatcctagacaaagccacagaatatatccagtatatgcgaaggaaaaaccacacacaccagcaagatattgacgacctcaagcggcagaatgctcttctggagcagcaaggggaaagcgagagctgatcaagttctttgttcctggggaattcacttctcttcctccctcatggaagatgcaagtaaaaggaaatgcaagtaatccgtgcactggagaaggcgaggtcaagtgcccaactgcagaccaactacccctcctcagacaacagcctctacaccaacgccaagggcagcaccatctctgccttcgatgggggctcggactccagctcggagtctgagcctgaagagccccaaagcaggaagaagctccggatggaggccagctaagccactcggggcaggccagcaataaaaactgtctgtctccatcgtctcatcctcctttcagttcgttggtagagccctcagaaccatttaagagactctttatttttctctttctcccttttttttttaaatttttatttttacgtagaagctcttggacaacagctctcgttctccttccccatttccactgtatattttttaatgtattcccttcagggattccctgtccccaacaggaatttttaaaccaaaacaccccaacttggcagctttttctgtggaggacagacggccggccggacctctgagcacatagtgtcctgcccaccctaccagctcctccagccctgccgggcacatgcccgggggacgcctgccctgcccaggtggcctcctggcccgccctcacctctgatagactttgtgaatctgaactgctctactttgagaagatgaccggtttggagtaatcagaatgaaccctcctcctttttaagggttttttttttttcctttttctaaaaagctatgtatcgctcctattgaaagaccagatccttagagaagtttgtggtataaaaggaagtggggacgaatagtttactcgtaaagcgggatcctcag

SEQ ID NO: 735288 - DNA, 70711 bp, Homo sapiens
cggcgaggtcggtcattctgcctgtccggtagcaccacgaaacacctgccactgacacctccccaccagcccccgagggttcgcgcaggcatcccgagccgcgccccctggtccgccgcagccagattccctcccgggcgggttacgcccctaggcgcaaaacggaaccactccgtatgaagaagacaaagtataaccagtcacaccaaagagaggcagcattatttagacagccggctactcccccagagactccacccagtcccctgggcccggcgtccagcgcgcagacggtgcccggctccaggagttccagctccctccacgtgtcctgtcttcccagcagcctcctctgccgcctcgggaggaaaatctcctgacaactcgcggtctgcggactacgactcccaggaggcgccgcgccgcggctctccccgcccccccccgcccccccccccctccccgggacgcgcaggcgccttgggctccgtcaacaagccgggctggcgtcgcctggatgcggtttcttccgggatttgtagtttttctggagctacccgggccgtctgttagagggacaagaactacaagtctcggctgccccagcgctgcgagcctggtcacgtggcgggggccgaccgggcgtgcgtgccgccgttgatccggtgctgcagtgaggagcgtggttcttgcccgtgttgtgtgtgtgtgtgagtgagagagcgagtgagtgagtgagtgagtgtgtgtgtgggggggactcggcttgttgttgtcggtgacttccccctccccttcaccccttcccctccccgccgccgctgcagtggccgctccctgggccgtaggaaatgagcgataacgatgacatcgaggtggagagcgacgaagagcaaccgaggtttcaatctgcggctgacaaacgggctcatcataatgcactggaacgaaaacgtagggaccacatcaaagacagctttcacagtttgcgggactcagtcccatcactccaaggagagaaggcatcccgggcccaaatcctagacaaagccacagaatatatccagtatatgcgaaggaaaaaccacacacaccagcaagatattgacgacctcaagcggcagaatgctcttctggagcagcaaggggaaagcgagagctgatcaagttctttgttcctggggaattcacttctcttcctccctcatggaagatgcaagtaaaaggaaatgcaagtaatccgtgcactggagaaggcgaggtcaatggccatttggggttgggacagggagggtgttttgggtggcatagaggttttgtattgagggccagtgatgatgttttgatatttatttcctgctacttaaatttgaatctgagtgaattgtacctatttctgatgatgtcggtcttgcaaagcgacagattcataaagtaatgatgaaatctttctttcttcccgtgtgtatttctaagaaatagagccaactgattttgtatgtaaataccaagagcaatttacctggtactaaacccgcaccccagtgcggacccttcccagccctcatcccacttcctttcctactgtcctggaacctgtctccattgtgtgatccagccctggttctggctgtggtcagcagatcccagtgaagggttttgtgtgtttaggcctcatttctttgtctttttcctactccgttcctggcatttgctgatttctagtgtatactctgtagtctcagttcgtgtttgattccattccatggaaataaaaagtatgttgtacatactgccgaagaattgtcttgcaagttaaggcttccccctttactataagactataaataaaaacttattttatcctttcttggtggtggtgtcttcttacccttgttaaggccaaggtggttgatgagagacccctctggaagctgttagggcctcaatgtaagtctgagtgagaagtggaggtggcttacccggtcttgcagaaccaggagcagccataagccagagttgcttcccctttctcagctcagcctgagagagtaaatgggtggtgatggctttgttcattggatgaggcttttgaggttcaacagggatgtagccttagctgtggcaacatttctagatctagtttctgctaagcaagtgacctttgggggaattggtagcccagagctgtggttcaggttctcctggtaatgagtgcccagttcagaggtggctgttctccaggacctttcagtttctagatagttccagtttattaagaggaggcagcagagctgccaaggactggaagtcaagaaggctccaactgcaccgagttagctctactcagactgggacccaacaccagcctgaacttgtttgaccttggaagaaaaaggaattatggccagaacgcagctcagtgttggttttcctgtctggctgacaggaaatactgctgttcctagacccagagaggaagtcaagtcaaatcagttcttggatttgtcaccatctttagagtggtggagagcactgtggctcctatcaattgtatgtcaaatccgtaatatctttttttgtttaatgggagctggggcagatgggtcttgtcaatttgaaacatgatcaagcctccaaaggccatgattacattaaggaaaagaaaaatgctgggaaagcaagatcccatttataaaggcacttcttttcaagatagaggaaagaaactgcagtaaggaagaaatggaaatgagaatcagcttattgcctaaagccctcaaggttaacatgctttcctctttttcattgcccttaactatatctctttgtatatctgggcttaagtatacagttggtttgcttagtattggtgttagaagtgagctgtgggtgaagccatgttgatgcagagatggaaggcatgtgaagctggcacccagtagggagatagcaaacaggaaggggcagtcaagccagcatgaggacaggtggtgtccctgagagccagtccctggctccagtgtattggctggacaaaggattgagtttaggcttctctagatttcagtaaaccagttcagacaaggggcacagtggctaggtggctggttcacctaggaaaatccaaaccacctgattgacatggtgagcggactttggcacagggtggaggtaccactggaagcagcttcctgggcaggaacacagggcaggggagctccgcctggaaactgctcagctgaaaaggccaagtcaaagtcacagccaagcaagccccttctggtatgtgtgtctaggaagcgagtgtgagtattccctcaggataccaaagtcggaccatagcttactctctcacagtaatggtaatctctggtttattttttatattactctggacactcacttacacaaaaccagataagctgtagatttgcttggtcactgtggcaggtggcttcactgaggagtctgttaagcgtgctatttccctacctttacagttgccccaagtgcaagggtatttaaaatggcccagtttttaaagttcttgatacgctaaccccattgtaaaacatcaacaacttcttaggtaaagaatctaagctcacagagctgtcatcttagctgagacaggtttaaaaaacaagactgagtagacaataggagccagagccctgaactgggactgaagtaagcagaattctgtttctgatagtatcatgtgtgttttatgcttggcctctgaaagcagactggctgggttcacagtcctgtctctgccactcggtggctgtgttacttctcccagcctcagcatctttatctataaaatgaggataataatagcactagcctcatgagatggttatgaggcttaaatgagataatgcttataatgtgcttgacctcaggaccaagcaagcactgaggtgcctctgctgtcattatctacacaaagcatgtaaccagggctgactcagcaaggtggaaaaagccagctcccagacacctttcctaaagtgagtaagggttgacttcttggtatatcacaaatgcttcccactcctcagagatgtgccccatccttaccaggcacagtgactaaagagagcaaggtgacaccaggactggactgacaaactcttcgagactaaagcagcccctgtgggtacattaattagatctggtgtcaactcgagtgaggctctgcccattccctcccaccacgattcagtggcatctctcaggtttggacacttttggaggcccaggcagaactgctcagaagccccatgtggtgttactcaaagtgggatccttggatcatgcccagggctgcttgttaaaaggattcctgggctctaacccctctaatctaaagtgtgccgtggctcaccagtcagtttaacaagctctttcaggtggtcctcaagtcactcaggtttgactcccaacagtaatataacccggggaaccaaaaggacgctgttggggaagttaggcacagctgagctgaattagcgaagtggttctgaggtcaggatgaaggtgggggaggcgggcttgttaaatagttcaacccttagagctgccttgatgagtctacgtgctcccagcatgcctccaatgctctagggggctggctgagctacccagtttttaaacttgagaaggaagaaagctgagggctgcctacactagcccctttagaagccccaagcaggggtaatgacatggggcagcactcatttctgtagcatgcctaggctggcctctggtccccaggcaggttttataatccagccagagcaagggtctctctcaggcctggtcaccaggatgcattctcaaaagcctctgggaacatgaaactagagcattcctttcttcaaaactgtttctctagcctgaagaggaaacccaggtaggaaaaaagagtttgtcaatgtctacactgctagatagcgaatagagaatttccttcagtgtctagggtttactagggcagcggctaactcatacatccccaaagttcccttgggaagggaataaaaaatagtttctagttaacttcctcagggagaaaaccaatttggctaagccaggcttaactataggtaggactgggtgactgcaccaggcaggcctgtgcatgggttttggaggctctcctggcaaacccttatcaccctgctggtaagtgttgtccttgcttggtgtttcattggggtcggtgttgggaaggagcccagggagcttcagaatgactgccagagcgggtagggctaggggctctgagcccgcctgtctggactgccatgccagctacaacccttacctttggggtgacattgctctggcttcctgtgccattatgtgaggacaataatagcaccaagtgccattgtgaggcttaaaggagtgtgagaagcccatgaattgttcctggcatttaatactcaataaatactgtcaaatcttagatgtgtctgccatcagatgtcctgggtagtgcagccattttttagttttgttaaaatgtggaatgaagctgggcgcagaggctcacacctgtaatatcagcactttgggaagccaaggtgggcggatcacttgaggtcaggagtttgagaccagcctggtcaatgtggtgaaaccccgtctctactaaaaatacaaaaaaattagccgagcatagtgttgcatgcctgtggtcccagctactcgggagactgaggcaggagaatcgcttgaacccaggaggcagaggttgcagtgagccaagatcacgccactgcactccagcctgggtgacacagcaagactccttctcagaaaaaaaaaaatgtggagtgaataaactctccttttcgctgatgtaataagagtttagtatattaaaatccttgaaaggggaggtaaatgtatgttgaatgctaaaaggcagtaaaaatttgcatgttttctgaaagaacttgagcaagaccacaaatctgttaccttttggagaaaaaaaaggagttgaggaatgaaatatacccttgcaggctggctcagagccattaaccattaacatactggcgactttgccctgttcttcattccagtttcagtttgcatttctgcagtgccgggtggcaggcactgtgccaggtgcagatactgcaagtgcatctggtgtctgccccgtgtttcttgcccagggctggttatgacagtggtcagccatcgtttttcagccttccccttcagggaccccttgagcagaatctgcctggtgggtgaggtggagcagatgagcctcatgactgggccgaggggcccgcatgctctagctcactctggatcccatgtgcacgctcgcacacacaacacacccagcaggatgggcgtgtctagaagaatgccgagcaggtggccttggacaattcacaaccagccgagcaggtcccctcctgcgccctgtgctagatgccagctgccccagcaggcctgttgtgactgccaggccccatttaggattgttttcctttgctgtcctttgcagggtggggctcttgtatacccacagcctgctctgggcaaaattatgtagcacggtctctgctattaattttttccagtaaattaaaggctagagaagaagaagaagaaaaatcaaggatccaatattaagaaatctgagcccaaaccttctactccagtgctgaacatggtgaaggattaagcctcctatcaagaaaaacaagcctgacagcctgtagactgatagagggaggtgtgccttctctccagaaagcctacttctgcaggaacccaggagtatggaatgagccatgcaaagtctgattcaaaaaataacccaatgggcatgcacccccagtcactcatccggaatccggctggcagcctggcagcccggcagcccatggctcccatgcacagtgcttgagagcttcattgtttcctgtctgctggtgccatcaacagctctggggtggcaggggcagatcttgggctaaaggacagtggccaacagctttgggccaaaaggccacaacaagaccagccagctaagaggaggaatgtcatgtccacagcgaatacctactgcagcaaggctgtaggagactttggagaggaaggaccctgtttccaacaacttgaccatgtttcccatccagggacctctgtgcagagagtggtggtgagcaagtatttccaactgggagcccccacagagtcagtggctggtctgtgcacttgttactggactcctagcactgtgcttggcttgtggtgggtactctacaaatgctgcatgcatatgtgcgtgtgccagtggactccagccttgtgatgtaccttcatctctgtgcccttgatagggcggttccagggttgcctctgcgtgagttcaaccctcgggtatttgagcagcacgtagcctcagcccagcattgtgctggctactggggcaatctaggcagcttataaaggctgggccttgccttgaagaagcttagagatgaggttaggcatttagcacaaatgcacgtctgggctctgaatgccagaggagttcaggagatgggccctcagtgagagcggtttggcactatgggaggggcagggccaccaggtcatcgcttctcaagctcttgatgggctctccttctgtcctgcccacaagagcccagccttgggctccccatctagctgtccagacaggctgggggtggggggctgttggtgaagggagggtgggccagagccatctgctctgcacaggttgggtcacgattctattccaccactttcactggtcccttggtatccaggcacatggcagccactgctccagagagtgaggagaggggctggggggatggagcctcgcaaggagcatggacacctagcacttacgtcatcaccatcggcatctgccttacctggctacctctctgttcagcacacctgggagcagcacccttgcagcccttctcccttgacagagctgtgacattgaaccctgccctggtctggtagctgagggcccagcctccccttgcctcctttgtcccatcagcccaggccatcatgggtacagaaggtagcaatgaagtctcacactcggggtaaccaacatgcaatacttatggaaagactgtgtgatcaagggttgagagaatagtatactgaacccaaatgtacccattacatagtgtgaacaattatcaacatgcagtactcgttgaaagaaaagggatgataaaaatgcactattattgaaagtaagaaagtgtggggtctgttaaacagacaaaggagcccactgagaaagctcccaaaggccaaaactgcaacaatttgagcaacaaaataaataatgtagcattggaacataatatgaagtataaaataaacgagtccatagtgaaagaaatggttgaataaattgagaataaacatctcccatgtagaattccgggtagtttatgcaggtgctctgccttcaaacatatggagcataactccccacttctgtttgttgttttgagacagagtctcacgctgtcgcccaggttggagtgcagtggcacaatctcagctcactgcaacctctgcctcccaggttcaagcgattctcctgcctcagcttctcgagtagctgagattacaggtgtatgccaccacaccaggctaatttttgtgtttttagttgctatggggtttcatcatgttggccaggctggtctcgaactcctgacctcaagtgatccacctgcctcagcctgccaaagtgctgggattacaggcgtgagccacctccccacttcttaagcgtggactgcatatagtagctaccttctaaaggacacattcaagaaagggacaaaaagtaaccttatggaggaacctgacaaactacctcagccaggcgatgaagggtaacatcagcataaacatgatgaagcaggttgatagtatgtatccttgatgtgtgatgagaatggtactttacctctgtggccttcctccaaaaaactgttacgcatggtctgggcacggtggctcatgcctgtaatcatagcactttgggaggccaagggaggatgattgcttaagtctagcagttcaagaccagcctgggcaacatagcaagagcctgcctctaccaaaaaaaaaaaaaaaaaaatgtaattagctgcacatggtggtgtgtgcctgtggtcccacctactcaggaagctgaccaggaggattgcttgagcccaggaggttgaggctgcagtgagccatgatccactgtactctagcctgggcgacagagcaagacactgtctcttggaaaaaaaaaaaaaaacataaacccatctagtcataaggataacatcaaacaaatcccacctgagggatgttctacaaaatacctggccatacttttcaaaactgtcaaagtcatcaaaaacaaggaaagaatgagaaaccgtcaaaaccaagaggagtctaaggagacatgagacatgacagctcagtgtaatgtagtgtcctgggtgggatcttgggacagaaaaaggccattaggtaaaaactaggggaattcaaataaggtatggactttctttagtaatgtatcaaaattggttcattcattatggcaaatgccacctattagtggaagatgttaatagggaaaactgactaatgggtctgtgggaactctgtgtactatctttgcaatttttctgtcaatctcaaactattccaaaatgtttattttttaaaatgctttttttttttttttaagacagggtcttgctgtgtcatccaggctggagtacagtggcataatcatggcttactgcagcctttacttctcaggctcaagtgaccccccatcttagcctcccaagtagctgtgagcacaggtgtgtgccaccgcatccgactaatttttttttttttttttaatttttgtagagacagagtgtggctatgtcgctcaggctggtctcaaactcctgagttcaagtgatcttccagccttggcctcccaaagtgttgggattacagtcatgagccatcacacccgaactaaaaaatacattgtttttttttttttttttgagatggaatttcactcttgttgccaaggctggagtgcaagggtgcaatctcagctcaccacaacctctgcctcctgggttcaagcgattctcctacctaagcctctaagcctcccgagtagctaggattacaggtatgcaccaccatgcgcggctaattttgtatttttagtagagacggggtttctccatgttggtcaggctggtcatgaactcccaaccttaggtgatctgcctgtcttggcctcccaaagtgttgggattacaggcgtgagccaccacacccggccatgcatttttcttattgttattttgtaagcgctgtatttcctcagggggagcagagggcaagggaaagtttccattaagctgggctaatgatgagcgccctgtccctgccctgcctggttttgttcttggatgtgccagagaagcgggagggaggaacgtgaggccacctggccccagttccccagctggtggaaaacagaggcaaggagggttactgcaggaaagtgtgaggatgtgcaggaacctgttagatgtgcctgggccaggttggagaaagctggctgctgtcaggtcagctcctgggaagacggactcatcacggcctcactgagccacacggcatcacactgcactggtgtggccacacacttggtggcaagtggagacctcattagaagggtgaggggcctgccctatttgctgtcaccatccctgacctagtgacagatggcagctggtattcagggcctcagccatccagcctagaggtaaaccaagcatgtttcaccagtgccccctattccccgagacctctcaccttccttcagaggcctgcggtggtggaagggcatgggctttggaggcagcagatacgggctcgggctcaggcaccaccacttgacagctgggaaaccttgggtgatttacgtaagctctccaacctgtttctccagttgtaaaaggcaggtaatacgcctgcttcacccaccttacaaggtgagtcaaggatcaaatgagaggcggtagaacaggagggactgtcttaggggttattgtttgggcagatgaggcaagagtggtcagcactttttaagcagcaggtaaagccttggtcttggggctaattggtggtagagttttgtatatagtcacgccacatcatgttttggttaacaacagaatgcatgtacgacagtggtcccgtgagatcataatactgtatttttactgtaccttttccatgtttagattcacaaatacttaccactgtgttccagttgcctacagtatccagtacggtgacaagctgcacaggtttgtagcctaggagcaacaggctaccccatctagcctaggtgtgcggtagggtaggccatctaggtctgtgtaagtgcactccatgatgttcacacaacgacgagatcacctgactgcttttctcagggtgtatcctcgtcattaagtgacatgactgtattaggttgctttcagttgcaggtaatagtaagtccaactcacattgtctcatataactgaaaatccagaggccacgtgggcctcgggagccatgtgatcagggccatgtttctcagtctcagagcatatgtgtgtgctggcttctcacgctggtttccttctaggtagaaaaatggttataggaggcccaggccacacattctaccatcccctaataggaaagagctgcttttccccgtcatacagtgtccacgacgtctctctctttagactattttaggtcacatgcttgtgctctgaattgatcactggggcaaggacaaatcatgctgactgacttaagcctgagttactcccaacctgaacaaattactggggcaaagagagataaatgaaaattattggcttagccagtcagggcctgggcctggaggtaggagggcatcaagccctggcaaaccttttggctgccacaggtggggaggagtggcatggatgccaacagtgtccctacaggcttctatcccagtaatcactgtttgagagcaatggccatttgcctctctagcatccatttacccctttggcaacaatcctaatttgcatttggagctttgttccttccccgttcccaaaaactacgtgcttctaatgaagcctcatttccctctcaagggagaggcatgtgaccaagactttggccaattggtgcactgtattctccaagccattggactgcttcttggaaaggcacttggtttgattaaagccagtgaaacacaatgatactcgctggaaggaaggctggggtggaaccaagtgtgcctgtctgctgaacctgaccccaacaggatgtagggtctggagctattggtgctgccattttacaaccccatggagagcctgagattgaggctaatgtagaaagatggagggagggtgaggaacctaataggaccagcctaattcctggactctgcagtttgagtcaacagattgcctcttttgcttcaaaagccagtttgggtcaagttttctaccagttgcaatggtgtcttaaatcatattatactttccttcctattcaaaggcagtaaatgccaccaagcagtgcatgtgggcaactagaatgcttggtccaatccttactatttgtcacttgacactaatattacatgaaaagcatcccagtcatgaaaggtatggaagaatgctcaataataccaagaagggagagcagtgtggaactattgtttactggtattattatctcaggggtgtttcccctgattatccatgaggttctctttatgctccgctccctgtagggtctggcaggcttcccaacttatctggtgttcaaggtgggcctaagggtgaaactggagcccacctggatacagagatctgtattagttttgtgtttattgatgggagaaagtatttggggtcatccaccttgaatgctacataaatgtcttctactcaaggagtcacataataaatctctccaaaggtgcggtggctcacacccgtaatctcagcactttgggaggctgaggcaggaagattgcttgagcccaggagctcgagaccagcttgggcaacgtggtgaaaccccatttctataaaaaatacaaaaattagctagctgtggtggtgtgcacctgtggtcctagctacttgggaggctaaggcaggaagatcttctgagcccaggaggtcgaggctgcagtgagccatgattgtgccactgcactccagcctgggtgcatttgagcaagatcctatctcaaatgagtgaatagacaaatctctaggactcaccttgagggctgtcaggaaaccctctggaaaaggatgtctcatggatatgccagtgtaaactctcctgaaataaccctttctcttctctacccagactaactttacctaccctttggggcccaactcagatccctccttcttggtaaaaagccagttcagactgaagcaatcccttctattaaccacattaattattactgcaattaatctcacaataccttgaggctccgagtgctgagaggattttgccttttgttatagtgatggaaaggatgcatttcaatatgttgccttgcagtgcaaacctttgttaacagggcaaaaatagcacagggggcaggaattacattcctggatgtgcatttggcttatttacatggatttgggtgccctctaaggacaccatcttctctcccctccaagagggtcaggccacaggacatccatgttcttggcctcccatgggagagggtctctcgccagaggaagggaaagccaagtggccacagagttccagcctgtccctgtgacagcccctgcctctggccagacatccacccacccttgctaagtcagcctgctctggggctactaggcccagtccttgctgtctgtcggagacagaccatgaagtgcagtgtgtggagggctgggacatagcataccgaattaccccagggagcttggaaaacatctcttcccactctctgttaggcccacggcttcctctactggaggagacggcatgtgaggatggaactcggtcattcctctgtcaccaccgatgtgaacagtctggaatcctgcacacaggagactgacgatccctgagcaacctttagtagctcctaccattgggcattttcttggtacagatcacaaataagagacatcatagaaaatgttattcttttattatttcaaggaggtaatacatagcccaatatggcaaagcaaaagggaattagaggcagcaaatggccaggtttttctaagcgcctcatgctgcatctctgagctcctgtctgcccgcagcccacagctgcttacatgaaggccaggtcagtagacagatggcccaacttgatactccactgactgagaaagggctcaatgtgcagcacagcagaggcactgccaggacccagcacgctgggcggcaccccacgctgccaccaccagctacagaggctagtgccttagtagcagccagtgtgtctagcacttgattttattcctgtgagcctagagtgggcaggacgtgaataaatcctgagtcataagttaaggtgaaagacttagtagtgttaatactcttggtgagaaaagacaacacagtcttggaggagagtgggcttggagtctggtggaagaaagatagaaacccccagaagggcctcggcctgcaggcactgccttgaggccatcagagggggttttcacggtacatgatagggaggagtgaggcaggtgggcactggagggctgtttcctctggcacagttgaactagagggtcactttccactcataattggtttcctaggtctaagtcaccacacctggggctgaagcaagtcttgcctgtgcaccaagcgtggccttggaccctggagagatgcaaggctcagttctccagtgttgaagtggaaggactcccaactgaaggagatctttctctccccacctccagctcttttcccttacaaatgaccagggtgcaagtcgagaggcagaggcacctcctggtgcaactccaccacagtcttacagagaactcatcttggtgggacccaaagcccagccttggcatgaagcagacttattccacccatcggagggcacccagtctggtgactgaatggtggcgtgcaagtgggagtcagcagtggctctggatgccgtaatactcagatgccattcatctctgtgtgatcgtcctggctggagagctggtgaggagggactgcttcctcctggcatgcactgttcaccaaccacaccacgtgggctgatagatttttggtttgacaggtgtggaaagaatttttaaaaccagccactgtgttctccaaacccagagccattggttttgtttgacaagaaagtaccaagagaaccacagctccactgaggctaaggcttgtgtagcacagaatgcagtatgtattgaaacgtataaaccttgtctgactggggagatgggtgagcaaagagctgccgggacccaggtcctctagtcggttgcaggctctgccgatgtctcatccttaagctcctcaaaacctgggactggcttctgtagaaagtatgtagtggcctggatcaccttgtctggtccaatgttgtacactgggtgagtgggctgctgcaaagagaagaaaaggtgccagttaatcaccccggtggtccttgaaaacataacacatcctttgctccatgaaaggcacttctaagaatttagtataaggaatcagagatacacacaaagcccaaaggttcaaaaatggtgtatttgctaaaactatctagtacatgggacacaggttaatatacagccattataaacacgcatttaaatatttaacgatacaggcaaatacttacaacatattatgtgagaaaacagtatgtacaatactatctcaaactgtttttttttttttttttttttttttgagagagtcttgctctgttgcccaggctggagtgcattgacacgatcttagctcactgcaacctctgcctcctgtgttcaagcaattctcctgcctcagcctcctgagtagctgggattacaggtgtgagccaccacgcctgggtaatttttgtattttttttttttttttttgagacggagtctctcgctctgtcgcccaggctggagtgcagtggcgggatctcggctcactgcaagctccgcctcccgggttcacgccattctcctgcctcagcctcccaagtagctgggactacaggcgcccgccactacgcccggctaattttttgtatttttagtagagacggggtttcaccgttttagccgggatggtctcgatctcctgacctcgtgatccgcccgcctcggcctcccaaagtgctgggattatttttgtatttttagtagagacagggtttcaccatgttggtccggctggtctcgaactcctgacctcaggtgatccacccgcctcggcctcccaaagtgctggggttacaggtgtgagccaccacacctggtctcaaactttttaaaaagtgtatttgtacctgtgatgtatataaatagcaaaaattgtacccataccaaaatattaatagtgatatgattgtttttcattttcttttttatattttatgtatcccaattattaaaacaataaacatgtatttacatttataatcaagaaaaagggggccggacgcggtggctcatgcctgtaatcccagcattttgggaggccgaggtggatggatcacccgaggtcaggagttcaagaccagcctggccaagatggtgaaaccccgtctctacaaaaatacaaaaattagccgagcatgatggtgagtgtctgtaatcccagctagttgggaggctgaagcaggagaattgcttgaacccgggaggcggaggttgcagtgagccaagattgtgccactgcactctaacctgggcaacagcgagactctgtctcaaaaaaaaaaaaaaaagaaaaaaggaccacaaccctaatatgtagtaaggctgtcagatcatatttaaatatataaacaaaatttaaatatgaaatttaaattaaatagatgttattctagtacatcacagaaacccaaaagaaactttagatttgacacggcataatcctaggccaatattcaggattctcccactgtgggataatgaagaaggggacacaactgcaggagagattttaaaaattttgagagaatactaggagcaacctcatgctgaaacatacaaaaattcagataaaacaataatttttaaaaaccaggaaaactgccaaaattgacttaaggaatttttaaaggcctacatgaagaaattagtaacaacaattgcttattctgccacccccacataccttaaaagatactagacctagatggtttctcaggcaagtagtatcaaacctacaaagaaacagataatctctgatctatacaaaccttttaaggactgaaaaaaaaaaaggggctagtgcgggggccaggtacaatggctcacacctataatcccagcactttgggtggctgaggtaggatagcttgaggccaagagttcaagaccagactaggcaacatagcaaaaccctgtctctacaaaaaatttaaaaattagcaggttctggtggtgtgcacctgtagtccctgctacttgggaggctaaggcaggaggatagcttgagcccaggagttccaggctgcagtgagctatgatcacagcactgtactccagcatgagtgacagagtgagatcatgtctctgaaaaagaaaagaaaaagaaaaaaggtaagaggtgcaggaagctacccatttaattttatgaggctatgatattatcctgaaacactggaaaaggacaatacaataaaattttagatcaatctttcttatgaatgtacatgcaaaaaaatcctaaataaaagtactaggcaaacatactggcaaactgaatccagcagtatactgaacaaaacacacagacacagacacactgcctctactatgaccaagaagggcttatcctgggaatataaggcttaacatcagaatattaatgaaacatatcatattaaagaagaaaaatcagatgcggagaaagcattcaataaaatttaacactaccttatgactgaaactaacaaaaacaacctagcaaatcaggaataaaagtgaatatcactaacttgatataatgtaactatcacaaccttacagtaaacatcatgcttaatgatcaggttataaaaagccttcccattataatcaggagcaagagacgaatgccctctactacctttagtcagcactatgtggggatcttacccaacaatacaaggcaagaaaaataaaatggaaactaacttagacaaacttaaaactattaaagagttcaacaaggtggctggacacaagatttataaatattattagcatttctatacactagtaacaaacagttacaaaactgaaaataagaaaagattccagtcacaagagacatgaaaactgtaaattagacataactctaaccgaaaaaaaaaaaatgctagtcctttatggaaaaaattataaaaaaaacactgaaagacattaaagaaaagaaaaattatgttcataaatggaagcctaaatattgaaaagaagtcagttctctttgtactcctgggaagacaggaagaaaaaaaaaaaagttggttctctcctattaatctaaaatgtagtgcaattccaataaaaatcccattagaacttgacaggctgatcctacaattcacaggaaaaagcaaaaggcaaagaatagccaaggcaattttgaagaaaaacaacaaggcagacaggacttgcctacctgttttcagacttgcttaaaagagtgcagataggcaaacagaccaaaggaacaaaataagagagtccagaaacagggccccttcatgtatggaaacttgagggtgtggtacacatgagatacacatcagcaggaaaggttgtagacttcagtaaatggtgctggtcaattggttatccatatggaaaaaagataacattatatccaagcctcaccatacacagaaaccaaatccaagagaattaaaaatctagattaaaaaagcaagctttagactatttagaagaagttacacttaatgacttgctgcattgccttgttcattcccttcatagcacgcatcacaatttgtgatgtatttgtttaatgtgtgcctccttttgtctgcttccctcaaaaaatggtagagattccttaagttaatcctcacctaccctcccccaaaaacaaacccctgaatgacagaaaagacaaatagatttgaccacttcaaaattaaaatattaaaatatttttgtggggaaggggtgctgggggcagggtctcactctatctcccagactggagcaaacagagctcactgcagccttgactacctgggctcaagcgattctcccacctcagcctcccaaagtgctaggtttacaggtgcgaaccaccatatctggcctaaaatcttctatttaacaaaaaaacaccaaaaacaaaatgctatggtttggatgtggtttatttgtccccacaaaaattaatgttgaaatctgatccccaagatggctatgttgagaggtggggtttgtggaatgtgtttgggtttgaggggtggatccctcaggagtgccttggtgctgttcttgcagtagtgcgtgagctctcactcttgctctggggagtctggattagtccttgagggaatggattagttcctgcaagggtaggctgttataaagccaggatgctctcaggctctcctctgtttgcatgggttggcttcccctttgatttccacatgttataatgcagcacaacccttgccagaagccagagccatgcccttgaatttctcagtctatagaaccatgagctaaataaacctcttgtctttatacattacctagtctcaggtattctcttatagcaatgcaaatcagagtcacaaaatgaaaagacaagtcacaagctggaagatattcactacacacatgtaactgatagaagattagtattaaaaatatacagagaactacaaatacttaagggaaaacaactgaagttacccatcagtaagaaaatgagcacagaatatgaactggcagacaattcgcagaagacaacacaaatggccaacaaacatttgaaaatattctcaacctcaccagtaatcaggaaaacacaaaatcaaacaaataccacttcacacccatcaaattggcaaaaaggaaaaggtctgactatggatcgattcatcttacacaaccacactggggagcagttacagaggtatctatcaaagatgacaatatgtgtccccttcaacccagcaggtcccctcctggagacattctaacatgtgaacccaatgagacagataccacaacgttcactgcaacactgtaatagcaaaaaattgataactagcaggagaacagagaaacacactggggtacatttatataagggagtatcatataatagttaaaatgaataaactggagcaacacatgtgaacacagataaacctcaaaaatacaatggcaagtggaaaaagcaatgcagaatgactggtacagtaggtaccattacaaaaagtttgaaaacatgcaagcaactgttatattgcttataaaaaactatatattgcttatagatacatatgtatgtagcaatagcacaaaaacatccacaggcatgatacatgtcaaatttgggacagggttacctctggagaaggagggaggaaaaaaaactggaagagggctacataagaggcaaatagggggaaataattagggcctggaaaagctgggtggtggtttttctgattaagaatgaggttgagcatcttttcaactatctattggccatttgtgtttcttccatttgaaatgtttcccaattaaaagaaacaaagatggggccaggcgtggtggctcacacatgtaatcctggcaccttgggaggctgaggcaggcatatcacttgaggccaggagtttgagaccagcctggccaacatggggaaaccctgtctctactaaaaatacaaaaattagctgggtgtggtggtgcatgcctgtaatcccagctactcaggaggctgaggcacgagaattgcttgaacctgggaggtggaggttgcagtgagccaatatcatgccactgtactccagcctgggtgacagagtgagactttgtctcacaaaaaaaaattaaaaattaaaaaaaaaatttttttaaacaaaaaaggaaggttacaatgacacagatgagaaaataaggcagtgacctagatggtagcagcaggccatgtttacactggtggaagtagggcttagtaagagtagggaactgcacacaaaaattcatgacagtctgcatgggccctgtgatttgatcactggggacagtctccattggattcatgtccaggctcacgtctaggctcagagcacctccaggttgtcctcagctggctgcagcagtgagcatcctgccctcatagggctattgttttttcaggaaagcagacaaacacacattaaacaacacaccaccaactgagtaaagtactacaaagaatatgaacaaggcactgaggcagagcattctggggatctcattctctgaagagatggcatctaagctgagcctctgggagagacgcggcaggctgtacagccagtgccgcatggctgcagtgctatcacgagcctgctgggactcacagcctcagagtgacacgtaactgtggcctcctctaggggaagctaataccagcagtgggctaggtcctcagccctgggataaaggcacaacagctctttgacagatcagaccgcccatctggaaccctgagcttgcccagaggtgcgtctcctctgtggtcacatcctcactaacggctgcacagctcgaagggcagagggaccacaagcttccgcctgtccacacaggaaatgcagagccagttctgcttacttggaaagccttctgtccgcgaggtccctgtggagaaggggtgtgaagccctgcacccgtcttaccagagcgttttcgggcacacccaggaccacatcatgcaacatggctccgctgccgaagtgctgggctatggacaggccgctcaggcagtagcaggtgtggtagaaatcacgcgacctgtaaggacaggcagctctgagcaggcgctcctctgctccgcacacatctacaaatgtagccacaccaattcagagaccactggtgcaatcacacgtccccccccatcctccatgtggctagaggaggcatggttttcccagcagtgttatttaaagccccactggctgagcacagtggctcacacccataatcccagcaagcaggaggctgaggcaagagaacggtttgaggccaggagttcaaaaccaacttgggcaacatgggagaccccgtctctacaaaaaattaaaaattagctaggtgtggtggccgatgcctgtaattccagttacttgggaggctgaagcaggaggatcactcgagcccaagaggtgaaggctgcagtgagtcatgattgtgacactgcactccagcctgggtgacagagtgagaccctgtctcaaaaaagtaaaatacaataaaataaaagccccatcctccagccctgcccagcagtgggaactgtattttttttcttttctttctttttttaccttaaactattaaaggaaactgtaattttaaagtcagtctctccagctgtcttctggaaagggctctccaggggcagtactaatgataaattgatacacttctctagaaaaatacctaaatatctagaaatgggccacatccttcctgatacattgtgggaccaggccttcccctggatgccaagagcagcaggacgtgtgctgggatgggggaagacagagggtgggtaacaaaggtgagaggacttattttatttccctttttctaacacataagccatctcagatttgagcttaatcatttaatccactctataatagttgtcatgattacagtctctgtttacaacactgaggggttttaaaatcctgtatcctattctatttagatcagtttttttttgttttttttaaaaaaaagaagagttatctacccagcaatctgtttccctgtctgggggagggggttgcatgcaggctgggggacaagacgggcagctggaggtgccaagatcaatggcctcaaggggtgctcccaactgggtgctttttcccatacaacctagcgctatgcaggtgctgaaggtgacacctctgctcttgagatctggctctgagtaggcctgaggtgcacgcccctctgctctctcctcccctctcccttccctccccagagagaaaacactcacttgccaggtttatccagaagcccccccgcagggcactggcagcacatcaggatgtactcctgcagggcctgctgatggaacatccagtggctcatgctaagggcagggtcacctgttgaagggcaaagggtcagtaagggcccggcagatccagccaagtatcaatgacctaattccactttctcacctgggggaatagtcaaggtttcctgctccccttcctcttccattcattcttggtacaactgctatcttccccatgtcctacgcacagcatgtcccttctcctgaactttgacatgtgtcaaagagcagcaattcaaagtggcactttcactttcttgaaatgcaccctgttaacgtggatggtgatcctcaaccacatctctggcaggcagtgaaccagcctagctgtttagcttaccttcccagactgacctcggtagctgctcccaacttggtccataactctaccctggacttcaagagacattccctctagcatatctctataacttgttaaccagactgattagctcagagaactcttaatgggtaataaagtctgtttcttctacttttctaagcctaaatttaattgatctccaaagggaattctctaacttgtctctcagctcaaagaatttacctaagaaacattactagtaactgccctcctgcatcatatgataccctagcaaaaactgggtattctggtaatactactaaggtactgacaagcaactggacttcttcactctgaagtccaatcactatggtcaaagaattctgtgggccacacagttatcaagtgggaaggagggacaaatcacggacaggtgtgcagaaacatctgcatagaaatcgattaaaaatatatatacatataggatgtacactaagtccttggtcaattttatattttgatacctgggctaaaagatgcctgacaataaatcatttttaaaaaaaagatgcccaacaattggtaaatggcacctgaaagctaattgttctttcttccagtctttttggttctatgcgtttttctacctagttattataactgtgtagcttatgtttttcacttataccactataggcataaattttctattctattacataatctgcatagccatcactgtgaatagccatatagtatttcattaagtggacatataaggtaactgtatcataaaaagaactgagctaaaaatcttatatatatgtcagtatataaattcctatggtgggccaggcacgatggcttatgcctgtaatcccagcactttgggaggctgaggggggttgatcacgaggtcaggagatcgagaccatcccggctaacacggtgaaaccctgtctctactaaaaatacaaaaaaattagccggacatggtggtgggcgcctgtagtcccagctactcaggaggctgaggcaggagaatggcgtgaacccaggaggcggagtttgcagtgagctgagatcacaccactgcactccagcctgggcgacacagcgagactccatctcaaaaaaaaaaaaaaattcctatggtgaaaattataaaagtttatggtatcaataacctttcccattttggagaaaatagcaaaaaagaaaaacgggggaaaagatttctaaaaataaaaatgaaaagtttatgatacagtctataaagagattgaagcaaaatattaaactgttgaatatttcctttttttttttcttttttgagacagagtctcactctgttgcccaggttggagggcaatggcacgatctcggctcactgcaacctccgcctcccgggttcaagcgattgtcctgcctcagcctcccgagtagctgggattacaggcatgcaccaccatgcctggctaattcttgtatttttagtagagacatggtttcactatgttggtcaggctgctctctaactcctgacctcaggtgacccaccctcttttggcctcccaaagtactgggattacaggcatgggccaccgcacccagcctaaattgttgaatatttcaaacagacaataagaatttattaaatttctttaaaaagagacacagaggaaaagggtttccaaggttgagcactaggtgagggacagtggccaggtgacatttagaggccagggacaaaagcttctcgtcttcaaccctgagtcgcactcagccctgaaacacccattaagagacacaggaaactaagtccgacctaaggagaagcatccaatctcccatctcaggctggctgcaggccacatgctttgatacacttgcactattttaattcccttcctttcttttcctcacctgtaagcacagtgaactttgttgtagaagatacatacatatatgatgggacttcactctatcttcttttacttatttccaaggttgtttccagttccttgccattatgaggaatgctggactaaatctttgtcaatattatgtatgcttaagattattttcttcaaatagactgaccacggtggaattattcggttaaagggaataaacattgttaaggcttttaatagatactgataaactgctttaagaatttatagactactctcagcacaatccctgtggagtagccctgctctgcaggagctgtcaaaaataaatatataaataaactaaaaataaaaacaaagactttatatagctaccagcaaaatttaaaattttgctataccacctccagcattagcacctttttgttgttgttgttgagatgctatcttgctctgtcgcccaggctggagtgcagtggtgtgatctcagctcactgcaacctctgcctcccaggttcaagtcattctcctgtctcagcctcctgagtaccttggattacaggtacaagcccccacgcctggctaatttttgcatttttagtagagacagggtttcactatgttgatcaagccagtctcgaactcctaaaatgatctgcccaactcggcttcccaaagtgctaggattacaggcgtgagccaccacgcccggccagctttagttactttttaaaagttatcagcaattaaaatggtaaaaagaaatagtacctgatagtttattttgatttgcatgcctctgattactaattagggtgaaatttttccataacttgtgtttaatatttgcatttccttatgatggtgtctgtttggcctaatcttctgagatccaatagccaattttattaatctagctttttcttatacttgccccttgtctacatcatatgctgcatctattttctcctttttgctcctctgttttggttatgtgagtttaaaactttttaaaatttttaaaatttaattaatgtaaaacatatatatgttttatacttaatattgtaatcatactattgatttttccttcacgatttcctttttaagaaaatatttaatgtgtatggggatttttggggggatgagtgatgaaaatgttctaaaattgtcatgatggttcgcaactgaataggtaagttgtgtggtatgggaattatatctcaacaaagctattatttaaaaaagcatatttattaaactttaggaaactgcattacacatctgtacaaaatgtacatatatttcatatcctataacaaataaaagactattattataaggtaaatgataacctgtggctaaaattagagtctgaaaagaaaacgctatgtttattatataaaaaactatagactgtttcagtgacttcctatattattaaagcatagaagctcaaagttcaaaagctctacaaggagcttccagatatcctgaatttggacaccagcacacataatcacaacaagatgaaagcagatacgattatagggtgataactgcacactggaatccaccttttaaatcctttctacctcttcctgaaattataggtcgccattctaatctcattttgcatttcaaaggttccttttatctaaaaaaatcaaaagtctttccacaccataactgataggtgcagccatctgtagctcaatttcacaggtaggcaagaaaattccagggtatgtccaaaagaacatataagaaaccagtaactaccaagccaagtggaaactcacaggcctgctgctttcttattgctccacaaaacaaaaaaacaaagtaactcactgatttagtcagcacttgagatttcttaagccttttttttttttttttagacggagtcctgccctgttacccaggctggagtgcaacggcgcgatctcagctcactgcaacctccgcctccggggttcaagggattctcctgcctcagcctcctgagtagctgggattacaggcaacgtggcaccatgcctggctaattttttgtatctttagtagagatggggtttcaccatgttggccaggctggtcttgaactcctgagctcatgatccacccacctcggcctcccaaaatgctgggattacaggcttttgtgtttttttgagacaaagtcttgctctgtcgctcaggctggagttgcagtggcactctctgcctgcaacctctgcctcccagactcaagtgatccttctacctcagcctcctgagtagctaggactacaggcatgtgccaccatgtctggttaactgtttttaattttttgtagagacaagctctcactatattgcccaggctggtcttgaactcctgagctcaagaggtcctcctgctttggcctcccaaagtgctgggattatggtcatgaaccaccatgtccagcattttaaggtactaatagtaattccttcttctactcaaatactgtcatttacacatagaaggtagtcaatggcatggagccactgatggtcacttgctgggtcagggcatggcctagacccacgtgctgcactatgtagagcattctttttgctttttagttagcaatatgatcaatgccttttaaaaaatgtatttgtacatttaccaaaataaaattagtaatgcacatggtttttttttttttaaaggcacagtataatacagaaggatagaaaatctaaaaagttggccaggtatggtggctcacgcctgtaatctcagcactttgtgtggccaaggaaggtggatcacttgaggccaggagtttgagaccagccaggccaacatagtcatatcctgtctctactaaaaatagaaaacattggctgggtgtggtggtacacgcctgtaatcccagctacacaggaggctgaggcaagaaaatcaattgaaccgaggaggctacagtgagccgagattgcaccactgcactccagcctcagcaacagagtgagactctgtctcaaaaaaaaaaaaaaaaaaaaaaaaaaatctaaaaagtctccctccttctgtcttctgtctgcttctcttctcccaaaggtacccattgttcaaggggttttgtgtagggttccaggaaaagctgtgtacatctcgggctgtgtgcccaggcactgctccaggccccgcccccttacacttcatgttgtatcttgcagagctttctatatcagcccatggtatgcagctactgtttggagagatttttattatttaacccttaaccttttgataggcacttaggctgctattgaaactccacttcaatatacatcctttgctaatatccctgcaggtaaattcctgacagtgcacttgctgtgttcaaagggtaagtgcccttataatttaaatggatgtctccaaactgccctccaaaaaatgacttaacctatttacatccccactatcaaattacctgttttctcacactctccccaacatagggtatcaagttttttaatctctgccaatccaataataaaaacaaatagtgccactcttttgattagcatttcttttactacaagtgagctaaacaatttttcgttggattaatggccacctactgtggttatgagcagggcagggttcagatgccagctagtctggattcacacaaccacatactaacccttgtgagtgccaatcaggtattataaagcaatcacttaacctcactgtagtttgtttcctcatctgtaaacaatggtacctatttcatagggttgttttgagaattaaatgagaaaacatatgtgaaatgctcagtacagcccctggcatacagtgagggcttgggaagactccgctaccagtagtagtggcagttgtagtagaaaaagtaagaaggacagttctttcactgggacctctttcttcagatcctttgcctgtttttcagttgggttgtccatccatttcttactggtttgtatgattttttttcaaattaaagaaattagccattcatcacttgttataaatatttttcgcacctttttgcttgttttgtttgtagaatttccctgtttctgtaaaataacttttgttgtctttttttatgcaagaaatacctattaactatagaaagattagaaaatacaaacagaagcaaacatcacctgtaacttcacatcctagatactttctatgaattttttgtagtcaactcttcactaaaaatgggattccacacatattgctttgatatgatcacaatatattgtgactatctttctacactgcatccccttttgactcccaaagtcagtattttgccctcctttcaacacacttcccttctttacagactcctgtctgttccaagttcaagagatgccctgtgtctgagaagacaacacaggccttctcccagccaatgaaaaaagctggaagcaccaagattcataggcacccttttccatagacaaagctttgaatgccactaagccccctagaacatgtgctacaagaaacaattaaccagcagcccccctggaagactttgacaggtggtgctcctgttatagctcattccacatttccctgggattgcagaattactgagtcttatccatgccagggacaggtttgtaaaagactgaccattttaccaggggcttgacctcaccagttccaaataaagagatcaccatgaccccaagtttttttctatcttagaaatgttgggccaggcacggtggctcacgcctgtaatcccagcactttgggaggccaaggcggacagatcacctgaggtcaggagttcgagaccagcctgaccaacatggagaaaccctgtctctactaaaaatacaaaattggctgggcgtggtggtgcatgcctataatcccagctatttaggaggctaaggcaggagaattacttgaacccagggggcagaggttgcagtgatccattgcactccggcctgggcaacaagagtgaaactccgtctcaaaaaaaaataatactaaaataaaaaatgtttgacttggggaattcctgacttccctactggtggtcaaggcagagactgtgcaggctccaaagtcagtgcacttgctgacagtgcacttgctgtgttccaagggtaagtgccttatatgccttaatactgacacctaaagcccagtgggcccaggccgggaaaatgggacagaggctctgcttactttaattcagtgtcagaaatggtcacaactcaacaactcaaaggaaattaagaaactaaataatgaggctcagggccgggtgcggtggctcacgcctataatcccagcactttgggaggccgaagtgggcggatcacctgaggtaaggagttcaagaacagcctgtccaacatggtgaaaccctgtctctactaaaaatacaaaaattagccaggtgtggtggcacgcgcctgtagtcccagctactcaggaggctgaggcaggagaattgcttgaacctgggaggtggaggctgcagtgagccaagatcgtgccactgcactccagcctgggagacagagcacgactccatctcgggggcggcggggaggggggaagacggggggtggggggctcagaaacaggaaaaaaaagtatggggaggggcagaaaagaatctcatcttttacatttgagcagttacattatccaactaagtccgaagaacagcttctctttggacccagggatctcattccaaaaacagatcagcaaccagcagggccccatgacttcctctctcccacaggtctactcagagacacctgctctcacatcaagtacaccagaaagatggtgcaggagttagcaggcagactgaggtttcaagagatagagagagaatgttcccagactttttgctcactaactacttcggttttgcgttcccatttgagaccccacagaaacgaacgtggatttctctactccaatggtgcaggtggaacaaactcccatttaggcttattcaatgaatgtaaaataaaacatttctaatagtgacaactctgcagccagtcagacacggcgagtctcttctccatggtgtaggggcaacccacccctacaacccacccctacacatgggttctggttctctacccctttacgcagttgcctttcctgttgctgttgcaacagtgactgttgcaacactgagggttttcagctctgccctgcacccagaggaggtggcaatcaccacagagcccaggacaggagtgggctgctccttccagataacgcagaagcagcgcccacttcctccccgctccccgtagcaatttcaaggaagctcattctgtcgcagccaatttgaagaagcaaagaatgacactaaaccaatgaaactaaatcttactctgcattcgcatgccccacggcatgaggttccacactgggcactcaaaatccaggatagacagagctcatttcaacccctctaaaaaagcacgctgggcttccagactttgtgagtagtggagggaaatcatccagccccaagtgaacagctccccaggctcaccttgggcgtgcagtgcgcggtggagcaggggcaggagccccgcctgccagaaggagtagcagccatccaccagcttgttgcagcggccctgaaatcctccttcaaatcgcatctgccggcttgtcacccattgctgaggagacacagatgggaaaggcagttgtaggctaaaagagacaaaatccagcccgacagaatctccaggagtcaatctgtgggatggagggtttcccatcttgtggcttcttggcactctagttttggtgctctggttttctttccttccctccccacactgccatagacacagagtgaagcatttaagccaacgctgtagaggcatccagcactgatctctgctcaatgcctggcagacaactaccttttcctgggttccaaagcagtgccagtgctgagaagataaagaggccaagctggtttgtaaggagaccttcaaagtctcttaataaacatggcttaagttggaaattgaaggcaagactaccagtagctcatttctcattacttccctgctccggggagtttattaaaagcagataaatggaatttggtactacatttcttttttttttttttttttttttttttttttttgagacggagtctcgctctgtcgcccaggccggactgcggactgcagtggcgcaatctcggctcactgcaagctccgcttcccgggttcacgccattctcctgcctcagcctcccgagtagctgggaccacaggcgcccgccaccgcgcccggctaattttttgtatttttagtagagacggggtttcaccttgttagccaggatggtctcgatctcctgacctcatgatccacccgcctcggcctcccaaagtgctgggattacaggcgtgagccaccgtgcccggcctggtactacatttcatcagatgatctcaaactgctcctgacttttacttggcacctggggaaatttacccaaggtctcttagcaagtcactagcaggcctgaaagcagaagccattcattctaattaccaaatgacaactctgcccagtctgtggctgatataagaaaatcttttactttgaagctgtaaaataggtcttggtcttgatgtcactcagcggtcacacacgataccaccattccttgcttatctacaagttttctaaacacactctactacaaagatcaagatagtcatgggtttggtccctcagaatgagcagaaccaactggctgagcagatatgacatttccatttccctccctagaccacctaggccgttccagccacggacttacagagctgcctcactcaactgaaagggtacaggggagggtacttcctgtttctagagtcttactaggtaaaggtcctgaaaggagccactgggacccttgatggaagtgggggccagccctcccctaaaagctgttgtttagattattccctcttcaaggcaacacctgcccatagagagtcacagtcacaaatgcttaaaagagacagaaaacactgtactgcaggttcaggtactaatatatcctcggttgatcttaaatgaaccagggcttccagcatgtaatggaagtgggctaagcattactcaggcagagagaaagcaggcgctgcagtgggagtcggttcctcatttctacttaccgcagggcttaagtgtttttaagcagactaatttactttttccagtgcctaagcccatggatttgttctgtttccttgggctataggaattcatacttcagatatgggtcctacttctcccaaagcaaatggaagggagtagtctggattagagcaggggtccctaacccccagaccatgccaggctgcacagcaggacatgagtggtgggtgagccagtgaagcttaatctgtatttacagctgctcctcactgctcccattactgcctgagctccacttcctgacagatcagcagcagcattagattctcataggagcgcaaaccctactgtgaaccgtgtatgccaggcttctaggttgcacgctctacatgagagtctaatgcctgatgatctgtcactgtctcccatcacccccaaatgggactgtctagttgaaagaaaacaagctcagggctctcactgattctacattatggtgagttgtataattatttcattatatattacagtgtaataatagaaataaagtacacaataaatgtaatgtacttgaatcatcctgaagccatcaccccccgtcccacccccaaccccaggtccacggaaaaattatctcccacaaaactggtcccttgtgccaaaaagattattactgtgggttagagggacactaacatttattaagtacctactatgtgccaggctgtttataaatgttctctcctttaaccttaaaaaaataaggattgttatccctaccttataaaagaaaaaaatatcaagctaaaagagattagacaatttgcccaaggactcatgtctcaaatgtagtagggacagggttcaaatctagaacactgtctttataactgaggcactccctaatcacattccttatctctgcctgggagatgggacttttttgtttcatgccttattggtgttcagattttaaaacatctgagaaactcttaagttcagcatacaaagttggctgtttcagcatgagccttcaagccttcatgaatctttaaaaagactacaccgggggaggctttctgaaggtggaggcaagacactgctggttacatgtctacagggtacaacagaaactctccaggaagctcacgatgggccgcataacgggaggctggcatctgaactcagggagaggaggtgcatgtcagttgcagctggtttgctttgacgtcatggtcagggggtacatgctccccaaatgacatgacggggaatgccttctccctggtggccgtggaggtgtgtgtgtttgtgcacccactgatcatttaactacaatctagtgactccctgaagctgactgctttctgagtttcttctgaatactggccaggagcgtggggtccagacataaatgttgggctgccttctcaatgcaattagccagctctgcctaaacaactcatttaaatgtaggtactaaatgtttacacagtgcagcaggtaataaaagtttggtttcgaaatgctgcaaagctcttcttgtaacttttcctcttaggaggttctttctataacacacgataacctctaattctacgaaactgaagtataaggaaggtactctgctcacaccagatgtctgcagcacacagtctatgtagtctacacactatgtaaaaagctctaagcaggaagacagaaaggcagaagggggagccaagacagagcagctgctcactccttcctctgtgttggaacagagctaactctcttagcccttcccatagccaaactctcctgaagcctgcatgtctgagtacaatcacatcaccatgacctggggcctgagagggggatggctcaaaagatacttactaataagctcttcaagttcaaggaacgttccctcttgaggattaccagcgcggccaggccacagaaggtatagccaccatgggcttccatccctggtaccccgccaatgccaccttcccagttctgacacctaagaagagattgagaaaagcagaatgagtggccagtgagtggacgtacacaagaccaggaccatcctaggtggcagagaaaaagttcactcagattaaggtgtgaaccatcacaactatgaatgaaaagatgccaactaattaacttttggaaatgtcttttcaaaaaaaaaaaaaaaaaaaagctgggcctggtggcacccatgtgtaatcccagctgctcaggagactaaggcaagaagatcacttgaggcgaggagttcgaggctgcagtgagctatgatcacaccattgtgctccagcccgggtgaaagagtgagactaggtctccaaaaaatgtaagtataataaaaactgtaaaatgttaaaaacccagacacttagaaacagcctacttgtgtaagaaacataataattcaaattattactctttgggaaaaagttataaaatcatacatatacatatatgtacatatatacacatatatatacatatatatatatacacacatatatatacatatatatacatatatatatagtgataaccatcaagttaaaataaaattaaagagtgattgttgattctagtgatcttttatttttgaaacagggtcttaactctgttacctaggttgactgcagatcatggctcactgcagcctcaacctcctggactcaggcaatcctcccacctcagcctcctgagtagctgggactatgggcgtgccccaccatacccggaccattttttgtattttttgtagagatggggcattgccatgttacccaggctggtcttaaatttctggcctcaaggaatcctcccaccccagcatcccaaagcgttgggatgacaggcatgggccaccgcacttggcctctggtgatctttgagtacaggtctactagtaatatttttcctttttgtttttctatttgttcaaaaagtttttataatgaacctgtatactattaaaaaataaacgttatttttaaaaattataattaggccaggtggtgatggcttcttaaacagcctgcagaaccatgagccaaataaacctcttttctttctaagttacccagcctcaggtattcctttatactgacacaaaatggactaacacaagaaggacaagaaataactgacttagtagaatagagaaacctttcctacccaaaggatagggatgggagaggggcaacaaaaagcaaggtgatctgctccaataaaaggctccaggattagagatacagggaacctccacaaagtggaatgcgtctgaaccaagtttgttggttgcaaacttatataagaatcagacctttaagtcccctactcaaatccagcagaagatgggaagtttcagaggtttaatcaaaaggatctgagttccagaatatccaacaagctaagaggaggagggagcactgtaccaaatgtgattacgtgagagtcagtaatctcaacacaatacccccagccccattcctctgtgtatttcacacaaggctgccagtttcataccccaagcaggaatttagaagattcctctctgagggaactgataagcccaagggaaaaaccctacagacactgctttgagaattccccaatgaatggcttgatcctgcccactctcgcagagctccccagcagcttttcagtgctggatccttaaatatgaacagacagctgtagagtaccagacatttgaccacagtctctactatgaaagaggagaccaaaacaaacaaaaataaattggaggaaataagacagggagcaaaagaaaactttttaaagttgtatctttagataaaatattatatgaagtaagactattgagaggacaaaatatccccagaaaagaacaagagagtagataaaaaagtagtcaggaagtaaaagtagtcagggaggaaaactaaaaataggattacaaaaataaaaacaagaggattagaagataaatactaagagaatctctcaaagtataagaagaaggattaagagatggaaacgaaccatgcaatgaaatatttttatttttatttatttatttttgagacagagtctcgctctgatgccgaggctggagtacagtggcacaatcttggctcactgcaacctccgcctcctgggttcaagtgattctcctgcctcagcctcctgagtacgtgggattacaggtgcatgccaccacgcccggctaatttttgtatttttagtaaagacagggtttcaccatgttggtcaggctggtttcgaactcctgacctcgtgatctgcctgccttggcctcccaaagtgctgggattacaggtatgagccactgcacccggcagtattatttttatttatttatttattttgagatggagtctcacactgtcacctgggctggagtgcaatggtgcgatctcggctcactgcaacctctgcctcctgggttcaagcaattctcctgcctcagcctcccgagtagctgggattacaggtacccaccaccacacccggctaatgttttgtatattttgtagaggctgggtttcactatgttggccaagctggtctcgaactcctgacctcgtgatccgcccgcctcagcctcccaaagtgttaggattacaggcgtgagccaccacgcccagcctcaaagtattcttaaaagtcagacaatcaaatgtactaatgggatgtcatatttttaaaaggctggccaggtgcgggggctcatgcctgtaatcccagcactttgggagaccaaggcaggaggatcatttgaggtcaggagtttgagactaacctgatcaacatggcgaaaccccgtaaaaattagctgggtgtcgtggcgcacgcctataatcccagctacttgggaggctgaggcaggagaatcgcttgaacctgggagaaagaggttgcagtgagctggtctgcaccaccgcactccagcctgggcaacagagcaaggcaccatctcaataaataaataaataaataaataaataaataaataaataaataaataaataaataataaataaataaataagaggctgggcatggtggctcacacctgtaatcccagcacttggggaagccgcagcaggaggattacgtcagcccaggagtttgagaccaacctgggcaatgtggtgaggctttgtctctacaaaaatttaaaaaattagcggatggtggatgcctgtagtcacagctactcaggaggctgaggatgatcacttgagcctggaaagtcgaggcaacagtgaaccatgatcgtgtcactgcactccaatctgggagacacataaaacaaaaagagacgtctcaaaaaaaaaaaaaaaaaaaaaaaaaaaaaaaaaaaaaaaaaaagggcccggcgtggtggctcacgcctataatctcagcactttgggaggccgaggcaggcgatcacttgaggtcaggagttcgagaccagcctggccaacatggtaaaaccccatctctactaaaaatacaaaaattagctgggcgtggtcgtgggcttctgtagtcccagctactcaggaggctgaggcaggagaattgctggaacctgagaggcagaggttgcagtgagccgagatcacgccattgcactccagcccgggtaacaacagcaagactccgtctcaaaggaaaaaaaaaaaagagcaaacacagaaaacacaagagaagaaattatcaaagaaatactgtaataaagaatcttggtactaaagtatatgcacttccaaatcgagtgcccagcaaaatgaataaaaataatccacatcaagattcatcatcaagtttccaaacaagaataaacattccaggccaggcgaggtggctcatgtctgtaatcccagtactttgggaggctcaggagggcagatcacttgaggtcaggagtttgagaccagcctggccagtatgacgagaccctgtctctactaaaaatacaaaaattagtcaggcatggtggcaggcacctgaggttgcagtgagctgagattacgccactgcactccaacctgggtgacagagcaagactccatcacacacaaaaagaataaagattccaagccgctaaagaaggacaggatggggatagaaaaagagagacagaagaaaaaaacatacagagaattaagaatcacaatggcactgccaggtagtacagcacagtggaatccatttgatttctctgtatttctgcttaatataaaatttaaaggctgggtgtggtggctcacgcctataatcccagcactttgggaggctgaggcaggcggattgcttaagctcaggggtttaagaccagcctgggcaacatgggaaaaccccgtctctactaaaaacacaaaaattagccaggtgtggtggcatacacctgcagtcctggctacttggaaagctgaagcaggaggatcacttgaacccaggaggtcaaggctgcagtgagccaagatcacgccactgcactccagcctgggtgacgaagtgagaccctctttcaaaaaataaataaattaaattaaattaattaaattcagtatcccaccacttgacatataaggaaactatgacacagagcagtggaataacttgtccaagcacaaagctaattagaaatggcaggctggccatcgtggctcacacctgtaattccaacactttgtggggctgaggcaggaagattgcttgaaaccaggagttcaagaccagcctgggcaacacagtgagactctgtctttacaagacattttaaaaattagctaggtgttgtggtgcacacctgtggtctctgctactcaggaggctgaggtgggaagactgcttgagcccaggaggtcaaggctgcagtgagccgtgatcatatcactgcaatccagccagggcaacaagcaagaccgtgtcttcaaagaaaaaaaaaaaaagctgggcgcagtggctcatgcctgtaatccttgaactttggtaggtcaaggtgggtggatagcctgagcccaggagttcaagccccacctggacaacacagacagatcccatctctacaaattttttttttaaacattagctggttatggtggcacgcgcttgttgtcccagctacttaggaggttgagatgggaggattgcttgagcccaggaggtggtggctgcagcgagctgtgatcacaccactacactccagctcgtgcaacagagcaagactcggtctcaaaaaaagaaagagagaattgaaagacagaggaagaaagaaggaagagaagaggaaagaaagggcaaaactgggattcaaacccaggctgtctgagttccgtatctagtctgtgcctaaccagtcaacccccctgcaaatgacagctgtacactgaacaaaatacaaaaaaacagcttcctgagggttcagctgactgaaaaagggcaggcagattttggtggagtttgaaacttggaacagagaacagcatgcagttagtccctcccttcccccacaactttttctctctggtttgccctcaggatggcagccatagcccagggcggcagcagcaggccaggggtcaggggtcagggcgggcagccaacactctaatgggaagccaaccatccttctggcaggaagatgcaggctgccagaaactgaggacgaatccagaaacaggaaagtcaaagaagaaaaatcccaaattctgcatttaaactcagttcaagtttccacatacgtgctggggaaacaaagcaacttctaagcaagaactgagctctgagctgctgcatgagtgacagtttgtagcttgagtctgaccaagttgactgcctgctaaactgaaaacatcaaccccttttggggcaaaccaacagaatccataccgttctgttgtatgacacctccaccatcatatcacaatgtctaggacacaacacaacatcactcagcacaggaagactcatggagctgacatgccaactccaggacacacagatgtggaaattcccagacaagcaatttaaagcagacattataattccatacttaccacagcaaaatgaagaaaaatgcactcataaagaataaaaagatggaaaatctcagctgagaaacacaaaatataaaagagaaccaaacacaggcagtgcctactctccagctctcaactatagctgccttaccattgagcatgacagtcctcaatgaactctggttactattatcagccttattaacaatgacattggaagccagaagataatgaagcaatgcttacaaaattcagaaagactacagtttataccattgccaagttagaaatctctaaccaaataattaagtgtgagattagaacacagatacatgcaagatattaaaaatgtatctcccaggtacccttttttgggatctgttggagtacaatacttcatgaaaataagaaaaccaagaaaaaggaggacagggacttcaacgaaggagagaaatgaagtgaatttcatgctgaaaggaagcttcgggatgcctgctgtgtagcaagctgagagcaatctgtccagactgaagcaggagggcagagggctccagaaggggcaactcaaaacgcacgtgtgcacagagacaggttacctgaagggtttgactatgtttagagtaattttttatagctctgacagacaatttgggaaggaattcataagtacattcatgatatatccattaactccaggaaaatgaaactcatacaaaaaagtaaacatgatctcagcatatcatctggtatcactgtaaattatatttatatggtaatacatactactttgataaaaataaaatttttttaactaaaacagtatctcagcttggctatcattccatcatagtatatatgtgtctactataccttttgcttctttttttgagatggagtctcgccctgtcgcccaggctggagtgcagtggcgtgatctcggctcactgcaagctccgcctcctgggttcactccattctcctgcctcagcttcccgagtagctgggactacaggcgcccgccaccatgcccagctaattttttgtatttttagtagagacggggtgtcaccatgttagccaggatggtctcgatttcctgacctcatgatccgcttgccctggcctcccaaagtgctggaattacaggcgtgagccaccgcacctggcctgctttttttaaactatgaaatatttggagcatccaggaaagtacagcaaacaaaatatagaacatacacgtatctaagacctagcttagaattagccatatacacttcaggtctttgttgttgttaactattacagctgaagtctcctatgcagacttatctcatttcctttgctctcccctcagcgggaatcactatgctaaatttggtgtttatctttcgtatacatgtttttatattattaccacatgattcttctcagaaacaatacagaattctcttgcatgtttcaaattttaagtaaatgtgctaatctgtatggtttttttgtatttttttcttttcattctttcaactcaacatagagatttttccatattgatacatgtaactctagttcattcattttcactgctacattatattccgatgcaactataccacacttacccatctcgtgcttatgagcactgaatctgctttcagcttttggctcttataaacaagtcctgtgctcctctctcccattcgtgtgtgcaagggtttctgtgggagtggaattactgggtcctacgcaagggcacctttgacatactgtcaaattgctctaaaaactggttaaatcaattcaggctctcactaatattgtttaccaaagttttttatctttgccaatctaaaatataatataacattaaagaaagtttggaaaaaagaagacattttaagtatttaaaaaaatcattagataaccctaatggatctcctgtgatttttgtatttccttccaagtccctctgcattttctttatttttctgaagtagtgtcgtgaccgcctgctctccaagaggccaggagaaaccctggcttctctcaccttgctatccattcagcagtgccctcaaagaggtctggagtgatgatgttggtcagcgaggctacggaggcagcacagtatgcgcttctggaaagacagaaacgggaaacacattaagctctacggaagagctaatgaggctcagtgaactccgcgggcggactgctcgccttgcctagtaagctgtaatcacctcctgtcctcactcttggcacacggtcagtcctcctgggtctccaactgagaggtgtgacattctatttggatagagttgctcacggcatggcttcagtgaaagaacatgacattctattctccctacctccacatggtccaatctacatcagaggaaataacagccatatcaattcatgtcaaaagtggattcagctcttctttcaaagacctataatggttgccataaatctatggtatcattcaggtacttctgatatgctcattcatttggatgttagtactgtttcagagccaggatttctgtttacagccttgacacattaaagattaactatactttttctgcaacagataaactgcaaaacaggccaccaaattgtaatagatcaaacaaggataggaacaggtgagtccactccaatacagtccttaaacctctagagggagaaaagagccttgatttcaaacctctcaccagtacacacacacacacacacacacacacacacacacacacacgttaaatgaaaaaggcgcacgtctatattttttgttttgcttttgttttggtttttattgagacagggtctcactctgtcgcccaggctagagtgcagtggtatgatctcagctcactgcaacctccgcctcctgggttcaagcaattctcctgtatcagcctcccaagtagctgggattacaggcgcatgccaccatgcctggcttatttttctatttttagtggagatggggtttcgccatgttggctaggctggtttcaaactcctgacctcaagcaatccacctgccttggcctcccaaagtgctgggattacaggcataagccaccgcgcccgggctattttttaaaaaagcattattaggctgggcacagttgctcatgcctgtaatcccagcactttgggaggctgaggcaggtggatcacgaggccaggagttcaagaccaacctgaccaatattgcgaaaccccgtctccactaaaaacacaaaaattagctgggcatggtggcgtgtgcccgtagtcccaactacttgggaggctgaggcaggagaaccacttgaacccgggaggcgggggttgcagtgagccaagatcatgccactgcattccagcttgggcaacagagtgagactctgtctcaaaaaaaaaaacaaacacaaaaaattattatacttgatttaggatcattcttgctgttccatcctcccagccctaattcttctcggggcacattttatttcagcttctccctctgtcatggtatacacacacagactgcctttccttcccctctatggttttttcaaatacccggcacagggaagacaaaaatcattggtttgaattctgctcaaaaatccttctcctggccaggcatggtagctcatgcctgtaatcccagcactttgggaggctaaggcaggtggattatttgaggtcaggagttcgagactagcctggccaacatggtgagacctcgtctctactaaaaatacaaaaattagctgggcatggtggcacacgcctgtaatcccagctacttgggagaccgaggcaggagaatcgtttgaaccccagagacagaggttgcagtgagccaagatcccaccactgcgctcctgcctgggcaacagaaagaaactccatctcaaaacaaaacaaacaaaaagtatattcctaagggctcctaagaaacataaaagaagggcctagtttccatcttcttttttttttttaagataggatctcactttgttgcccaggctgcagtgcagtggcgctatcatggctcactgcaacctcaaactcctgggctcaaactgatcttgcctcagcctcctaagcagctgaggctacagatgcatgccaccacacctggctaattttttaaaaattttttgtagagacagggtcttgctgtgttacccaggttggtcttgaactcctggcctcaagtgattctctcatctcagtctctcaaagtgttgagattacagacatgagccactgccgctcggccctggtttccatcttactcagtatagatataacatgaagtcagacttactgaggtattccaaagaagtctctgcagaagctgcatgcattatgatcctaccagcatttttagcagccaaaggcacagtggaagtttagttccaccagcaggcattgggagcacacaagagtcacaagtgccaatgccaaatgtgatcatctaccagcagctaattttgaagatctgtctaatttccttgcaattgtaggcctcttaaagaggctcagatgcatttgctcttgaatcctattgtgacttgtgaggtaggaggcgacctataatacagtttgcctctcacaagtgtgaggactaagaagtgatgacagaagacaggagtcccaggtctcacgctgagatggggaggaaacgtaatacaaccttttcatgtatttctccccctttccctccacccagtcatcgcagctctcaaatttgaatttgtccactaactttccatccttgctgccatcacccaaatccaagccttcttcaacctggatcagtcttcctgctctctctccctccagccctgaaaccagagggcttttattggaacactacagtccatcactgcaattgggaaacttctaagaaaatacaaatcagatcacatcactaaactccagactccataggagatttcagggcctctgtagcctgttcccagcctgtccctccagctccactgctcccctgcccaccaggccatctacacttcaacactgaacttgtcctttcttgagcaacacatgctttctcaccaaacttctgcaaatgctagatccctgcctccaccttatcctcacagaatgatctagattatataacctagaaaggaggtctcctttcttaagaactgagaaaaaatagtgcttgctatgagttcactgtgatttgattttttacaatacactggaactacagacccttgagtaggctcatctctgaaactatcagcagtgtaacagagcagaaagatcatccagagactgctgtctatcccagaagggcagcgagctagtctccagatgtcaaactctcccatcactgctgcttttctccaagtcaaatccacccaaacaagcactcctgaggactggctgatgcttccaggcaaaggacaatgaaagaaatgccaagtgaaaaatgatggaatcggggtactagaaaccaggcaaagcaaggaaaatggatgcaatctgctagcttttctctatcattcatatctttaatcctttatgtaaatagaaagcacgggcacgaatggcagagcatcacccaaagagcaaaggtcagggaagaatatggctacagtgcttggcaggggaaccaagctgccttactggagaagtttcctagcatttatctagaacatataaataaagagcatagggaaaaaaaaagtgctggaatgaataagatagcaaataatcacagctgcaaaaggtatatgataaaataccaaaaggatcttgctatgatttgtttgcttttgcctaataatcttagtaggtttttaaaagctgcgtttcaagactgtgcatattttgggggaatagcaacagaacaggaacgaaaatgtagtgaacacgagggaaaaaaactcttttaacattttccttaagaagaatcaacacatactgatttacctcagtcgttctactggtttcactggtatacacagatcctaatctaatttttttggttggattagacaagttagagatagaagaacatcttgaactaaaggcctttgcagcctgattacctattatctgtaatgtattttatgctccacaatgttcgtggttttttcctcccctatactttcaaaccaatggttaaaccagatgcttaagccagactattaatcaacttgtgtagaagcaaacccatttacacataggcagtaagacagctttgctatagaaacctcacaaaatgtatttctcaactaaataataagaaaatggcataaaatctcaataagccactgtcttagagaaatggcttattcaatgaattccctgtatgcctcataagtaatctgccaggtgaggaagcaacttgcttggtacatcagacacttatggaagaaaataataatttcgagctaactggcaccaatcagttaatgcgattttattgcactgcactctcccggcccacaaggctctctgcacctcccagaaaaactctcatgtgcctcaggaggacctcagggattagacattctcatgatttcatcaaattcactcagaaggtatttactgaggccctgctggactttcccctcccttcctatctcagagaggtgaaggaatacattacaccatacagttatttatattgtggtatatcattttgtaccaaacaaatgtatttttaatttctaaaacaaaagcatttgtttcttatattttcacatttacataaaataagtcaagtgatcatgacacctgaggacatctgcatcacatctgaatgattctgacgtgtcactgacatgtcatcccatgtgtcattctgggacaaagcagcagcttccccatgatgttccttaggcttggcatctctaatggcagatgagctctagagtcaactgatgtggcagcctgtgcaaaaccccactcacctcacatccacctcacctccgacatgcatgagaaaggagccgtcaggttgcttcagggagtacaaatactgaagaagcttctctctgagaaacagggaaagaggtaggagaggcaacagtcagtgcgtgtcagcaggcggggaactcctctaggtttctgtcactgctggctttcactgtacctgttaatgatgtcataggcctcctcggtgccaatgatgcacaatgcattgactgctgcatatgtgggtgcaaggtgtggatactgaccgggtcctcctccaaagccaccttctgggctctgacacagctccaggaactgacacacactaggtacacagccaaagggcaaaaacaaagtcagagagcattcatgtcaaaacaccaaattcccactagattccaggcctttccaatgatcccccactccctcaaaagttgaggggaacctctcctcccacttgttgaatataacctctccccaaagggcttaattctctctccagctatcatcatttctgtctgccctcctctgagtttcgtacttaagcgcttgttggtcatgaagcagggaacacaaggctgggaagaaaccgactttcgtagctatggggtaagagtctcccgtgcttcccacacaaacctttcccagactttccactcaacttgctgccctggacctgtggtaccagcctcctcctccttgcctttgggaacctcccagcctttgaattttgccaaaacatggtgctcaactgcttctttccacactaaccatcctagtcaggatccatcacctaggcctatcatgaacatgtaaatagaggtcttctcactcccattgccacctaagcctctgtgggccactgatttctactccaccagtaagaagcaagttttgtttttttgtttttttttttgaggcggggttgccctcggtcgcccaggctgcagtgcagtggtgtgatctcagctcattgcagcatccgtctcccaggttcaagagattcttttgcctcacccttccaagtagctgggattacaggcgtgcaccatcacgcccagccaattttttgtattttcagtacagacaaggtttcaccatgctggccaggctggtcttgaactacctgacctcaagtgatccacccgccgcagcctctgcaagtgctgggattacaggtgtgagccactgcatccggctgaaaaacacatttttaatggagcctgcttccatggctgggagaacagaagagaggcaggctgctctcatgctcaccttaattgcggtaaacataagaggagctgcactgactcgccgtgagaatgcctcccagtctgcgggttcttggagaattctccacgttaattcaaacaggctcccattccctcactgaggggagctgttttctgagggtttgcctccaagcctggcatcaggctgcccagaggttacagtcttgctttaggtgaaatcaagagagccctatcatcagtccggggtcttccgaagtgcaccagaaagggtgccccaggaaagccctggttatcaagctgtttctccacagctcagcagggtcacagccttcccgccaggagaaacctccatttacaacaagcaaactgtctttgcagtgttcatggggccttctttcctgggcgctttcacctcattatttccttgctactgctgccagaaagactacatagcctactctccaagaagacacaagtttataactgtttgccaacatcacatttaattgctttcgatttcagagttcccattatccgggcagagaaagcaaaagcaaacgctgctgccttgctctgtgagttctgaaacgtcacaggttaaaacaacacatacttctttttgcacctacaattttactgtagaaaacacaaggattgaaactgaagttgaaaacaattatgtggcactatggtttttgtttttgattttgagagagggtcttactctgtcggccaggctgcaggacagcggcataatcacggctcactgcagcctcaacctccccagactcaagctatcctcccacctcagcctcccaagtagctagaattacaggcatgagccaccacgcctggctagtttttgtattttttataaagatggggtttcgccatgttgcccaggctagtcttgaactcctgggctcaagcaatcctcccacctcggactcccaaagtgctgaggtcacaggtgtgagccatcatgcccagcatgtgacacatttttaacagcaattaatttctgtagagaacttgaatttgttccttctttccaaatcgtcatcaattcttatgacatttcccagaaacaaatagttaataagctcatgccctaacaaaggctggctgcactagcataccaaaaggtttctgtaccacaaaaagttttagctgatacaaaacttaacagcacattttttaaaagaaagaaaaagagtcacctggttatccactccctttcccagctcctaagatagaatcgtgccgaacgcaacactactgaccctaaagcctcgaattagttaggatctgaatgtaccagacacaccttgataccatccctccatgccaacctccctcagctgacatgctgcatctgactgtctggggctgtgctagagaactggaggttgggcttctcttgatctcagacacttccgtattacagaacattctgatcccaaggctttccaacttgcaccttaaggaattggcaagttgactatgaactaccagctgtcattcacagacttcttagcaattctgaagaccaaaatgttaatgatacttctacatatttaaaaaaaacaaacaaacaaaaaaaaggagccaggcatagtggcttgtgcctgtaattccagtactttgggaggccaaggcaggaggattgcttgaagccagtagttcaagaccagcctgggcaacacagtgagaccccagctctacaaaaaaatatttttttttcccacaaatgtagggggagaaaaacttatcatagagacaagaagttcaccaataaataaaaaattacaagcaaaaaacattgtacaaacaccaagtggcacattttgtgaaaaacaagtattcacaaaatcattcctttagaatatgactgaaagctgcaatacatcaattttctttaacgtcagcaaggcatttcattctagcttacgtgccaattaccagcaaagtgggaaactatcttctatatcatggatcttcaaacccaaaatgtgtgcatcagaatctgtagaaagctaataaaagaatacagagacccagtcctgctgaggtggaaaagatcctgggcctttgtatttttaccaaattctcaggtgattcagatacatgcaaagcttgagccatcactagtccttgctgcacaactaaaattacttggggggtgttttaaaaaaatcccaacacccaagccacacctaattccaattaaaccggaatcactatgggtgggacccaggtggcagtattttttttaaactccccacgtgattccaatgttcagccaggtatcagtgcttctcaaacttgagttgcatagaaattacctgtggatcttgctaaactgcagctctaattcagtagaactagatgggtctgagagtcctctttttttttttttttaggagatggagtgtccctctgtcgcccaggctggagtgcagttgagcgatctcagctcactgcaagctctgcctcctgggttcaagtgattctcctccctcagcctcccgagtagctgggactacaggtgcatgccgccacgcccagctaatttttgtattttttagtagagtcagggtttcactgtgttgcccaggctggtctcgaactcccgagctcagacaatccgcccgccttggcctcccaaagtgctaggattacaggcgtgagccaccatgcccggctgagagtcctcatttctaataagttcccaggtgatagcaatgctcctggtctggggaccacattttgagtagcaatgagatacatctgtgctgtccaataggcagccactagccacatgaggcaatttaaattctcaattaattaaaatagaaaattcagctcttcagtcacacaagacacatttcaagtactccacaactaactgtggctagtggccaatatagaacacgtatagatgtttatagacacctatagacatttacagaatatagaacattttcattatcacagaaagttctgctggacaccaccacttttatcattccatcattaaagagtatgtaaatcttgtaagagggtcaagttcaaagcagggatatcagcgattgcctctcagccttataaggagtttacttgggactcttaggtgatggctgaggactgatctaaagtgattgattctggccaggcgtggtggctcatgcctgtaatcccagcactttggctgaggtgagggggatcacttgagctcaggagttcaaggccagcctgggcaacatggcaaaaccccatctctacaagaattataaaaattaaccaggcacgttggcacccacctctagccccagctactcaggaggctgaggtgggaggatcacttgagcttggggaagtccaggttgcagtgagctgtgattgtgccactgcattccagcccagacaatagagtgagaccctgtctcaatcaattaatcaatgttgattctaaacaccgtcatcagtttggatgaaggattcaaaggcatgtacagtaaataagcatataatacaaaatgagcagcaaaacaaatcagaaaccaataagaataaaacaaatgcaacaggtacaaatagcaagaattacgcttagagatggcaggggtgggggatgggtaaggcacatgaatatgggaaatgactaggaacatagcaggaaaagaccagtaataagggtccacgagttgtgaagaacaacaataaaaatgcttgttaaaagcatcataaatgcagtattagtcagaactgtatctggctctagcctccattttccacctcaaagggaattcacatgagagttgtaaaaatgactactttttttttttttaagtatttggctgggtgtggtggctcgtgcctgtaatccctagactttgggaggccaaggcaggaggatcacttaaggccaagagtttgagaccagcttaggcaatacagcgagaccttatctctatttttaaaataatataaaaagcttaatattacagacaatcacagtgagaaagctacccagcaaaatacctcaaatatacaaaggataattacataaacattctagtaggtaaaaactgagactaatttgtagcaagaagtatttaggttacataaaaaacttcagcactagactaggctatcatagacagacttaaggcctaggataagttataaaaattatagctatgttctgcacaattgggcaggtttaaaaaaaaaaaaacagaaaaaaagattacagctttggaaataggaacagtcatccatgggcagaacggcttaggaggggatgtaaatgcaagatgcatgagctggcatcacatcaagcttgttctcgtactaactaaaacagcttcagcttgatatagtgaagaggaaatctccttccctaggtagaatatgacaatggacaggtgaagacgggcagcatctcttgttgattccgggtggcctctgctgctcacagagtcagacgtgttatttgactcttcatcaagcaccggcaagtctctggatggctgctgttctggaagaatggtcaggtcgaaagttggctactataggccgggcgcagtggctcacgcctataatcctagcactttgggaggccgacgtgggcggatcacttaaggccaggagtttgagaccagcctggccaacatggtgaaaccccatctctactaaaaatacaaaaattagccaggcatagtggcatgcgcccgtagtcccagctgcttgggaggctgaagcacgagaatcgcttgaacccggaaggtggaagttgcagtgagctgagattgcaccagtgccctccagcctgggggacacagcaagactgcctcaaaggaaaaaaaagttggctactttagagcagagtttctcaactgttgacactggggctcagtaattctttggtgcagggaccgtcctgtagaggatatttagcagcacctctgacctgcacccaccaggtgccaacagcacctggccaggaaaaatgcccaggagacaaaggcctagatatggtgtcctcactgaaaggtaaggaaacatacaaactagacttaaaaattaaaaggaaaaatatttaaggggctattccggggataagctactaacaaccttttgaaagggaaaggataaaacactgaaatagcaaaatttgaatttatctttggaaaaatcttacaagctgaaatgtcctaaaatggtttttaagttaaaggcaatttttaaatcttacagaagctaaaaacataactttaacagtgcgatggtctccctgtgaattttattttgctctgtttcactgaagctgctttcagtaacaaagaatgggattctcattagaggatgcttccttcagtgccaaaaccattaagcaaagcaaatgtacttagtctagttccaaaatattaattcattttagataaacacatataaatgtgtgcatataacctcttaaaagagggaagctaggccgggtgcggtggctcacatctgtaatcccaacactttgggaagccaagacaggtgtatcacctgaggtcaggagttcaagaccagcctggccaacatgttgaaagcctgtctttacaaaatacaaaaattagctgggcgtggtggcacacccctgtaatcctagctacttgggaagctgaggcaggagaatcacttgaacccgggaggtggaggttgcagtgagctgagatcatgccactgcactacagcctggcaacaagagcaaaactccgtctcaaaaaaaaaaaaaaaaggccgggcgcggtggctcatgcctgtaatcccagcactttgggaggctgaggcaggtggatcacctgaggtcaggagttcgagaccaacttggccaacatggtaaaacccaatctctactaaaaatacaaaaattagccgggtgtggtggctcccgcctgtatgcctgtagtcccagctactcgggaggccgaggcaggagaattgcttgaacccaggaggtggaggttgcagtgagccaagatcgtgccactgcactccagtctgggcaacagagcgagactctcaaaaaaaaaagaggcaagctgaagtcctacctatggactgggcatggtggctcacgcctataatcccagtgttttgggaggctaaggcaggaggatcaattgagcccaggagattgagaccagcccaggcaacacagcaaggcactgtctctaccaaaaataaagaaaacattccaggctatgaatacattattcttgaaacctctgataccagcagtaacaacctcgccttgctggctttggtcagcggtcatagcagctgacaaaagtattttgtccactagagggaacccagcttatcatattgttccctaaacaaatagaagcacagcagtgaacaaaataggaaagagaaacctttgtgtaagtgtagggggcgtgtgtgttacatgcaggggaaaagaaggcaggaaaataataaaactgcagagctagactttttgactctaggtcaccttaatatatttgtatgaagaaagaaaactgaacgcatttcaaagcatttcatttccctgtgcaagataaataaaaaggcaatattctatttcagctagtctaaaaaaaatcttctatttatatagaagtccttaagatttatctgtatcttactaaaaataatctatttccttatgggtcagagccagtaggctttgttcataacaagtgttttctgcacctagaagtaaccacctcctaggcacaaagcaaaatacattattgggaagtctaagaaatgtttaaaagttcactaaatcaatgcgtagaagaaccacaggtaaagcttttaaggcatctgtgaagcagaaactctcattaactgtcaagtggtttttgaaataaggacaaatcagcttatttttaaaccattccttttttaattacaaaataataaaagatcattgtagaaacttcagaaaatgcaagtaagcttaaaaaaaatgttttgtttgtttgttttttgagacaacagtctccttctgttacccaggctggagtgcagtggtgtgatctcggctcactgcaacctctgcctcccggattcaagcaattctcctgcttcagtctcccgagtagctgggattacaggtgccagccaccacatctggctattttttgtatttttagtagagacagggtttcaccatgttggccagactggtctcgaactcctgacctcaagtaatccgcctgtctcagcctctcaaagtcctgggattacagccatgagccactacatccagccagaaagttcttctttttctttttctttttttgagatggagtttcactcttgttgcccaggctggagtgcagtggtgcaatcttggctcaccgcaacctccgcctcccgggttcaagcgagtctcctgcctcagcctcctgagtaggagccgggagtgcagtaacagaaggagactcttgtctcaaaaaacaaacaaacagcctcctgagtaggattacaggcatgcgccaccacgcttggctaattttgtatttttagtagagacggggtttctccatgttggccaggctggtctcaaactcccgacctcaggtgatccacccacttcgttctcccaaagtgctgggattacaggtgtgagccaccgcgcctggcctttttttttttttttttttaagacagagtctcactctgtcctccaggctggagtagagtggcatgatcttggctcgtcgcaacgtccacctcccagattcaagcaattctcctgccttagtctcccgagtagctgggattacaggcatacaccaccaagccaggctaatttttatatttttagtagagacaagatttccccatgttggccaggctggtctcgaactcttgatctcaggtgatctgccgaccttggcctccccaagccctgggattacaggtgtgagacaccgtgcccagcccagaaagtttataaaatcacttttaaccccatcgtccagaaataactactacatgtatctttctggttctatctatgcatatcatcatctatatttttaatgtatgtaaattaaatcttttaaactattttcatttcacatctctctatataaatacatatattttaacatacaaatatacacattcatatatttattgagacagggtcttgctctgttgcccaggctggaatgcagtggtgccatcatggctcactgcagcctcaaacccctgaactcctgtctcggcctcctgagcagctagaactagaagtgtgcaccaccacgcccagctatttttatttttatttttgaaatggagtctcactatgtcgcccagactggtcttgaattcctgggccccagtggtcctctgaccgtggcctcccaaagtgctggggttacaggtgtgatcatgcgtggccacatttatacattttttaatggttatatagtatttcacagaatgtactgcaccataaatgacttatgttttattttttaaatttatgtattttatttatttatttttttgagatggagtgtcactctgttgcccggactggagtgcaaaggcgcaatctcgactcactgcaacctccgcctcctaggttcaagcgattctcctgcctcagcctcccgagtagctgggatgacaggcatgcaccaccatgcccagctaatttttgtattttagtagagatggggtttcaccatgttggccaggctggtctcaaactcctgacctcaagtgatccacccacctcaacctcccaaagtgcttgggattacaggcgtgagccaccacacccagctttacatttaaaaaaaattttttttaaacattctctactgttgatatttaatttagattgcttccaatgaaaggccctttaaaggctcctctcttcctatgtgacattgccccagaagcggcgctgacacttcctcagaaaagccttcactataaaacaccaagtacacagcctagaaaaaaactcagtcgattttggctcgagttcttccacctcaggcaccccctgtgattctctcttccagtttttcatgggtctgcggcctcctccatccagcgttcagatccaggctcacagaaatccccattttttctttcttctctcacacccaactttcccattgtgcaagagtgaagggaaaactttccaaatatcctgattgtgtaggagtgaagggaaaacttcccaaacaatccccaggcccccgagctggtatttcaaaaacacacgaggctggatgtggtggctcacacctgttatcccagcactttgggaggccgaggcaggtagatcagctgaggtcaggagttcaagaccagcctggtcaatatggtgaaagcctacctctactaaaaatacaaaaattagccaggcacggtggtgggtgcctgtaatcccagctactcaggaggctgaggcaggagaatcgcttgaacccgggaagcagaggcagcagtgagctgagactgtgccactgcaccccagcctgggtgacagagtgaaactctgtctcaaaaaaaaaaaaaaaaaaaaccacgtgggcctttctttgacaattaaattcctgttactgcagaaactgtgtccaactctccttccagtgctggaagcagccaggcttgcagtggcatcccgatgatcaaaacaatgcacttgcctctccctcagaaagcatcctacgtaccacaagggttaatggcctaattctttattatcttccccatccacattcatcacaagacaccctgcccaggaaggcaagaatgagaggttattgttaagacagaatgaatgagacaatgtgcagttctgttcctctgacctgacaatgtgactgaggcaggggctctgtgaccagagaggggccccggctaggcctctgtgtgtcccagcacagctgcctccttgtgctgtggagaaacaaacctggctcagaagtctctcatcccagatgcttcgacctcaagagcaccagaggaagctgagaaattcgagatgctgcctagagcccatgctgcctctcagtggatctcttggatccaattcctggctgccctttcttattccaggtatccctaggactggagtcatgatcagtcttttcttctttaatatataaatggtgatgagtgtctgggaatgagatgccagatcacgaatgccatctgtacaaggatcttgggaagaagctcagttgcttagatctctaatcatcgatcaggtttaggaaaactgagagtcatggcatttgtatgccacaccagtaacacatccagtcccatcaagagctacatggtcgctccaagcaccgggagcggggaggtacttctatagaggtgcgtaggaaaggcaaaggcatttttgttcactggactggcacgtgcttccccacagaagctgttcaaatgcatactgtactttctggcaaaatcttgtctctcagagttgatgattaagacttttctcaaagaccagagtcaagagccaaaagaaaaggccacagaagaaaccagaatccttctcttggaagttcaaagtcttgttctacccaccagcttacattagttttctaaagtggaggagtttcaggaagttgccggaggtcatgagaagagcaaagatttctttgtggcactgtttttttccattccaaacaaacaaaacagaaacaaaacaaaatcccaaactcaaaatacaatttcagagaacaccccagatttcccaaagacagactcactctgtagccactatctgggggatgggttcatctagcagttccaagctgtgcaggatccaatagcagagccatgggcggctggcatccagacactgggagagagacaggagagaaaacatcccttattcacaatcactccaagacactgctgccaaggctgtatctgtctcactcccagcagcctggcaagggggaggagggcacccttgctcaaacaacaatcagtgaataaaggacactttgctttgtggccttagccaggagctgaaatgaccatctgttaaaaaaaaaaaaaaaaaaaaaaaagataacaaggctgggcgcggtggttcatgcctgtaatcccagcactttgggaggccaaggtgggtggatcatttaaggtcaggagttcaagaccagcctggccaacatggcgaaaccctgtctctattaaaattacaaaaattagctgggcatagtgatgtgcgcctgtaatcccagcgacttgggaggccgaagcaggagaatcacttgaacccgggaggcagaggttgcagtgagccgagatggcaccactgcactccagcctaggcgacagagcaagactccgtctcaaaaaaaaaaaagaaagaaaagaaaaaaaagacaacaggattaaaaaaaagatgaccctgaacccagtggatccctccctggcaggcatctaaggaaggctgagcagaggacttcctacaggccaggaggttaggggctgctattttctcggtatagaaccaaggagatatacattctctgaagagatttcctagcttaactcaatcactgattcaacaaatatttgatagtatctacttgtgccaagcactgtattagacactggggggatgataataaaatttggtttctaccgtttatttttttgagacagggtctcgctctgtcacccaggctagagtgcagtggtatgatctcagctcactgcagcctcaacctcccgggctcaagcaatcctcccacctcagcctcctaagtagctgggactacgggcacacaccactatgcctggctaattttttaagtttttatagagacagcatcccactatgttgcccaggctggtcttgaactcctgggctgaagcaattcacctgcctgagcctcccaaagtgctgagattacaggcattagccaccatgcctgaactggtttctgttcttgagatgcttgggatatagaatgtgtgtggttacctgtaggggaagagagcactggacagacatataagttacctcatgtctttctggaaccaacacgtgtacatatacctggagaaatgctgtaatggacgaaaacagagttttgagggagcacgtggaagagactgactaattctgcctggggagctaggaaaggcttccaaaggcaaaatgcagacggctcttgatcctaattaaaccataaatgattattgagcattcaaggctaggcagggtaggtaggagtactgccccagttttataaattaaaatatataaatgaggtccaaagattaacctttttcagattataaaaatagcaaatgtcagaggtgagacaagaacctaggtttttagagtcaatccagtgttctttccgttggcccaagctgctctcttcaaaactatgctgatatcccaagctgtggctaacccaccacctggaaggtaggctggtgagctactgaagacactgccagggatgcagcttaagtttgaatcccagctcctcatcttactcgctatgtgcctttgagcaaatgacttaattttactatgcccatttcattatctgcaaaaaacaagagattgatctacctcatgtagttacaagatttaaataagagaatgcaactgggcgcagtagctcacgcctgtaaccccagagcctcaggaggctgaggcaggtggatcacttgaggtcaggagctcgagaccagcctggccaatatggtgaaaccctgtctctactaaaaatacaaaaattagccaggcgtgatggtgcacacctgtaatcctggccactcagaaggctgaggcaagagaatcgcttgaacctgaggcggaggttgcagtgactcacgatcatgccactgcactccagcctgggaaatacagcgagactccatctcataaattatgagagaatgcatggtaagctttcagcacactgttcaataaattgttagctgatatggtaccaactgtaacataactattgaggacttgagtcaaggattgaaaattcatagcccacaggccaaatctagcccatggatgtgtattgtttaactggtagtagctgcaacatttgtcaggagagtcacatgaaaacgtgatttccggcttcatttggaggaagaaaaaaaaaaaaggaaacaaagatgatttggcaaccctgggtctgcattcccagatggcagtaatgggcaggaaagaagttaagggcacagggtctccagttagcctcagtctccatgcagcccacttcactgatttatgctgcctgcctgggccctacaggcatttgagttggcaaatcattgccacaaataatcaaatgtggaacccaaataaaaagcagattaaaaatagagatgctgctctgtgttaagcagggcagaaagactggagacttcctgttcacattcaccctttgcctgccgctcagtcccatccaacatctgtcccctccaccgtcacccagtcctgacgttgctctgggaaatattaaagatctactcttaaacagtaatgttaaattgcaaggaccactctctatactggtcctctagtcagtatagaaattagatcttattacaagaaagggttttttgtctctttaatgaagatatgaaaagtaatgtacttactagaaggagtggtgaagttggaaaatttgtaaccatcacgatacagacttaacaggtttggacaatagtcctcaataaatgagcgagaaattagatcagcttatagggcaaagggttaagggtgaacaggtaactggcatttagccagctgtcaaggaggtctagataaagcacgtgaaccccttagtcatcatctagtaacagaagaaagccccatcctatctagggtgctccactcactctggaagagactaggttctgccctttcagggctgagtcccagctctgtgacagcaccctacctcctgccagagccacagagaacaaagagtgactctgcaacaggtcagccccaacagtcttttacgtttaaatagaaaaaggaggaggatttggtggataatttgacagcaagagttcctgggtaatgtgtttacctcataggcatctgtcagttgtcgaaggcctcttttcagataatggaagtgcttctccctctgcaaaacaagcctggaaagacaaacagtttataagcccattctaatagcttatgcttccaccatacacacgtatgtgcacgtacacacacacgggtaaacactcagcttcaggacgtccccctgcaatcactgactggataaccagcaacttctctggttccaaagagcaactaaaccagagaaaagaagctcttgtctgaatgtctctaaagcatctgaaaaccatgccagctgacatttagagtgcgattgtctcctaaaggcagtgactttgggctaacggaaaagccgcaatgagcacacgcagccaggcaatgacagtccacccagaaacttcctccagcatctaagaacagatatctttgtgcctccccatcctataagcaatttaaatctgagcctcgccacttccctgcctcagccgctgtcatttcagtcaccccgtctgggatgacttctccaaggcccataatttactccctgcctgcctctcggttatccaactattattctctccctgaaattccacctcccacgtgtgacccacagccctggccagaggaccgtgttctgcagccagtcgctgtccttggctttcaagtcagcaatactggctttaagatggaatgtgccgcccatggccacctgcacaggccgggcaaagcacagaggctgcacttctttcttggtctggcagaagagcctgtgtgactagggaaggaaacaaaaagcacagattgtcaagatgttccccgtgcttgcagattacagaaacaaaggaaagagaaccattccctttgctaggtagtcaattccacaattgtttatcaaattcccactgtacttggctcagagtaagagccttcatgcagtctttttttttttttttttttttcctgagacggagtctcgctctgtcacccaggctggagtgcagtggtgtgatttcagcttactgcaacctccacctcttgggttcaagctattctcctgcctcagccacctgagtagctgggattacaggcacgtgccaccacacccagctaatttttgtatttttagtggagacgggggtttcaccatgttgcccaggctggtcttgaactcctgacctcaggtaatcccctgccttggcctcccaaaatgctgggattacaggcgtgagccaccgcacccagcccttcatgtagtctttacctcaaaaactcttccaattcagaaatgaggtaagtatatcaatggctacaaggaaagaatgggtaggttttgcaagggaaaaacatactactgaggctcaaaagggaggggatatctcatgaagaaaggaatgatcaggaaagtttgtgtgaaaaaggaggaatgtgcgatgagtggccctggcagaaggagaaaattttaattcaattttaattcaagtttaaatagctgcaggtggctaatggctactctactatgctgcacaggtatcaagtgtacaagaggagtgacaggtgggagaatctgacctcaatacagggatgaaagaggaatgggaggaaagcaggagtactgccccagtttaaaaacaaacaaacaaacaaaaaaacaaggatctgggatgctgactaaggcatttctactcaatttactaggcaaagggaagtcctgaaggtttttgagatgaggaaagaaatgatcagaactgtgctttggagaaacagtaggtagtcagtatgtgtttacaaactgaagtatctgaaaatatcgcagtgggcagacagatggggtggggagacagggttagaagctctgaggagctgacccagttggggctacttagggcccgaactagtgtgtgacccgtgatcagctgacttttggatgtgtgggtcttaggatgctgggactgcattcaggtgatgatgtcaatcaggctgctggacacacacgtgaggctcaggagagggattcaggttacacacacagactacgaagcatttgtctgcacacaagtgacaggtgaagccacagaaggtgagagggcagagagagaagtttggaaacaaaactgtgggaagacccatctctaagggtttggaggagccagtgaaggagagaaacaggagagtttacatatgctagggaagagcaaaggaagtgtcatgtcacaggccatcagggaggagagaatttcaggaaggtgtttaacagtggcagatgctgcagcaagactgaggggaaaagacaacaaaccacagaagggctagagacctccaagagcattcagagcagaggtgaaggcaaattgtaaacaagagaaggccagactcagtttctctttcaggaaagtccactcaggacgcagggagcacccatctgtgtgggcagagtgttgtccagcactggggtagaggctgctctgtaccctagagcgacagtccagaggtggacacacatgtgaaaatgacaagcagagccctgtccaataaacgctgtgatcagccacgggaagagatggagggtcagaaaactcttcccaaagggaagagcattgagtttaaggctggaaagacatgagttaagcaggcaaaatgaagaaaacaccatgacacatttgagttagtttagttcagctggatcaaaagtacaaggcagtaagcagagaaattccacattagaaatgcaaaagctcagaggaaatccatagggaaggtctgtaaagaggatggaggagggctgggatgagggtatagtaggagaggtgagcctggaataaggaaggatgctgcattctttgagcgagaaatgatgggtacgaagctagcgaaatataggtctctgatgtgggaagaaggaaacaggaaagtcaggtgggtcagcctcgattttctcaggaactaggagtcaagatggtgggagagctgtggagtggccacggtggtgggtgtgttagggaatctacatgagacgaataaaaggattataaggcagttagtgaagcgccagtgaaattaagaaatataacatgttggtgaagccagtcagcagcctcaggagaaaccaagcctgctgacaccttggtcttagacttctggcctccagaaatgtgaaaaaataaatctctgtggtttaatgcaccccatctgtgataccgtcttatggcagcccaagctgactaataccctcaccggtccttcattctcaactcacctctatccaaaaatcttttctgtgtaggaagttaagaaagaaaaggtagagctcttcctatttttacctgaacaattcagccccaaaaccattcaattacatggagcagaataagacaggtttcgtgcaggacttgagggggtgcagggtgggatgcaggctgtcagctcaagtggatgaggagggcccccgtctcactgtgcagagggtgacaggagagcaagtgggtaaatctattaaggctatgggaagtcaggtttccactgtctgagaaggaacttacacatctatgtgtactgggtaatgatttaaatagaatttcttatgaggggtgagcccactgggcttccagactcttcacaatgtgcctccacccacactactctccaacctcatctccgcccctgagctctggtcatgctgccttctttgagctccgctcctttcagtctcctggctttagcacatgctgttccctctgcctggaacactctccccatcctttaagttagccacccctattccacctacagattcagcttaaatgtcactttctgtaagaagccttccctaacttcccaatccaaattagattctcccagtgattctctctctcaaattatcccatcggtaactgtatatttgtgttcatttgtttaatgtccacctcccccactagaccaagagcccagcaggggcaggcccagggctagccttgctcactctggcttccctgagcccagcagagtgtcctgtcctttggagactctctagatactgctgctgaaagagaggatcacacaaaggcagcagaatggaatgagagcaaagccacttcctccccccaaacctgggccatcctggaaaacatgcatttgattgtgacagatgagaggacaggggattcagtccattgctggttcctggggactttctaaactcactaaagccaggggcctctctagtcaaaaaataagcacctggcatgtaagcaataaagcaatcgaggaaaggtgaacttatttgtgagaccttggaaagaacaacagtaagaagggaatacatcctctacctgctcaggatctgggaaattctaaaattgtatcacatacaggaatagtagaaaacacgggagctaagctggtgcctgtgagagacctgctttgaggactttaactcagagtattctggcttcagagccattgtcagcacttaacctccagggctctattagcacagggacattatcaatatttctcacttctgaggagcacccgtctccttgcccaggagaaaacaaatttaaaaactacatgtgagcgaggtatctgtgtagtttatgcatttcaggtttcttattaaagccaaggtgataaatgcaaaagggtacattcaaaagggtgtgaaaccgtgacaatacccacagggaagaaaaaatgaattttcatgggaaagcagacatgaataaacaaaaccatgaaaagcatggtcaaaaagctccttgggactgactacctcactccaggtagacagtcccaaccttagagaagaaaatcatttctgggaaggggattaagtatagaatgtactgacattcagctccaggcttgactttcagcccagtctgctattcagctttggccctggaacactgaataggcaaatgcctacttcagcatcatcacaggcatccctggacctgtgcgtggtctgtggtcctgggcatgtgtgtgagtctgtcccatttgatcagcatcatgacctcagacacacaaacaagccctgccatctagatttactgctaacagctaaccatgcacttcagctaacagtgaaggttacttcctgtattaaagtgtcagacttttaaattttgactattaatatgttaaatattgagactgtgataatgatttaaaattctgataaattttctaatttattcttatatcctcgcttattctatgatggtgatgtttgccttcagccttatattgatatgttgaattatatactcagccattcagccaaaatgtatagtatctccaatattaattagcatcctttaaaacactcaatttcataggcaacaatgataaaaacgggtaattgtgaaattcctgaaactaacccagagccctgatatattctatttccacaaggatccgagcccaggaggaacactttttttttcccacccatacttgacctaccagctatgaatcaggggatttcactcctttaatatcatctaccaccactctcaaaaaacaactgcttcctcccagactataacctcccattttccctcatatctcagtgtgaataaaagtctttcttcagctcatgagctaaggaaaaacaaattttaaaaaaggaatgaaagagaccaagggctctatcctgatggtaagtgaaaagggaatgtcaaataatcaaaggttcatgtgagaaacagaggctgtgtgtccccagagcccaggcagtggacagtgactcagcccgatcgggtgagtcatcgggggtacaaccacaacaacaaagcccctccaaaagcaatcacccacaccctcaccattatgaagtcttgtcccctctggggaggctaagcttgaaccagcttgtgcctaggggcagcgaactgccaaggataccattacatttaagagagctcgttctcccaagctatttaaataaatggcgtcatttgctaatctctagctgtatctcatgacaagaggaataattcattttattgaggtcagagcattgggttaatgcagagatttggtttagcagttaagggaaagactatactagtaagctgatatttttcctcctttccttccccag

SEQ ID NO: 735289 - DNA, 946 bp, Homo sapiens
aagggcgaaacgaaaaactacggctaggtacgaggctgggtgacgggagaggccgtgtagcgtcgccgttactccgaggagataccagtcggtagaggagaagtcgaggttagagggaactgggaggcactttgctgtctgcaatcgaagttgagaggcccagtatttaggcgacagtgaatttattactctgaagagggttctgcacatatttccaaattatattggtggtcatcagaagtaggtgataggaagaaatacttctcaagggtgcaaaaatgcagagtaataaaacttttaacttggagaagcaaaaccatactccaagaaagcatcatcaacatcaccaccagcagcagcaccaccagcagcaacagcagcagccgccaccaccgccaatacctgcaaatgggcaacaggccagcagccaaaatgaaggcttgactattgacctgaagaattttagaaaaccaggagagaagaccttcacccaacgaagccgtctttttgtgggaaatcttcctcccgacatcactgaggaagaaatgaggaaactatttgagaaatatggaaaggcaggcgaagtcttcattcataaggataaaggatttggctttatccgcttggaaacccgaaccctagcggagattgccaaagtggagctggacaatatgccactccgtggaaagcagctgcgtgtgcgctttgcctgccatagtgcatcccttacagttcgaaaccttcctcagtatgtgtccaacgaactgctggaagaagccttttctgtgtttggccaggtagagagggctgtagtcattgtggatgatcgaggaaggccctcaggaaaaggcattgttgagttctcagggaagccagctgctcggaaagctctggaggatgcggggagggctctccggtgaccttttctcgttcctgggttgggggc

SEQ ID NO: 735290 - DNA, 187779 bp, Homo sapiens
ctccaaggctgagggatgaggagacctgctgaggacccagggccttatctttccatcccactccataggtcccagtattgactgatgctgtcttcacctcctagcctcacttttaaccttctggcacccgcccaccactgtccagttcactattgaagccctgccgtccagtgctgcagagggaaaggatgttcttctactggcctgcaatatttcagaaactattcaagcctattattggcacaaggggaaaacggcagaagggagccctctcattgctggttatataacagacattcaagcaaatatcccaggggccgcatacagtggtcgagagacagtataccccaatggatccctgctgttccaaaacatcaccctggaggacgcaggatcctacaccctacgaaccataaatgccagttacgactctgaccaagcaactggccagctccacgtacaccgtgagtgattcccccatacctctgggtgctggcggtcagttctgcttcacacacatgagattgtcaggcctgggctgtgcctgcatccccctctgcattttgtcccgtgttgagatttgggcatttagtgcaggacacacacatggtaggtaaacttcaacagatcagaattcctttcctgcatccaggccctgcagacactgatggcgggggcgggggggcctcagcagggggaggtcagtctcagccaagcaccccatgccctccccatgaacctgaccctgagaaagaccctggagaactgggtcagggcctggcctgagggcgtcctgggaacctcacaaaagcccagcctcaggactcctgactccgtgtgaccccgggaagcctgtgtcagggctggggtgtggtctcctgggcagggcttactgggagcaaggatttaccagatgtctgcgggctgtggttcctgaagcttctcatcagtgagggctcagctcccagagtctcatctagacaaggacagagcctaccactttccctgggactcagcctggagagggcagggggacaggattactagggcattggccccctgaatgaggagcttaagagatgcccttgggcagtcagtggcccaggggtaggaacagaggggagaaaatgttcctggcagcttcttgtccaccggggatcatgcccaggggtgctctcccatggaggcaaataacagatgctgttgatgtgaacacctcctctgtgccaagcttcatgtcagatcctgtgaataatttaaagttcattcacagacaaagtggcaagcctcagaccattttccatttacatattgtatggaggggaaactgaggcacagagagatacagacaccggccacggtgggcagatcgcagctggcagagtcacatgagggctgtctgcagctgctgccacgtcctctccttcatccctggtgccttactaggtgtctgtggaccttagaacagccactggttcggatgttttcttcttaggtgtctacagctcggagggggagattctggtctggagagttatgagtaaatacagaattaatcagttttttcttaactaaatcacctgcctcaacaatcagtcagtgctggggaagttcaggcctcctcgctcaggtccacaccccgcatctctggacatgaaatggcttcgtgtgttttctgatgtgtgggtatcattccaacaggaggataaaggggaggactttgctttctctccccattcacaccctgcaccagccagggcccagtgtgagacacatactccgtagttctctcatgaaggagggagggaatgaatgaaggaatgatctataacctcttcagagacagagacctggatacaagatcctaggaggttctgggcccaacgtgagacacacactctgtagttctcttatgaaggagggagggattgaatgtaggaatgatctataacctcttcagagacagagatgtggatacaagatcctaggaggttctggccacacctgttttctgtccctctagagcctaagacccatgtctcattcatctggcccgtttctcctaaatctgcccctgggagctgagtctcatctgaccctggggctgcagggctgtgggaaggttttcaggggagggatcaggcttgcgggtagtcccacacgtttgccttacaccctggagctctacctggttctcactatgaatatcccataataatcccccctatcctttctggggagtagaaaaaaagtaaatatttaaaaatatgccagagcatctgttcttcttagcaagttcagatagttattagttagcaggaataaatcgttattttaccagagcctcacctgctgggggtttatgggagcctaactgactgaggggggtgggaaatatccaactccagccccctctagccatcatgtcccacctaaaggagagaaaaaactgagaggcacttgtgacattcacagcccagggcacagactctatccaggaccacagaacccctccctccccccactcaccaccgcatcactgaacgcctgctcacccaagttcctgttgcccagtacatcatgtcctggctttcaacaaaaactacaagacagactagaggcaaaaaaaaaaaaaaaaaaaatgcagttcgaaagacagaacaagcatcagaaccagatgcagatgtggcagggatgtggcagggatgttgaaattatcagaccaggaatttaaaacaactctggggccaggagcggtggctcatgcctgtaatcccagcatttgggaggccgaggcaggcagatcacctgaggtcaggagttcgataccagcctggccaacatggcaaaaccccgtctctactaaaaatacaaaaaattaggcaggcatggtggtgggtgcctgtaatcctagatactcggaaggctgaggcaggagaattgcttgaacctgtgaagcggaggttgcggtgagcctagattgtgccactgcactccagcctgggcaacagagcgagattccatctctaaaacaaacaaacaaaaaacaatactggctaatatgctaaaggctgcaatggaaagcatagacaatgtgcagaacagacggatgctgtgagcagagagatggacaggctaagaaagaataacaacagctactatatctatctatctatctatctatctatctatctatctatctatctatctatatatatgtatatatatgctagagatcaaactcactgtaacacctggatctcagagtggttgtgaggatgtttattaggagattaaagagattaaagcagagttatacacagggcgagagctcaactgatgctatcaactagtattcttatttttttgatgttgttattggcaataaaatcaggaacaatgcagtaaaaatttggttttatcatgtacgagttctgtgaccttccttgacttactgaggtactgtaagtctcagattctaactctgcagatggcggtgatgcccctctccctcaaggtgatgtgaggatgagatgagctgtaggtaggttggtgcccactgtgcctggcacatggaaggcccctgaaaatagtcaatgaacatcatccccgctcatcagcatggagttgacagtgagggctcgctctctgtgacaatcatggaatggaaaagaagaaacaagaggaagactgggcgcagtggctcatgcctgtaatcccagcactttgggaggccgaggcgggcagatcatctgaggtcaggagttcaagaccagcctggacaacatggcgaaatttcatctctactaaaaatataaaaattagcctggcatggtggcacaaacctgtaatcccagctacttgggaggctgaggcaagagaatcgcttgaacttgggagatggaggttgcagtgagccgagattgcgtcagtgcactccagtctgggtgacagagcaagactccatccaaaaaaaaaagaaaaagaaaaaagcaacagagggaagaggtgtgacatgagaggaagaagggatttaaaggtacaggagcagggcgaggtgcaagcacctgtgggagaatgtaggagttggtacatcccagtgtgtcaagtctgagacacagaaaatggtgcaaccgtggagagcaagggagtcagctatgaggacagcccaacagaccacactcaggctctggagcatttccttcctccctgactatgcccctgccctgcaatgccccttatggtttcccttggaacaaacttgggccttgtcccctttgccttcccctttctgcagaaaacaacgtcccaggccttcctgtgggggccgtcgctggcatcgtgactggggtcctggttggggtggctctggtggccgccctggtgtgttttctgcttctctccaggactggaaggtaccgcagcttttccccagcctcctcccacccctaggctgaccccagtcagggaggagggagaccccgccctgtattcagggccaggctttccgcatcctcccaaggaatccttccctctcattccatggctcctcccttgccagctgctgatcctaggctgcctcttcctttatgaatgtggcacagttaaggttgcacccctgagtgctgtcctagttccctaacacagcaaagccacagctgcctggagggaggaagggagggagggagggagggagataagacgggagtgctcagaacctggtaccttctgctgttcattgaatttacccacccagtgaggagggatttgcaggcttgagatccatggtgggggtcctgggcatggtcacgcagtggggagtggcaaagcctggacaggctgggtagggtcagcaccccatcgtgattgatgtccctgaggtgtgagatgggagaacctggacctcaggacctgctgtcctttatgtctcttgccaaggggtggagagagagaggacaaggccattgccccatttcagcatctccaggcctgaaaggagggtctggccatggcagggatactgagttctgggagaatatgatacatgctccttgcctccccatgcccccagctcccccagtgtcctgcacacacagccggccctgctttccctctggggccttgacccttcctctcaggcaaacgcaggtggtctgattccctccctgagtcctcagtccctttcctgggtccctgggtcaatgttctcctcacccggcatctgcctgggggggtccttcctctctggccaggacagacgtgactgcttaaggcctatcctcagctccccgtcctcggccgctcctaccacgaaactgatggagacaggaggccttcactccagtccttgaaaatggagtcccttccttgtcctttattctgcccctaaacctgtgatttctccctgcaccctcatgaataatcctgacctttcctagggccagcatccagcgtgacctcagggagcagccgcccccagcctccacccctggtgagtgtcccttcagcccaggtgtgggagcccctaggcctgccctacggtgtccactcctgccagtcaccccctgggggcctctgaccctttctttggggctgcaaggaggatgtcaggaaacatgacacaggggaccccgactgtcttgttcagactgatctgtgggctctgggtcgtgggtcacctcctcgacctcagctgctcaggtctcccctgggaagaggctccctctccctgattctctgggagctgaggacccctacactctcctgcaggaggggcccaggctctcctcccaccctgctgctcactcctgtctctgtccccaggccatggtccctctcacagatccaccttctcggtaagcctgttccctccccagcccttttctactggggtcccaacagtgcaggctcagggcagggggaccatcaaccccacagcacagcactgacccacctttccccagaacagtcaggtcaaagtgagtgcctccagccaggatccgggcctctctacagggccaggaccacccacgccatgtgctgacccctccccgggaccctctacacctgaggagaaccctggagtccagcaggtgcagaatggacactgggaccatcagtcagaggcccacattaacaagggtgcggggtgggcccagccaggacaggggtcagggtgttgtgtccacactgggaggctgagctcaggggcagagctggtcaatcctgaggggaaatgagtggaagtggaggcagggaagtaagtcctggccgatcagagacaggaaccttccaggctgggcttccgtgaccctccctccctgtcccctgacatctcctctctcccctgcccaggcccctctacccagccccagaacagccactcccatctatgaggtgagtgtgggccatggatgttctggtcccgcaggctccaggggacccaggatctgcccccaccagcacctggctgagctcagattcaggaaaatgcagtgaaaatgagaacaggtggtggtgagcagaggagggaggggcctgggaacagggaccccctgagcacagccaggttcagccccagagaagccctgggtgggcccagagcctgggagatgccagacactgttctgagaaggctacaggggttgaggcctcttctctgtttttacaggaattgctatactctgatgcaaacatttactgccagatcgaccacaaagcagatgtggtctcttaggttcctctgggagctgctcttgtgggttgatggagcgtccccaaagctcccagccctggggacggggaaggacatggagcctgagccagagaaccagctctgagtcctgaggagacacaggcctggggacagggagggatgggagtccctgctgaatatctggagaccctgacaggttgccctgggctctgggtgggccgggacaaaggcctctcatcaccacaggaagcgggggcttgcaaggaaagtgaatgggcctgtggcccacccggggtcaccaggaaaggatctgaataaagaggacccttcctctcattggctctttttctgctcacgggaacttagcagaaactcacctgaaactccgtgtccattctctcccgggtcacacagggaaaatatctccaccttgtctcaaccacagtctctcttccctgggaggcagaaataggggttgggagtcaggctggggtgggccctacacaggaaagggcaagattcacatgagccctgcccagccagccgagcgctcagctgtcctcacactaccccagggaccaaggccatgcacagccccagcctgggtccctctgtgaatgcatgtggggtctcaggagcacagaagatggggccatctgatgtccacaaaaggtgagcaatgcgggagcaaccatgggtggtataggttgcggctgtggcccctacgcagcctccagtgtcctgacccctgctgccctcttcacccaggccctggaggcccagtctatcactgtcctccacaaatgaacttacctgtccccaaatccaggatcctgtgtgcttatacctggccactaggttctcctctgtcccagtggctactgctcaggacatctttatccctggtggggcacagagaggggctgtcagagcaaccaagattaatacagacgcataattcagtccttgagcactacccaggactctggcccctcattgctcatcagttcccactttaccccctggcatggatctcactgagcaagccaactctttacacaggagcatccaggtcagaggtgcaggactcccccatctaaagctcatgcaggctcccatggcgatgggacaacctgtctgctcctctccctggcccacagccctatctcgcctgcagctcctccacacacctgggacagcagttctcagcccttccctgagggcccctggaagggtgatgatctcatataggttcacttgaaccaggtgccaccttcccacaagtgagctggtgcctgcactaaagcacagagccacagttcccaagagtgttctgccactgccacaggtcccaagagtgttctgccactgccacaggttgttcgtcctgagatgagaggtaagaaaacaacccgcaatgggttgttttatatcgggatttgcatcaggatttagctctaaatgacccctgatcccacctgcacacagcgtcagatgagacaaggtgaggcctctttagttttctgttgaggctgtgacaaattaccacaagcttagtgacatagaaacctgaaccaaagtgcccacatggctgtgttctttctagaggctccagggaagagtgcatttcctctccttttccacctcctagaggcctcctgcaaccttggctgtgtcctctttctccatcttcaaagccagcagcacagcatcttgaaactattctgtgccctgcttccatccccacatctccacctcctcccacctccctctctcacttaaaaggaaggagccttgtggttattttggacgcacctgggataaaccacaacaacctccccatctcatgatccttcctttaatctgtaaagtgtcctttaccacgtgacatgtccacagatctggggatgaggatgtacacatctttgagaggcccttgttctgtccatcactcctctcaaggccatcttctcatcatcgttcactacaaactacacatgggcacctggatgggttcatcatgactgtggcgtcagttcctgcattaacatccccagcaccctccagatcctgagagagggagacggagggctctccatgcccctagtacctctccaccttcttcttggtgacatgcttagttgctaagaataacagaaagcggaggtgactgaaagatcacaactcaccggcccttcaatagttcgtggacatcagcaccacggacagtgactcagtgaggctaatttccaggtggcagcagggagcatgcagataggagggaactgcaggaaaagctgcccattctattctatatgagaaagagtgtaagaaagaggaagctattacagggataatgctattcttctctaatccataaattgcgaaacctttgcatgtctggatatcatggtttttagcacatctgctgccactccctgcagggctgattgctgcatccaggatgtggtctcttggggggctcacagcctgctttggcctcatggtgagtctccctgcccctgacactcaggccactgtctctgcctacaacatggtgggaaccttccatgattaacgtctgattctctgtgcctgacctttgaagcacatccatcactcagcctggagcatccgctgagctcagcatcctgctcctccatccccagctgagcccttgaggagatgcttgagaggatctcctgggctcctctgtgagctcctccaggctgagccttgtgcttggtgtcagaggcctttgccatctgcttgttctttccataggcaaataatcctcctcagggacaagtggggcctgaagatctgtctgaatatctatctatctatctatctatctatctatctatctatctatctatcatctatctatatgtatgtatatatgagaatgctttattaggcaaaactgcatactatgaacatgctttaaaatgcaacaggatgagatgtgaagacataaagaacaagtgtgtagtgacacatggctatcagaacacactgaagaatccacaccgcggccgagagcagtggctcacgcctgtagtcccagcacttttggaggctgaggcaggcagatcacttgaggacaggtgttcgagaccagcctgaccaacatggtgaaaccccatctctactaaaaatacaaaaaatttagccgggcctggtggctcatgcctgtagtcctggctgttcgggaggctgaggcaggagaattgcctgaacctgggagacacaagttgcagtgagctgagatcgcaccactgcactccagcctgggagatagagtgaggctccatctaaaaacaaaacaaaacaaaaagaatccacactgcttccccgcttcactttacccagaaaaggaatgttctaggccacttcctcttcagcacacatccccagggaactaaaataggttcacagtcacccccatcttcctcattcccatcacctcttacccacagaggcatctctggtcctacagatccagccctgccttcaagaggcacaggtccaacccatccagtgtccctgctagtcacacacagcactcagggtacaatggagggcttctgtgctttggatgggaacaaaccccacctcacattcccacacctgagaagccaccagggtcctctctgtcctgtcctcacactcaatgtctgtcctgggtcacccttgtcatctctcctggaaataggcatggctcctgacaggtaggattgaggctttgtcttttcaggagtccctcccactctgagcacatgaaactgctcagctccatgcaaccctctctcaccaggggccttgttctctgggtccctgaatacctgggtccatgccatgtacattttaagaaaaatgacagtgactctcaccctgacatcctcacccaaggcacgtgtctgacaagaatcaccaggtgagatacctgtggctccacacacctgaggcttcactgcgcaggggtgtcctcatccctctcctcccacccctagggacagtaagcaccacaggctgccttggaccaccagctccccctcccagacacagcctcagatctatactgacatgctacatggagaggctctgatgaacagcaggtattaggaaatcccaccgaaccaggtgccacttgcggccccactcctcctcatatctgtgactgggacagacacacataacacacctctgttcaccgcccagcccccaaggtcaatcacagtctgcttctcccctagatccactgctccccatgtcttccgtcctcagctgcatcctgggtggcctccttgctgttcttgtaccccagaggcaggttccaacctttgtgatgttgcctgcaatgcccaaactttcccttccccttccccttcccttttcccctcccccttcccctccccttcccctccccacccctatcccttcgtcttcccttgtcttcccttcccttccctataaagccaaacatacccatccacctaccttgtggtcaaagtcatcagcctcctgctccactcagtgttctctgaccctgcatatggaggtggtggcccctcctagaacacccaccactcactgtcagccttgcgtggtaatcacagattttgcaggggttacctgtgttcaggtgtgtcacctgtggaaccagaactcttggaaggactggcagagggagctgcttaggatatctcagggctcctggcatctggtctaccacagggctattaacaacagcacttagggacaaggtggaggatggacggttaagagggtaaatatggatgatgtgtgggcaaagaataggacacaggaacacatgcagtactcaaataattatgccaagaaaggtgaggacatggagatggacattcccatatacttctgatgggactgcagtttagtccctacagcaacattgacctcatcatgtttaacgcgcacacgctctgaccactatcctacttctgaaggcctccctgtgctgtgagctctgagaaggccaagcttgcctgttctgtctctgctaaagccagagaccagccaatagcccagcacagggtacttcataaatacatgttgaaggaatgagctccaggaacagtactccacatggtagagatgtgtgtatgaggatgttcactgcagaaggtcatgtcaatgtgacaagtgacgagcagcctcaaatccagcaacaggggtgtgggtaaaagatcatagtgtagccatgcaatggaaccaatgaaaaaaccacaattagagcaaatccacatgtattaataaaggaggtgccctccatacatgctgcacctaacagaatgttgccaaataagaatgaaaaatgatgatatttgggctgtaaaaactagaagtcagctaaataagaatgcatcgaaagtatttgtgaatgcttacaattttataatgccttggcatccgttttggatggaagttggactttctcataccagaagcagggctcagtcacctttgaaatagtttccagttctccacctccttccagttcctcagtgtgattgatcagatatctgatttatacaactgcctcctggtgacctcctccctatgggacttccggatacagcccgtatgactgccccactgaccccacaccctgcctgctgcagtgaccacctctaattacctggatctcatgtctgcttgcattaaatccaccaattaaaactccctgaggacaatctgtttgaataatattctgtaccctaataaaggccttgacccatgggttccccctctgtcctccccatactgcccctgacctctgtgtgtgtgtgtgggtgtgggtgtatgtgtgtgtgtgtgtgtgtgtcctccagacagggcctgtatcccccaggacctgtaagtaataaatctttattttcatcttatgtctctcgcaatcattggcaagagctctgcatcttaaagatcgcaaatttaagaaattggtgtagtcggcacaatagagtacctcttctgtttagcacaagatatctcggagctgctgaggcttttaacatcctcgccggtgtggctgcctcactggtgaggccgttctgttcagtgcaattcagttgctccactgtgtgctgctgtgttgctgctgtagagtgctgccatgttgttctccccaaattgttaccgagtaggaacctgtaatgtgctcccaaggtggtctaccccatgagaagggggattctccatctagggcaagggctaggtgtgtttctggaatcctaatagggaaggcatccacagagggtgaactccactcctccttagagtgaggagtgacatttcccatttattttccccatggaggtgccatgtattgactttttctttcactgtcccaaggttgagccaaggtgagctatggagaccagggcaagataccatttctgttagcaaagcaaatgggtgacaacgtgtggagaagctgtggttctcctgatggatatagcagagtgccatttagtaaaatcttgtcaggaggctgcccctggttagaccggcagtgtctgtagtcactaaggtggatgcgaattttaggccctgggccatggataatccctgcagacacagccgtggcttcatgtgatggggcaatcccgggctagtggctcccttgtttctgcatttcttgctgtggttgcacaatcaacacctcaggggttgattgggtcaccttggaaagagaaacagctgcctaggaggctggtgcacatggaggccaccctcaattttattctgctaacaagttgtaagattaaaacaacagggggctttgggtaccatcaggaacttgtcaagtaaacatccaaagacagaaagaagaaaaagaaaaagacattaaccgtctagaaatacaagccattttaaagattttgcttaaaagatgcgcttgggctgggagcggtggctcacacctgtaatcccagcactttgggaggccaaggtgggtggatcgactgaggtcaggagttcaagaccagcctgaccaacatggtgaaacctcgcctctactaaaaatacaaaaaattagcagggcatggtggcaggtgcctgtaatcccagctacttgggtggagaatcgcttgaacccgggaggcagagacggcagtgagccaagatcgcaccactgtactccagtctgggcgacagagtgagacttcatctcaaaaaaaaaaaaaaaaaaaaaaaaaagacgggcttgtttcgtcgttgtggagtcatcccagagagaggctactccctagagtcactgaccacctttcctcctccatcttttcctcttatcattctagagacagaaaacaagaatctcagctttaggtggctaacctcaccccccaagaaaagaaactaccactttgattgactacaaatccaagaaaaataaaagagaaactttaaaaagtactgagcaaaccacaggtctagcaaacataatgctagccctaggttacttattcatttacaacaaacccctagatataggaggaaaaaataaaaggtaattaaatatatacacatacaatattttaatataaatatataataaatagttaaattatgtatgtataatatgtaactaaatcaaagtaaaatttcatactttgattctattggaaattcaaaattcatttattaacttatatattaaggaatttatgtaaaaaaagatttttaaaagggcaccaatttgcttttgtgtctctacaacataggatctaatttaactttacatttgctaaatacactaattgacaaatattcatggatttaatcaatactggggctcaaattgtagccacacgtgggaatcccataaatttaaacactctgtccctattatcttgagaagaaaactaaatataaaattgaaaaaaacaggtatgtctcaatttacctgtaactttgcctaaatttcccggagtcatatacccattgctgtaaaacattctctattggacataggtgctctgagacaataaataaaatagaagtgtttttggtacttagacattggcttgacaaaatgggatcccatgaaacctcagttaagatagtgaatacggcccaatgtgagttgaaatggggcctttaaggattaaaacttattacatgaaacctagtaagtaatggggtgattatccatactgcttctccatttcatagcccaattttgacagttgtcaaatctggaaaaaacaaacaaacaaacaaaaaaacccctgggaatctgttgcctcacagagacacaaagtagacatcaaaattgtatatctcagttccagttccaaaatggtggcatagaagcaagctggctttactccttcacacagaaaaccaaaaacaaatatacagcaccaaaattattaccagatatattccagaactcaaatatgaaaatgaaacagttttcagagccacagagaagtgaaaaaaactcccgacagatgacaaaagaatcagatttccccatctgtaatgtccctccctgccccattctgcctggtaccaggtgtgtggaaaattttaccccaactcatggtttctacactgggaaatgtaagatcaatgcgggcaaccagtttctgcacaatcctgggttccctgtccctgccttaacccacaagaagcattgtgagtgcccgaagggagaaatttccctgaggacagtcaaagagtggggaggcaggactaccatctccttccctggaaactctgctgtgtaactcagccaagggagacatgaaatcagactggtgtttcagcagctccatgttgtagtaggtttgtttcacaggtatcctgggcatggacatctagccagctttcccacactgccaggatatcccctttgggacctccctcagttaggaagggcacactctgatcatttactagggccaaggtaaaccctaaaggtaacttagagatgaaaaggaggtagtgacctagcagtaaagaactctaagaaaatctatccaataaaaatcaaaacaagccagacaaagactaaaataaataatgaatccttcaatgtaaagacctggacttacatccacaagaaacagtaagcaggtaaccatgatctccccacatggacaaagtgaggaacaagtgactgatcctgatgagatggtgatgtgtgagctctctaatcaagaattcaaaactgcagttttaaggaaactcaatgatcttcaagaaaacatggaaaagcagttcagaaatttatcagagaaatttaacgaagggattgaaataatttaaagaaaacaaacaggaatcttggaattgagaaatatatttgctgaacaggaaaatttattagagtctctcaacagcagaatggatcagaggaaagaatcaacccaaataagactcccccaaggcataaaataatcgaattctcaaaagtcaagggcaaagagaagattttaaaacagaaagagaaaagaagcaaatggcataaagaagctccaattctgtggcaacagattttcagtggaaatcatacagaccaggagggagtgacatgacattctcaaaatgctgaaaaaatattgacatttgagaatactttatccagtgaagttatccttcaatataaaggagagagaaagtttcctagacaaacaaaagctgagataattcacaccatcagactagtcttcctgtaaatactaaagggtaaatactaaatacttcaatgtgaaagtaaaaaaaaaaacactaacatgcaaaacaaccacaacaacaataacaacatttgaaggtataaaatccactggtgaaattaagtacgtagacaaacccagaatactcaaatagtaattgtggaaagtaatccaatcataactctagcatgagtctcaaaatataaatctatcaaaaacaataatacattttaggaggccaaggttggcagattccttgaggtcaagagttcaagaccagcctggtcaaaatggtgaaaccccatctctaccaaaaaatacaaaaatttgcagggtatggtagcacatgcctgtcgtttcagctatttgggaggctgaggcaggagaattgcttgaacccaggaggtggaggttgcagtgagctgagattgcactactgcactccagcctgggtgacagagggagactctgtcttaaaaaaaaatagctacctgtttggagaaaggtaatataaaatatgtaaatagagacaaagtcaaaatttgcaaaggatgaaattaaagagtagagtttttttggggggttttctgtttctattattttatttgtgatctaagataagttgttaccttttcttctcttgaagatactttgttatatctatgtttttggaagtcttatggtaactgcaacgcaaaaaatctatgatagatccactgaaaataaaaaacaatgacttaaaacatactaccagagacaatcaaccacaaggaagacagtaaaaaatgaagaaaggaagaggggagttacaaaacaaccagaaaacaggcaacaaagtggcagtagtaagttcttacttaaaaatattgaacactgaatataaatggactctattctccaattaaaaggcatagagtggctgaatgctgcctatatgctgcctacaagaaaccacttcatgtaaaaagatacaaatagactgaaagtgaagggggtggaaaaagatatttcatgcaagtggaaaccaaaagagagcaggagtagctatactgatatgagataaactacaaatcaaagactataaaaagagacaaagaaagtcactatgtaatgataaagcgctcagttcagcaagaggagatgccaattataaatatctatgcatccaacacttgagctcccaagtctcccaagtatttaaagcaaacaatagtggatctaaaaggagagatagactgaatacaatattaattaggggactttaacaccctgctctcagcaatggccagatctttcagacagaaaatcaacaaggaaacttcaaagttaaactacacactagatcaaataggcctaactggcatttacgggacatttcactaactatctaactgttacagaattcacattattttcatcagcacatagaacattcttcagaacagaccacatcttaagtcccaaaaccagtcagaataaattcaaaaaagtttatatcacatcaagcatttgttctgaccacaatggaataaaactacaataaatgaataactttctggacacatacaacctaccaagatggaagcatgaaaaggcagaaaaacccaacaaaccaacatgaaactgtaacaaaaggaaaacccaggaccgaatgacttcactgctgaattctaccaaacatttaataagaactaaaaccaattctactcaaaatgctttaaaaaattgaagaggatggaacactttcaaactcattctacaaggtcagcattatcctgataccaaaaccagacaaggacaggacaaaaacaaacaaacaaacaaacaaacaaacaaacaaaaaaacactacaggattgcttgaggccaggagtttgagatcagcctgggcaacatagtcagaaccaatctcttaaaaaaaaaaaaaaagaaaaaaattagccaggcatggtggcatgtgcctttagtcctagctactcgggaggctgaggtgagaggaccaattgagcccaggaggttgaggccgcagtgagccatgtttgtgtcactgtactccagcctggggaacagagcaagatgctctctcaaaaacaaaaagcaagctgggtgtggtggctcctgcctgtaatcacagcactttggaaggctgaggtgggagaactgcttaagcccaggagttcaagaccagtctggacaacatagggggactccatctctcaaaaacaaccaaccaaaacaaagccaaaaaagaacataggccaacatcactaacaaacatagatgtaaaagtcctcaataaaatattaacaaaccatgtttagaaacacatcaaaagagatcattcactatgattaagtgagattcatcccagggatgccagtatggctcaacatatgcaaatcaataaatgtgatccatcacattaaagagaaccaagaacaaaaaccatataatcactccagcaagtgcagaaaaggcatttaataaaagaatgggttgagggagtggagcccatagtcagagcagcagtggtctgggattttggaagtagaaagaagggcagcaccactggccaggaccaccagggaacacccccataggccctgggtgttgtgctccagggagggttccctctggagttattaatcttggtgtccactttgcccagctgcccctcacagggtcagggaggatgaagggaaagcttccttctaatgaaagttcagggactcacagttcctagagcctgtagggagaggaagatcttcgaggaagagcacctgggcattggggcgtttgagaggaagatctatgccaggtccaagtggacaacctgtggactctctctccagggacatacgggtatctgggaatctcctgtagcttaaagaggtaaagacctctccctttagcctgaggactggaggatgctggttcaggtgaatgagtcctgcaggggctggtacaggcctggagggtggtggtgtccagggccttgggttcacccttagcatgattcaggccgggcggtgtttcacatgagcaagagggcctgggttcattgcttcaggacaatggtgaaatctcatggtggaagaaatcttgtccttgccagtgcccagctttcatttggtcttggcccagagtgtcctccctagagaagactcttgtcccttcttcacactgcccttcagggatatgccagccttatgggataagatggggtggagactgtagatgtgggtgggaatctctccacagagtgctccttctctcagcggttgcaccttgtctcagggcttcagcttgaaatctgggatctccaagcccttccctccccagtcctggccaggaccacatgggcagatgcattgtgtgaagtgcatttcatttggggtgtcctctctgcatggcaccctcccgttgattctctttgcgcatgtcagagtgcaggcaccatccacacctcctgctggaggagggacggagctgttgactcctgagagctgatcatgtgttcccaccctcacacacaatcatggtccatcctctgagggacatgtgttgccaccactgtggagatggtgcaactgacagtaacaaacagtaaaatctggtactgaatgggaccttaagccaacaatgacaatgtcattccaaggtgtttcatttttattgattcaatgcaagtcacctgatttcattgactattcacaatagctcgataaagtaaatgcatcatcaccaccactttaaagaggaaaaaggtgcttgggcagtttgtgactactgtggtggctgctgcattgctctctggtaaagccaagtaggtggtgggtgcggcctctgggctgggatgatccaccctcctggtggtggcaggggagccaagctggagccatggcctgtgcagtggtagcagctgaactgaccgctgctgcaggatttgcaagctgttacattttgcgaagccatgaagcacataaaacctcaagtagaacaagtgtttcaaagtctaccaaaatctgccttcagagattattactacagaggtggatatgaacccaaaatgacaaaacgggaagcagcattaatactagataatgaatgaacactagtaatagtagggtaagccctactgccaataaagaaaaaaataagagatgctcattaacatgttatgctcttaaatcacgcagacaaaagagggtctccttatatagtagccacaatcaatgaagctaaagatttactgcaagatcaagctaaaaacagtaggtgtataatgaatttttaacttcatattagtttatgtatatgaatatcaagtttttataataaaatgcctccaaacaaagaatatttgatttagggtttaataacttctaagaggggactcagatgtttcctgtttcacagtcagtctgagagggtcatttttcctggagctgacctgggtggaggcctcacactgatactccccagcatcctctctcctgatggggtttatgctgagcatacagtggccctgggacagctccattctctccatgagtcacagacgctggtcatggaagatccactggataaggttccagagtcatctgtggggcaggtcaggatcacaacatccttttcttctgtgactctggtgttgctgactcagatggggtcggagccactgaccctgtggacaatcagtggaggtgctcaactgaaagtgggctgagggcacgtcttctcctccatccctgggtccttaaggtaactgtggaccccagaccaactgacacaggagctagaaagaaattatttaggaagttagtgagggtaagagcgtccttggcaaggtttcccctttaacaaaaagcagcccaagataattccttttctaacaaagagcagcctgaaaaattgagctacagatgtagatgagcaagatggaagcttgcacaggtgaattccagtaggtgtgccaatagaaaagggctgcctggaagccaggtatgttcaacatggagactccatcctcccttttctccattaccacatgtacagtaaaaaaccaggcaacatggcaccggccaggtagacaatccatctgcatgacaaaagatcagagtggggcagccagcaaatggcacagctggtctaaacaatctttcaccccctgtataaatcagacactgcctcctgaagctcatctataaaaccttctgcatttcactatggaagtggcaacccattttccccaggacccctctctctgtgcagagagctcttctctttctttcccctatgaaacttccactcttaacttcactctgggtgcctgcatcctagttttccatggccatgggacaatgaacctcgagtattaccccagatgaatgatgctgtttcacaatcactggttcagctcccttcttcttagggtttcacagctcggtggggagaataccacgcctcagtggtctggggagtgaggaacaaatgaagaattaatcagattttacttagaacgctatcacctgcctcaaccatcagatccatgttgggaatgtccaggcctcctctcttagatctatacccacttcactggacctgaaatcctgtgtttcccgatgtgttggtgtcactcctatgagaggataaaggagagaactttgctttctctccccactcacaccctgcacaagacagggcccaatatgagacacacactcgctcagtagttctctcatgaaggagggagggagtgacctcgagtgattctgccatctgtagtctgtgtaccctggccagtggctgtatcttcatatgcctcagtttcccctcagtaaaataggacacacaatgagaactaaaaataaaattctaattccccagtgaactgaaaggatggcctcttggccaagcggatcccagagttcctgatcatgacaggatgggaggttacacctcattacagcccctccctttggaagtttagaggtgacaactgactagcattaacgctaaaatcgagatcatgagactgacagaacagactctctgtggccataagataccaaattataaactcaacctaaggtcatgcaggcaagggctaagccacactttcctacatttaaagaataagctatgttctaacacagaattttctttctctctagcggctaaagtaacactagccttcgagataagcaatattgaaatgatcgcggctcatccaccaacactggctaactgacccctgttccaacagccacaactacacttcaattggacaggagactgatttcagtaactttctcctaataagagaccactgagcatggcctggttctgctggtatacagacacggtgcactgagtaccataatgcttgtttcatcttttgatgtataagacctaatttaatacatttaaatctgaattctccaccccaaagtgaacatggggtgcatgtagcatgcatgtttgttgatcacgcatgtgcgtgtacttcctttgtgagtatccatagctccacctataacctgttgaatatgtatacctggccaactcattcagcataaatctatcttccacattcccctcccttgaagtgcctgctattggtctctgctggaggctgcatcttctaccctggggaatggccagcctgcaggctgtaaccctgtgtaagaaataacctggttgggtgcagtggctcacacctgtaatcccagtggtttgggaggttgaagtggtagaatagtttgagctcaggagccagagactagcctgggcagcatagcaagatcctgtctcttaaaaaaattttagggaggagagtgaggatcagaaaaaatacctattggctattatgcttagtacttggatcatgaaataatctgtataccaaacccctgattacatatataacaaacctgcatgcgtatctttgaacctaagataaaagtttgttttaaaaactatctgggtgcagtggtgcatgcctatagttccagctactcgagactgaggtgtgaggagtgcttgagctcgggggattgaggctgcagtgaattatggtcccacctgtgagtagccacttcactcaaacctgggagacagagcaagaaccggtctctaaaaaaaaataaaaatagaaaaataaaatgaaaaatatatgaaataaagtctcctttccaaacgtacagatctccgatttttctgccaacaatgataaatggtcagtggcttgccatgttgtctgtgaattacttttaaaatattcacgatcacctgacctaaaggttggtaccaaggaaccgcctgaatacaccgtctctgattatttgcctccaacagagtgttccctgggcctgatctctggtggacaatgagctgctgggaacatcctctcttctctattcctcccctggggatgctgaccttcccttggagtctcctaagttccccagggcagtcggctaatgtcctagggagcttacctgtcttctccataccaagtctcatgtgaaggacgaggctttgcccttgcccagatgaggctctgggggctgagccctggctggctaccagctgcaagagccatggcccttggacagctggtaaatccttgttcccagtcagccctgcccaagatgcctcaacccagccccggcacaggcttcccagggtcacatggagtcaggatcctgggacaggggactggacaggggtttccagggctgagtttctgaacaggggcttcccaggggtcccctcactccaggatctgacatggtcctacaaggaacgtccatggggaggggacccaggagggggaactgacactgacctccccttactgagcctccccccaaccccatcagactgtccttcctctgtagcaagtgcctgcagggtctggatgcaggaaagaaattctgatctgtggaagtttgtctcccctgtgtgtgtcttgcactaaatgtccaaacccccaaatgggatgtaatgtagagggggacacaggcacagcccaggcctgaaaatcctgtgtgtgtgaagcagaactgacccccaacacccagagctcatgagacatcactgtgtacgtgaaactggccagttacttcttcattcacaagatctgtttttatgacttgtagggtgtaggatcctgtgtcattgttggtgacattctgtatcagcagacatgtattggggtatattgtctctcagcctctgtggcaggtcctggggtaattacttgagttcctagtacatatcctgtaattcccctttgtaccagttgtagccaagcctaaggcagattgtgggtgagtggaagaatctccttgccttctgcagcttcaacagtgacttgggcagtggtaggcaagttccagaaagttaaaagtgaggctaggagtggggagagagcatcagttaatactgggccctatgcattgaggtggaaagatggggccctaggtcctggacaggtctcttcatccctcagccttggagtgtgtgtgtgtgtgtgtgtgtgtgtgtgtgtgtgtgtgtgcgcgcgcgcgcgtgcgtgcgtgtcctactgggccaaggtcagcagcatgacctcccttccttcagtgcctctgaccttggcatttccctgtttggagtccttttccccaggggtctgcctggctccctccctactgccttcaggtcctgctcacattagggcatccttgggagaccccttccctgacacctctagagaccctgggtcttccctttctgacctttcgctgctgtgttccctccagggctcttgtcaatacttgacctcacattctagatacccttgcatgtctgtcttcctccctatgagagcatgagctctgtgagaacagggacttgtgtgatcttggttgcaccccagtgcctgggacaggctgcggactcctgtggatgagctcatgagtgttcccagggcccttcacaacgtgggatttattttccaatggctgaggttgttggctaagagctctgttggagttcaatcaggctggtgggaaaaatattagagatagttatagagatagacacaaatcttcttggaagaccaaaaagtttgcataactttggtaatagatctgactgaaggtggtccctttacctttagttaaacaaattaaagtagtaacaaaggaaggcagagtagtttgtctagccagcttgtttactcatgtgatcttaagactaaccattgatgtgccacaggtgcttaattgctttctacttgggaagtccacaatgtcaattaccctctaacggtgttgactcaagcctttgttaattaatcttactgaataaatatgagtctcactagctgatcaaggccatggtcacaactgtttataggactcagcagggagtctgtaagcggccctgacagactcagctggactggcaaagcaaaatatgtgtgtgtcagtgtacactattcacccgtcccccacagctggtgcccctatatgaggagtgctgccacagagctctgtttagtgtcccttgttttttttcttgagtattaccccaacttaaattgtgattattgtcatctgttttcaacattaactgctcagtgatgattcacttggaaaacattaacaatcgagattgtttcttcactaacaacctcagattatttagattttcctgttgtaatcccttcttcctgtttagtgtccaacagaagccctctgtccctctcaggtccccgttctctccaagaaaccccagccagtctctgtgctccctcctcccatccactcccagggagccctcccctcacctgtgagcagaagcgcctgccagggatgtgcactctgtgaggaggggctgagggaggccccatgggctctgctgtctgctttgtcctcctctgtggagaggagcttgggcttcagaaaataaggaggccagaaagtaaggaacaggctgagaaataatggggatgtgtcgaaaggtcacagatgccaacatctttgtcctatgcaatattatccataaaattacaggtttgagatatgcttaaattttcttctaacatgcattaaaataaacatataacttttaatagttatattaaattgtatttaatataaattaaatgctcttgtcagagctactgtgactgtcagctctgctgtccttcctctctctgtgctaagcctcctcccagggcagaagcacttcccagggccaggggtgggggcggggaaaggtaagtggcaatgaggatctgcacaggtagcctttccgcctcctcccctctcagtcctgcctccttgtcttcttttcctctttttctccaatctacatttcagttccttagaccacgctgtgagaagcaaggcttattgggacccccatcccttaacaggatgacctgtgctccccataagtgacctctgctgtgtctagggattggctctgtcagcacctcacagagagtccctggggcccccaaactcagtgttattttctctatgacacagaaacccctctgggtatgcaaggttttcctcatgttttctaatgtctgggaaggttggatttactcccagcagggaggtcacagagatgtccagggagtggggtcctagaaatggacaaatctagagctaaagcccaggtctacgattttcagttgtttttttctgcagtgctatgtgaccctaatttcctaggagtaactaaaatgcaaacctcagacatttgtagacattttatgatttttctctacagcttgtaccactgttattattatttgctttatgctttttcctaaataaatttactttacaaaacatccttgtcctagtagggtgcaggggctcacgtctgtgatctcagctgcttgagaggttgaggtgggtggattgcttgaggacgggaatttgagacaaaacatctttgtcctatgcaatattatccataaaattacaggtttgagatatgcttaaattttcttctaacatgtattaaaataaacatataacttttaatcatcatattaaattgtatttaatataaatttatatacaatacatttttatataataaattatatatataaatgtatatataatagtttttcttttttgagatggagtctggctctgtctcccaggctggagtgcagtggcacgatctcagctcactgcagcctccgccttctgggttcaaacgattctcctacctcagcctcccgagtagctgggattacaggcgcctgccgccacgcccagctaatttttgtacttttttagtagagatggggtttcgccatgttggccaggctggtctcaaacacctgacttcaggtgatatgccgcctcggcctcccaaagtgctgggattacaggcatgagccaccatgcctggcctatatattttatataattatataaagttttctataataaattttatataataatatataaaatggatatttatttaagataaagttattagttttatatatttacatatatttaggaataaatgtgttactgtgggagcccagtgcccaggcaggtagtcagtacatgatggttgtcattagggttaatactttggaattctggattttttcccaagagagtgtctacgctggaatattgggcttgtggctttctgctgatgtgcatgtgtgaagaagctacttccacttattaggacttgtgtatctgtctcgcagtttcactacctattttctcgtgatgttggtcaagtcgcctaacttttctgtgcctcatttacctaatttgtagaatatgggtaacagtacacaagtgtgagtgtgtatttcccaggactgaccactagagggcgtgaaggcaccggcacttactattacagcaatgggtgtagtagtgctcatggtcgtaaacatcattctcccatgaaaggaaccagggcttcctgggagaaataactgattccagggctggggccggaaagcacaagcggagcctggagcatctcgtgaggccagaaagtaaggagccggctgaaaaataatggagatctgtcgaaaggtcacagatgccaaccagaaggagctttgaatgaccaattttgagacaaaatgagcactataagaaataatgatagtaataaattccaacccataaatacccatgagttcctactaatataaataaataattgaatacataaatatataaggatgaagaaacagctttttcttacagcagaattccaattaatgaatgtagaaggaatgatcaaatagaaaatcactatttggctaacagcacagtcaattgtttgtaggcaagaattatcaatggactttaaatatgaatgggtaaaagtatgatgatgctacaactagtgagtaccaagggggaaaaaaaagtacgttgagaagaaacaggctacttccatattcccaaagtatcacttcaggagctacttattgattataatgggacaaatagtaacttacagtagagaaacctggcaacagagtctctccgaggtacaaaggctctcttcaggaaggaggtaaggggaaggaagaagaaaacactgtcctgcctcaattatttgctttccccattctcaagtgtacttcatagacattcaaagatatgtgttgatagtgtccacgatccacatggctctattatagtcatttattcacacatacattcagtgaggctttgagtgcctaatgtgtgcctgatatttgctagatggtggatgctgagaagatcaggtgtgctgctgtctctagggtgactgaatccacctgccccactttacagatgtggaaattaaagtgaaaaggatttataggattagttcactgtcacaaggtcactagccttaaagttacaggagtaaagcaagtttcctgacttgctagattttctgctgcaggtgctgacaatggtgagctccaataggagagaggacactcagagtgaagtgggagccctgaacaccctggattagccaagaggacatgccgggtccagctgtgaccgcacaaaggaccattggggatatttgtattctctttttcacttagagcttgaaatgaggaaaactaagtgcagaaaaccaagagtggaagatttttcacaaagcactggtaacatgcatcagaaaaccctgtgctgatgtctgtcacggtgtttctcactgaacggtaatagtctggctttgagtgtgttccctctacagcctggagttctgcgaggcagggaccaggtgtgattcatctttgtctctccagtgacagtacacagcaggctctgataaatatttcttacaaaataaaatggaataaaaagtagacatctgcacaggtgtgggatgactgagcagcagcagaagcaggaaaagtcagcgtccccagatcagctgatgtggtgttcggattctagataggggtgaggtgccaggatggggatgggggtcctgtggctctgctgccctgggggacacccctaggtttcacagtgcctgctgtggttgctgcactttgcttccccatgggaaagtgatcagagggtgtggggcttcaggtgaccccatgtgggaaatggccaagggaaggtggggtgggcggcacatggttttttttaaccaatatttgaaggtaggttgtatgaaaaggtgttaggcttatttcagcttatggggagtaggacagggattggtgagtgtgtatcaggtatattttggctcaggatggaaaagaactgtcacagtaacataaggtcttttgggaaattacatgtttactggcagagttcaggccagggctgggtgtctgaaaatacctgtcagggtcacttttatggttacaagggcagagcttggcttggaaccaggtttcttactaataccacatattaagtattataaaaactgtcctttgcaataggacattgctctatgatgcaggttgaggtccctctgtttaagtaattgtgggtggctgtgattctctcatctagtctgcgacttggacttcacctccatctgcagtccctctcctttgctgttgacactggtcagagttaagcgcatttactgacgatggtcacagggtggcagcactgcctctctggtattttctaaaacctcttcctggaactgagccagtctaagaggatgtcatgactaagaaaagggcactaatgaggtgaacagataattttttttttcttgtttctcctgtgaagtaacagagtggaggtgagcatggaataattgccttttagaaatggaagacaatggagagaagtgtttcgcaaaccttaatgtgttcacagatcccacacagatctttttattcaatacagattctgatttttctggtgaggcctgagattgtgcatgtctaaggagcttttggatgatgccattgctgctggttggcggaccacactttgagtagcaaggctcgaagatcatttagaggttaattctcactgcatctaatttatggatgaaaacaaaccaaggtccagagagagcatatacagcttgcctaacaaagccattccctaagtgcctgacttcttgcatttaaacccagggcttcagcctttgtccagttctcactccacacatcacacggtttgttcactgttgtgaacgacagttgtggcagcatctctttagtttaggaatccagagccccaatttcactaccctctttggtcttggctcatgctgtgacttcgaatagttttgcccttacttaaaatcttcagtggctcttttgtaatcacaagatcaagttcgaatatctctgtctagtgttcatggctttataacatatggtatctctttagtaaccttacctaacttccctgttttaaaattgtctcttgctgccatagccctccttgctccttcctgctccctaacaaactgtgttcacttctctctcagtggtagtgatgatggcatggcctctgatgttagactcatgtaacttctaatcccagatccaccaccaacattggcaagttgattcatctttctgaggataagcatcctcctctgaaataaacttagatggcggttgagaggggtaaataaaataacacacaaacccactctcatccctgagaccctcttcaaaactagcatataaaaatagctatttgaagaggttcagtgaaattcaaggtaacacagagaaggaattcagaatcctatcagataaatttaatagactgaaataatttttaaaaatcaggcagaaattctgtagctgaaaaattcaattgacaaaccgaagaatgcactaaatctttcaacagcagaattgatcaagcagaagaaagaatttgtgagcttgaagagataatatatgaaaactcagagtcagagagacaaaagaaaaaagaattaaaagaataatgcatgcctacaaggtttgattattaagctactcaaagagatacaagagaagggtgaaaaccaacataaagaaatgtaaaaaacaatcagaatataaatgaaaaattttctaaaatgctagctagtttttttttgagacaggctcttactctcatcacccatgctggagtgaagtggcacagtcatggctcactgcaggctcaacttcctgggctcagatgattctcccacattagccttccaagtagctaggactaaaggcgtgtgccaccaggccaggctaattttttgtatttttagtagagatggggttttgccatcttacccagggctggtcttgaactcctgggctcaagtgatccaggagattcactgccaaaaaggatataaccaagtcatatagtcataggttatctaaagtcaatgtgaaggcaagaattctaagagcagtgagacaaaagcatcaattaacttataaaggaaaacctatcagtctaacaccagatttctcatcagaaaccttacaaaccagaaggtattggggtcctaatcttttggcttcttaaacagaatagctctcagccaagaatcttgtgtagagtgaaattatatttcaaaatgaaagagagaaatacagtctttttcaggcaagcaaatgcttcaggatttgtcacggctagaccatcctacatggaatgttaaagggacttctaaatcacaaaacaaaagatttaaatagaacagaatagaacctcttgaaaccaaaaaattcaaatggcctataaaacaataacacaataagaaaacaaagtagataacgatcaacatgatgactggaacaaatattaacattgaatgtaaatgacctaacactccacttaaaagacacagattggcaagataaataaaaaatcacaaaccaaatatcagctgtcttcaagagactcacttaacatgtaaggattcttatagactcaaggtaaagagatgataaaagatattccatgcaaatggaaaccataagtgagaaggaatagctatccttatatcatataaaacagactttaagcaacaacagtaagaaaaagacaaataaggcaactatataatgataaaaggatcaatcaaacaagaagatattacaatcctaaatatatatgcacctaactttggagctcccacattcataaaacggttatgatgagacctaagaaaaaagatcaacacaaaacagtgagggtgtcctgggttttctttttattggacagcagtgtactagcctatcactttcccagtcaggggatttttggtctccccattcccctaccatgggttcatgccaaagtccatattttttattagtgtttggaattggattttttttttttgaggtggagtctcgctctgttgcctaggctggagtgtagtggcacgatctcggctcactaacctctgcctcctgggttcaagcaattcttctgcctcagcctcctgagtacctgggactacaggtgcatgccaccacacccagctaatttttgtatttttagtagaaacgagatttcaccatattgtccaggcttgtatagaactcctgacctcatgtgacagggaaacaggcactcagtgaacttcatgcgattgaggagttaatgataatgagagaagggctgtgaggggacagcactggggacaccagagcctgtgacgggctgagttgctgtgccttgggagatgcccttttgactgagccctgggaaggagggggtgtgggggcaggagctgcctgcagagggagtggcctcaggtgggcggccacctggctgcagggaagaggtgacagagttcgtgtgcagagcttggagggtgaggaggaggtgggttgaggtgaccttggtgagggtgaaccatggggggctgtgggccctgctgagggaggccagccagccctggacctacagggtggtttggtcttttttgtcccattcccagcatccactgagtggtgaaactctgcaggccagggaccatcccactggccagaaggagcgcacagtaggtgcccactcagtgcatgttgggctggacagaacctcactctgccccctgcccccagctttgggagctgcagcaaggtccctccccctagggatctccatgcctctgtctctgaggggtgagatggggagacttcaaagggccatctcagagtgtgggggatagagacgcagaagtgtgggggatagagggaggcctgggctctagacccaaaggaccttacacacctcctgagtcttttcaaatggtttcttctgttactttaaaaatgatgtaagtcatcatatttattgtaaatcccaggaatctaatcatgcgtaaaataaggtgtcttatccttgaccccaccccttccccaattaaatttccaggatgttaccactgtttgcagttggtgtgaatctctctttaataatactctgtttatctcacttgtcgttttacgccaaaatacccattgaattatattattgctgaagaccattcttttttttttttttttttttgagatggattcttgctctgttgcccaggctggagtgcaatggtgtgatctcggctcactgcaacctctgcctcctgggttcaagtgattctcctgcctcagcctcctgagtttctgggattacaggtgcacaccaccacacctggctaatttttgtatttttagtaaagacagggtttcaccatgttggtcaggctggtctcgaactcctgacctcatgatccaccctccttggcctcccaaaatgctgggattacaggcatgagccaccacacctgcccagaccattctgttctactgaatcatgtgtggtgggcacctcttatatcaatacatatggattttatcttgtgtttgttattggctcccctttttctcattgcatggctacactcaatgctttgtccacacccctgttcctgggttggaatcttgtgacagaaaatgaagtaacaaaggctaaagctttctaaagtggagtcaggagattgcaagacaattgcactttcaccagcaagagctcaaaccacagaatgttccaatagatttggataaacagctgaagtcagtattcaccagccttcaacatctcaactaggagaaccctaaaattaactaagcacatagaatggaatggacttgtgatttaggattccttctcagccaatgagctgcttctgaaaacaactttttgtggaaattacctgtaaagaaaaccctctcctgtgcttgtcttacagaacactagtcagggctgccctgattcagtggacccgaattgctattatttgtttcctaaacatatggtattttctgtgaccttcatctcaatcttttttttaagttactgggctgtttcccagttttcataatgacgagacattctgcagtgtttcatacacatgtcttttccccatgtggagtattgatccaggagctcattcagtcaacgcatgtttatgaagcatcctgtgccaggctgtgggctggtcactgtcttcagcagagagaggacaggcacagtcttgccttcacagagctcacagctcagggaggctcttagaagtgggatactggtcggagcatgtgcacattaaacatgatgaggtcaaggttgctatagggactaaaccacagtcccaccaagatcgcattgagttcctgtggtagaccagaggtcagggcccctaagatgtcctgagcagctccctctgctcagaagttttggttccacaggtgacacacctgagcacaggtgacccctgcagaacctgtgattaccacccaaagccaagagtgagtggtgggtgttctaggaggaaccgtcacctccatgggcagggttggggaagactgaggggagcaggtggctgatgactttggccagaaggtagggggatgggcaggtgtgcgctcatagggaagggaagagaagggagggcattgcaggcaacaacacaaaggttggaacctgccttcatggactgagaaaagcagggagtccacccaggctgcagctggggagggaagacatggggagcagtgggtctaggggagaagcagactgcgattgaccttggggactgggcagtgagcagaggtgtgttatgtgtgtctgtccccatcatagatatgaggaggggtgaggccgcgggtggcacctgggtcggtgggatttcatagtgcctgctgttccctagagcctctctgtatagagggtcagaatagatctgaggctgtggtctgggggaaggggctggtggtgcttaccatctctaggggtgggaggagagggatgaggatgcccctgagcagtgaagcctcaaggtgtgtggagccacagttgtctctcattagacatgtgttttgcgtgaggatgccagggcctggtggttattactgttgtcaagtttgcatgacaaggacccaggtatccagggatccagagcacagggcccctggtgaggggatgaggctcagatggggctgaccaggttcatgtggtcagagtgggagggactgatggagagacagagcctcaacccctcctgtcaggagctgtggctatgtccaggagagatgacaaggatgacccaggacattgagtgagtcattgagacattgaaggtgaggacagggcagagaggaccctggtgactgctgaaatgtaggatgtgaggagggctctgacccatgcaagttacaggacctccccacccccgagcccacagatgacccttaaattgggcatcctgagtgctgtgtgtgcccagcagggacactggataggctggacctgagtctctgtaagggcagcgctggtctgtaggaccagagtcttctctgtgggtgtgacgtgggcaggaattagcaagatgggggtgacaaggcttggcttggaggatctggtacagaagcccatgggcttggtcagctcagcttctcaggggctcagctggggctggaggagcaggatgctgtgctcagggcatgctccaggcagcgtgatgtgtgtggttccagggtcaggcacgggggtcaaaaattaaccatgaaaagttcccaccttctgtaggcagagaaaatggcctgattgtcagggtcagggagacttaccatgtggccaaagcaggctctcagcctcccagagaccacaccctgggtgcagcactcagctctgcagggtatggcaatagatgtgccaagaaccccaacatccagatgcatgcaaaaattttgcgatatataaaatagagcagatcaagtttccctgcaataacgttgttcctggttgtgtctttttcttgtaaactagacatggacatctttccagcagtctgttctcatctgccaccttcctgctgcagcacctcagaatgaacattcctgagacactgtccgtggtgctgacgaccaagagctatggaacagagtgtgatgtagaatcttctagttacctctgctctcctttcacttttaacaacagagcatcattaacaatgagaaggtggagaggtgttcaggatcttgaagtgacttctgtcttgctctcccataaccctgaagctgctgtagacattattgcagaaactgacaccacagtcaggatggccttgtccaggagcccatgtgcagtttgtagtgagcaaggatgagaaaatggtcttgaaaggggtgatggacagaacaggggcttttcaaaaatgtcacatcatcacccccagcatccgtgaatctgtcacatggtaagagaccttacagattaaatgaaggattatgagtttggaagattattgtagtttatccagatgggtccaacataatcacagaatcccttccttacaaatgagagagggaggtgggagagtcagagaaggaggaggagatgtggggatagatgcagaagacagagcggtgtcaagatgctgcactgctggctttgaagatggagaaagaggacacagccaaggatgcaggaggcctctaggaggtggaaaaggagaggaaacgcactctgccctggagcctccagaaagaacgcagccatgtgggcaccttggttcaagtttctgtgtcacttagcttgtgggaatttgtcacagcctcaacaggaacctacagaggagtcaccttgtgtgcaggtgggatccagggtcatttacagctaaatcctgatgtaaatattgcaggttgcttttcctacttcctatctcatggccaacaaccctggacaatggcagaacacccttggaaaccacggctctgtgctttagtggagggaccagcttgtttgtgggaaggtagcacctggtccaagtgaacctacatgagatcgttactctccccagggccctcagggaagggctgagaacagctggcccaggtgtgtggaggagctgcaggtgaggcagggctggaggggcctgtgggtccaggtagaggggcagacaggttgtcccatcgccatgggagcctgcacgagctttaggttggggaaccctgctcctctgacctggacgctcctgtgtggagaggaggcttgctcagtgagatccacgccagggggtaaattgggaactgatgggaaatgaggggctagagtcctgggtagtgcctgggaggaccttgctcaaggactgaattcttggtctgttcccaccttggttactctgacaacccctctctgtgtcccacggggataaagatctcctgagcagtggccattgggacagaggagaacctggtggccagagctaagcatccaggatcctggatttggggacaggcaagctcattgctgggggacagtgatagatacggcctccagggcctgggtgaagagagcaggagggctcaggacactggaggctgtgtggaggtcacacccacgatctgtaccacccatggatgctcctgcattgctcacctttgtgtggacatcagatggccccaacttttgcactcctgagacatctcatgcattcacagagggacccaggctggggctgtgcatggccttggtctctagggtagtgtgaggacagctgagcactcagctggctgggcaggactcctgcgaatcctgccctttcctgtgtagggtccaccccagcctgactcctaaccccctactcctgtctttccagggaagagagactggggttgagataaggtggagatatttttcctgtgtgacccaggagagaatggacatggagtttcaggtgagtttctgctaagttcccatgagcagaaaaagagccaatgagaggaagtttcccctttattcagatcctttccaggtgaccccgggtgggccataggcccattcactttccctgcaagcccccgcttcctgtggtgatgggaagccttcgccttggcccacccagagcccggggcagtctgttgaggtctctatatattcagcagggacccccatcccttcctgtccccaggcctgtgtctcctcaggactcagagctggttctctggctcaggctccatgtccttccccatccccagggctgggggcttcagggacgctccatcaacccacaggagcagctcccagaggaacctaagaagccacatctgctttgtggtcgatccagcagtaaatgtttgtgtcagagtgtagcaattccagtaaaaacagagaagaggtcttgacccctgaggccttctcagaacagggtctggcatctctctctgggcccacccagggctactctgggactgaacctggctgtgctcagggggttcctgctcccaggcccctccctcctctgctcaccacctcctgttattttcactgcagtttcctgaacttcagctcagccagatgccagtggggacagatcctgggtctccctggggcccaagggaccagaatatctgtggcccccactcacctcatagatgagagcagctgccctggtgctgggtaggggaatctgggcaggggagagaggggtgtcaggggacagggaaggattcctgctgtgtaggaattccagggctctcctcaggtgatggagggtcccagggtggggttagcacagggagtggatgatcctggccctgaacagaggcccagctcatggccagggcaggtctaaccttatccaagtcattctgggtagggtgggtttgtgctggggattgacagtccccctgccctgagcctgcacagctggggccccagtggaaatgggattgggaacggacagtcttacctaggagatggagctgtcagagggtccatggcctggggacagagacaaaagtgagcacgagagtgttaggatagctgggcccctcctgcaagagtgtgtgggggtcctcagttcttagagaattggggagagggagcctttctcaggttattttaggggtcaagtaagcaagtgaggttgaggaagtgacccatgacccagagcccggaggttagggctgacccggccagttggggtttcctgtgtgatgttttatgggatcctctttgcagccccagggatagggtcagaggcccctgggtgtaactggcaggagtggacaacttggggctggcttagtagttcccagccacacccagactgaagggacactcaccgggggtggaggctgggggctgctgctccctgaagtcactctgatcgctggccctaggaaaggtcagggttatttgtgaaggtgcaaggttaaaagtcacaaattggagttaaaataggggaccaggaaaggagcctatttccaagaggggtatggagacctcctttctttatggagttctgtggtaggaggggcccaggtgaggggagttgaggaaaggccttacaaagccacatctgtcctggccagaggggaaggactctcaggcagatgctgggccaggagaacattgatccagtgacacaggaaagggactgaggacccagggaaggaatcagaccaccaggggttgcctgagaggaagggtcaaggcaccagggggaaagcagggccaggcacatgtgcaggacactgaggggactgcatgcatcttggattctcctggaactcagtgtccctgctgtgaccagacactccactcagggctggagatgctgaaatgggacaatgatcttgtcttctgtctctgccctttggcaagagacataaacgacattccaggatatgccatattggggccccggttctcccttctcacagctcagtgtctgcagttaccatgtcagtcaaaggggtgctgaccccacccagcccgtccaggctgttccagtctccactatgtgataatgcccaggatcccccctcagatgccctctcactgggtggatggattcagtgaacagggggaggtaccaggtattgagcaccgctcccccctgctccaggcagctgtggctttgctgtgctaggaaactaggaccatgctcaggggcatggccttaattggactgaattcactgaggacaaagctgttgaggaagcagcccagggtcagcagctggtgaggaaggtgccatggaatgagagggaaggatccctggggagtcgggaggctggggagagcctggcactgaatacaagacagggtctccttccttctcgcctggggtcagcgtgaaggatgggagcagaatggggaaaagctgtggtacctgccagtttttcggaggagcaggaaacacacaagtgcagccaccagaagactcccaaccaggaccccgatcaggatgcctagagtgttgtcatctgctgaaagaagaaggcaaaggggatgaggtccaaatctgttccagggggaaccatgaggggccttgcagggcaggggcatggtcagggaggaaggaaatgccatggagcctgagtgtggtctgttgtgctgtcctcatagctggctcccttgctctccgtggttgcaccattttctgtgtcttaggcttgaattactgggatgcatcaactcctacattctcccacaggaagcctgcacctcatcctgctcctgtgttttttagtccctccttcctctcacatcactcctcttccccctgtttctttttttccatcccatggcagtcgtaaagggcaggcccttgctgccaactcaatgctgatgagcagggatgatgttcattgactgttttcaggggccttccacatggaaggcacagtgggaatcaatctacctgcagcttttctcaccctcccattgccttgagggagaagggtatgtgatattgtgaaatacgtatttggtgttcatcaccattgatatggttaggctctgtatccccacccaaatctcaccttgaattgtaataatccccatgtgttatgggagggaccttgtgggaggtaattgaatcatgagggtgggttttttccatcctgttcttgtgatagtgaataagtctcaggagatcagatggtttcataaagggaagcttccctacacatgtcctcttgcctgctgccatgtaagacatgcctttcaccttccatcatgattgtgagacctctccagccatgtggaattgtgaatcaattaaacctctttcttcatacattaccaagtctcaggtatgtcttcattagcagtgtgagaatggactaatacagtaaattggtaccagctagtggagtgctgctataaagatacctgaaaatgtggaagtgactttggaactgggtaacaggcagaggttggaacagtttggagggctcagaagaagacacaggaaaaaagtttgaaacttcctagagacttgttgaatggttttgattaaaacgctgatagtgatatggacaataaagtccaagctgaggtggtctcagacagagatgaggaacttcttgggaactggaacaaaggtgactcttgttatactctagaaaagagattggtggtattttgcccctgccctagagatctgcagaactttgaacttgagggaaatgatttagggcaactggtggaaaaaaaattctaagcagcaaagtgttcaagatgtgacttgggtactgttaaaaacactcagttttatgtatttacaaaggtatggtttggaattggaacttatgtttaaaagggaagcagagcataaaagtttggaaaatttgcagcctgatgatgcaatagaaaagaaaaatccattttctgaggagaaattcaagccagctgcagaaatgtgcataaacaatgaagagcaaaatgttaatccccaagacaatggcaaaaatgtctccagggcatgtcagagaccttcctggaagccccttccatcacaggactggaggcctaggaggaaaaaatgtttcctgggccaggcccagggctcccctgctgtgtgcggcctagagacttggtgccctgcatcccagccactccagccatggctaaagagggccaaggtacagctggggccatggcttcagagggtgcaagccccaaaccttggcagcttccatgtggtgttgagcctgcaggtgcacagaagtcaaggattgaggtttgggaaccttcgcctagatttcagaggatgtatgaaaatgcttggatgtccaggtgaaagtttgctgcagaagcagagccctcatggagaacctctgctagggaagtgttgaagggaaatgtggggttggaaccccgacacagagtccctactggggcactgcctaatggagctgtgagaagaagaccacaatcctccagaccccagaatggtagatccactaacagcttgcaccatgcacctagaaaagctgcagacactcaacgccagcctatgaaagcagccaggagtggggctgtaccctgcaaagccacaggggtggagcccaaggctatgggagttcagctcttgcatcagtgtgacctggatgtgagacatggatacaaaggagatcatttcagagcattaagatttggctgccctgctggattttgggcttgcatggggcctgtagcccctttgttttggccagtttctcccatttggaatgggtgtatttacccagtgcctgtacacccattatatctaggaagtaactaagcttgcttttgattttacaggcttataggtggaagggacttgccttgtctcagatgaaactttggacttggacttttgggttaatgctggaatgagttaagactttggggaactgttggaaggcatgattagttttgaaatgtgaggacatgagatttgggaggggtcgggtggaatgacatggtttggctcttcttcacccaaatatcaccttgaattttaataatccccacgtgttgggggaaggacccagtgggaggtaactgaatcatgggggtggattcttcccatgctgttctcatgatagtgaataagtctcacaagatctgatggttttagaaaggggagttcctctacacatgccctcttgcctgccgccatgtaagacatgccttttgccttctgccatgatttcaaggcctccccagctatgtggaactgtaagtcaattaaacctcatttttaaaaaaattacccagtctcaggtatgtctttatcagcagccaagaccagctcggtcgcggagatcctaacccagcagtgctagaggaattaaagacacacatagaaatatagaggtgtgaagtgggaaatcagggttctcacaggcttcagagctgagagccccaaacagagatttacccacatatttaataacagcaaaccagtcattagcattgtttctatagatattaaattaactaaaagtatcccttatgggaaaccaagggatgggccgaattaaaggaataggttgggctagttaactgcaacaggaacacgcccttaagatgcagattgctcatgctattgtttgtggcttaagaacgcctttaagcggttttccaccctgggtgggacaggtattccttgccctcattcctgtaaacccataaccttccagcttgggcattagggccattatgaacatgttacagtgctgcagagattttgtttatgaccagttttggggccagtttatggccagattttggggggcttgctcccaacagactaatacacccattttctggtatgtgactctaaagtccttagaatcttcaaagtgatgtctttttcaagctaataattgactgatgactggcagcccctaggcaacttcagaatgaggctggtcactgacccaggtaggattagagggttgggactttcagcctcacccctaatccctggggagggacctggagtttgaattaatcaccaatgaccaatgaatcaattaatggccaatgattgaatcaattaatggccaatgattaaatcaatcatatctatgtcatgaaccccaaaaggactgggtttgaagagctgaacccatggaagtttctggagtgtggtgcatctggggagggcatggaagctccacaccccttcccacatgccatgctctgtgcatctcttcatctgcatcctttgtaaagtcctttattacaaaccggtaagcctaagtatgtgtttccctgagtcctgagagctgtttgagcaaactaatccaacccaaacagggagtcatggaaacctcaatgtgaagccagtcataagaagctctggaggcccagacttgtgactggtgggaaggtggtggcaattttgtgggactgagccctctgctgatatgtccaggtagatagtgtcaggatggaattggaggacacctagctgatgtacggtgcagaactgattggctgctgggtgtgtgggagaaacccccccgcatcacatttggtcacagaagtgtgtctgtgttgatgattgttattgtggagtgagagcagaggaaaaacacagtttgagtttttccaaacagggtggaatcccatctgccaatttagaatctgaaacttatagtttcagtacttcaattaagattgaagtacttcaattcagtacttcaattaagattcagtacttcaattaagattcagtacttcaattaagattacagaactggtaagtgaaagtgatacaacaaaaatgtaaccaaagtctgctcaacttaacagctaataacaacaaagttcataaaaataataccagtcgatattgatagcactgattgagccctggctctgtgcatgaccttgttaagggctttaatcgcattaatctctgaataaatatcctcacaaccaccctgagatccaggtgtttgtaacaattctacagatgaggaaactgaggcccaggaggttgagtgtcttgcccaaggtcaaatacctggtacctattgtaaccaggatgataactggatgagtctaatccctgagttcttacccacattgctccccaggctctgaaggaatctcatccttctcattccgtgtatcattttacaccccccctccctcctaggaaaatatacaaggaaaggagtgagaggggccgagggtcactcacattttacagtcagcttgagggggtcgctcctgttggagctgactgggttggagacctcacactgatactccccagcgtcctcctgcctgatggggtctatggtgagcatatggttaaaccaggacagcttcatcctcttcgtgacctgcagacgctggttgttgaaaatccactggaaagaggttccagtgttatttgtgtggcaggtcaggaccacggagcccttctctgtgactgtggtgctgctggcttggatggagggctgagccactgactctgtggatagagtgaccaacagaaagtgtcttggggccatgctgcatcctcagagatctcagagtcaaatttagaacattctcctgtgaataaaggagaaagatgaaggacagggaggagcagagagaaccagagacacccatagcagcgagcagtagggactacagtgacctcagagaccccagggaccaggaggacccagctgcctcagaccaggaccagggagccctgaaaaccctcccacagatgagcggccccagagtcacatgagatgcaatacctggggtggctttaggagcaggcagtcagagaaatggaacatgggtctcagcccctaagggacaaggaagaggtgtggccagctcctcctaggatcctacatccaggacccagtctgtaaagaggttatgattattcctttcttttttcattaattccctccctccttcatcagagaactactgagtgtgtgtctcagttgggccttgtgcaggtacagggtgtagtgggaagagaaagctgagtcctttccttcatcctcccatgggagtgacatcaacaaatcaagaaattcatgatttcacgtccagtgagggaagaaatgtggatctgatgggagaggcttggacaatcctggcattgagtctgatagttgagacaggtgatttcgttctaagtaaaaactgactaattctccatttgcccgtcattcctcagaccagaatctccctctctgagctgaggatgcccaagaagaaaggagctgaaccaacatctggtcctggggtccacagatgccccacggtggtggccacgaccagattctgggctgcagacacacggtggtgtgacgttgagcactgacagcctgtgtgatgctgatgcaatttctctttaataaaatggggtaaatgtcaatggtccctggcttgccatcctctctgtaaattaacattaaaatatttacaattacctgacctaaagcttggcacagaatagctccaaataaacatcatctattattattttactccaaaaaaaaaaaaaaaagagttctctgggcctgattcctggtggagaaggagcggtccagagtgtcttttctctgctttccctcctcctgaggacagtgcacttcccgggacatcttttaagtttcccatccagtttaatggcctgggaagtttgtttgtctgtcctctccactctgactctcaggtgaaagatgaggctctgcccttgcccagatggggctctgggggctgagccctgcctggtgaccagctctaggaaccacggccctgggacagctggtaaatcgttgctcacaatcagccctgcccaggaagccacaacccagccctggcacaggctccccagggtcatctggagtcaggatcttgggacaggggcctggggcaggggcttgaagggctgagcttctctcagaggatcctcaggccaggccctgactgagtcctataagatctttctcaggtcatgtctatgaggaggaggccaagcggggttggactgagactgattttcccccgctgcatctcccgcatcagactatccttcttgctgtagggaatttccacggagtccggataagggaaaggaattctgatctgttatagtttgtctcccctgggtgtgtcctgcactaaatgcccaaaccccaacatgggacgtaatgcagagggggatgcaggcacagcccaggcctgacaatcctgcgtatgtgaagcagaactgacccccaacacccagaggcacggaggaatcactcaccgtatacacggagatggtgagatgcctgttcaatctgagaatttctgtatgtgacttgtagggtgtagtatcccgtgtcctctagggtgacgttctggaaatgcagatctccactgggtgatattgtctctcgaccgctgtatgcaggccctggagtcctaacgtgagtgtctattacatatgctgcgattagctggttgggctccaccgttttccctttgtaccagccatagctgtaaagattctcgggcagataaaccacagagagatgaacattctccccttcagcaacttcaaagggcgctgatgcaataaagagccaggcagtggtgggtgcgttccagaaagttaaaagtgaggctaggaaagggagagaatatcagtcaatatttgacctatgcattggcatggaaagacggggtcctgggtgcaggtctcttcacccctcagccttagagggtgtgtgtgtgtgtgtgtgtcctactgggtcaaagtcagcagcatgaccctcattccttcagtacctctgaccttggcatttccttgtgtgaaccctctttcccaggggtctgcatggttccctccccactgccttcagttcctactcacacaagggaatccctgggagacttctttcgtgaagcctcctctagagaccctgggtcttccctttctgacctttcccagctctgttccctccagggctcttgtcagcacctgacctcacattctagatctctttgggtgtctgtcttcccccccatgagattgtgagctctgtgagggcatggacttgagtgatgttagttgcaccccagtgcctgggacaggctgcagactcctgtggatgagttcatgagcgttcccagggccttccatatcctggggtttatttgctaatgtctgaggttggcagatgaagacagagtttcatgccctggtggtgtttttatttaaattgtcactgtgatatagttttactatcattttcaaaatgtagtggccactgacaatgaacttgaaaacatggaccaactgagattgttttgccccttggcaattccagttcacttagattttttggttctccttagacgctctctcccctgagtctctaacaaaagccctctgtctcctctcagagccccatcctccccaggagaccccagccagtctctgtgctccctcctcccacccactcccagggagtcctcccctcacctgtgagcaagagcccctgccaggggatgcattctctgtggggacaagctgaggggggccccatggtctctgctgcctgctctgtcctcctctgtggagaggagcttgggctccaggaacgctctagacagggttactgtgactgttgtctctgctgtccttccttcctctatgctgagcttcctctcaggcaggagcacttcccgtttatgggcaagggcggggctctgcctacaatgtctctctgtcccctcccctctcagtcctgcctcccttgtccctcctttctccttcctttttgcctatatttggttccctaggcaaaactttgagaagcaacgctgatggggtcctcataacaggacgacccactctccccagtactgacctctgctgtgttctggccttggttctgtcacagccggtagattatttccctttgtgacacacaaaaccagctgggccctgggtctcctcatgctctccagtgctccaggaaggcagaatgatgcccagcaggaaagtgacagaggtggctctgggggctagaaaggggctcactgggtgatggctgggaaggacccacccgctatcttcagtgtcaccagcctggcctctgacccagggacagagacccaggcctggaggtctcgggaggatccccagctcctaggtgtggagggaggtgtcctgtgtgtcctgggaagagaggactttgatggaaggaggtgggaggctctgggttctgctgtccttggtgaaggtttcagggggaccctctccatgtctggggtctgtgcccccagcttaactctcattctctttgcaaatacatatattttgtggatctgcagttgcctgaactgtctcatgtccctaaatctttgtatccctttttacagaaggtcaggaagggtgtgtacatgagtatgaggactatctgatcagggcgagtgtttgtttcccaaagatctctttagatatggtataatacataagataaatgtactgaattagcaattttaagtgtagaattaaatgatactaattctattcacaatgttgtacaaccatcaccataattttttaccagaaaatcttcattataccaaatggaaacttcatacttttaatcaataactccccacttccccctgccccacccactggtagcctctgatactatcaatctctgtgaatttgcctagtttacatgtctcatataataaggaattatatacgtgtattatttttttctggattatttctcttagggtaacacttttaagattcatccacgtcgtagcatatattacagcttctttcctatttatggctgagtaatatcccaatatatgtttatacctcaattttaattcattcatctcttaatggacatgtgggtggtttccacatttttgctattgtgaaaaccgctgcaatgaacttacacttggaagtatctgtttgggtttctgtgttcatttctttgggggtacatataggagtataaatatggggtcatgtggtagttctatgtttaagtttttgagaaacagccaaactgttttccagtttgctgtgctattttatattcccatcagcaatatacgagggttccattttctctacattcttgtaaacacttactatttaatattttttaaaacttatagccattctagtaggtgtgaagtgatagctcattgcagttttgattttcatttccctggtggctgatgaagttgagcattttttcatgtatttactgacaattttaatattttttagagaactatttattcaaatcatttgctgtttaaaaaaaatgggttatctttttattattcagttgtaatagttctttatatattttagatacaagtcccttatggggtacatgatttgcaaaatttttctcatattctgtgtcttctcactttcttcatggtgttctttgaagcacaaacatttttaactttgatgaagttcacttatctatttttaattttgttacttatgctcttgatgtcatattgaagaaaccattgcccaatccaagatcattaagttttactcctatatgttcttctaatggtttgataagttttgctattccatttaggtttttgaaacattttgagttaacttttgtatgggctgtgaggtaggggtctaactacactatctcgcatgtggttatccagttgttccagcacaatatgaagaggctaccattctttccccattgaggaatcttggcacccatgtcaaaaaccaatgggctgtaatggtgagggtttatttctggactcttgattctattccattgatctctatgtgcattcttgtgccagaagcacactgttttaatgattgtagtgttttagtaagttttcaaattaggaagtgagtcctccaatttttttttccagattgttttggccattctggggtgacttttaaaaaagatgtagttcaatggttctcaaagcaggagtggttcagctctccttttttggcagtctggagacctttttaggaccttaatctaagtagataaattattcccactttcttttctgagttgctatgttacagtgtatattgacacccatgaaataattgagagaccctggaagtgcttgcctacatagtgagggacaattagttccatgatcatgggcacagaagattttgttttgggaaacaattttgttggtggagttatattcatgcttactcttttatttgtcttcatagcctgcatctccttcagacttcatatctgtttattttcttgtttgtcctctggggtttgggtgttgggtgaccagtcagctggagctggaggaggtgcttagcaaggcagtgaccctggttgggaggagcagggctcagcagggtgaaagtagctgggccttgagtcaggagtggcatctggaaggcctgactgtaagggtcagaagggccagcaggtgggtgtcctaggcacaaacggtggctgctgctgtggactggaggaaggtaagaggccccgagtattccatgttcttactggctccccaactgaggattcctctcctgggctggtgctgtcctgcagcagggaggggttagacagggacggctgcacatcaggccggagtccatgtcatcctcttaggcactgtcactacagattgaggattctgttcataagccaagcctttgcacaaggaagggacccgggctctcaaggaagagcagctcctggtcagacctccatctccttctctctcattgcctgaggcctcaagcttggtctacctggcacaggggtctggatcctcctcccagggttggggtcttactgagctgggcacctgcaggtgggagaagatctggaggggccccatctgccttcaccagattgatgttgagggtccctgagtcctgcaccactatcaggtgctgagcaacttccagtgtcagtgacaaccaccccatggtggaagcagaaccacctcgtgagaaagcacctccaagcctcagtgcttgccatgtgtgggaatttgctggtttcagttgggggcatgttggtgggtggtcatgaattcagggccggattctatgctcacagtgcacatgctggatgtggtacagaccccaggcagggctcagtggggtggttttgggtgtgcacaggtatcttttctggaggagctggtggtgatttggctcccagaagttcctgagctctgcagactcaccaagcactcaatatttgagtgaacattgggcgagagagcagaaggtaagtgtcagggcatcggggttggtgcctctgggaagaggaggaacattctgggaacaaagctctcccccggcttacagggagcttcccatcgctcctgccttgaggatcagggaaactagggcctctgctcttccaggggctgcttgcaggcagtttgctctgggagggggtgacccaggagttgcctctcattttgcatttgagatttaaaaggagaagggacagtatatcttgccaggtcacaaaaattacaggcatcatattgactgaagggcactcctgtcatcactgcaatataccagaatggtcttttaaaaaaataagtgatttaggtttaccagcaactgtaatgcttgttttattcttctagttcaccgttaatgtcacttttgtagttttagcactggcaatgttgattttatgttgactctgatgattttaagctttcatttgttcacatagagatcatcttctttctgaatattaatgcattttttctctatttctactggttattcctgtacatagagtagagaatcacttttcccaaggaggtggaaagcttctgactaccaaaaaaaaaaaaaagtgtcaaaatgctttaaagtcagtaacttaaagatcaaatccaagagtgggcaacagattctgcccagggtctgaaaggtggagaggtgactggtgaggatgtttaaaagacctctcctctctactccctaaatgggggccatccagtgttcttgaggttcagagaaggcccagggctggggcagcagggcactgtcagctcccagctcccaggggccaggagtaagaccccaacactgtccagacactgattgcattcattttgggggagagtagattcttatttaaagaataatacaaaagtctacaaatatgaacataaacagaaattcctttgctacaattttccccttaataagacattccttcctaatgacatatgtgactgcattcatggctgagatgttttctaggatggtgagagcatcagagtggactatctggtgccttggggtcatgcattttcttcttccaatgtctacaggatcccccatgtcccactttgtagtgtaactcagtgtgtgtcattctggtttttgttgtatagatccttggaaagcccatgtcattcctgctgtgaggtacaggcagccaaatggcatcatctctaaacatgccttctcctggtacatcaaattatggaataaatgaaagccattttgacagatattgaagatataagtttctactcttcccacacatgcttctcccaagtgaaggattttactggtgaattgttattagagattagtgtggatcagtgactctgccaggggaaattttgccctctaggggacatttggcaaagtctggaaacattgttggttgtcagagctgggggagggagtcctgctggcattgagtgggtggatggtgctgaacaccctgcagttcacagagccccaccagtttgaccacccaaatgtcaatgctgaggagtggagagccctgctgtgccctcccgcagcttccctgaagcttcccctcacctgctcctcccatgtctccccaccacttccccacttcacccgcctccttacacctcagtcccctccacctgaactcaccccttagtccaaggccagccctgatctccgctctcctggtctccttgctccttagcaggaggcgcccactagatggcgcccttgcccttactggagctcaccgtctccctttccaccctgagacaaatgtggctgcttttactgccacaaccccagccctccacactctagatttgctcagggagcagctcctggacagacctcagggaccccagggaggagcctcactctggagattttgatggcatggtctttgaacttcactgttacccccagtcaggatccaggatgttgggagtgcatgattctgcccggtcccacttcagcaggaccccactgctgagttgtctgtggggacccgggcctctcatctccttcttgcattgcaggagagggatcttagcactgctttcacataaagtcagataatggaggagtgcaggtgagtttgggaaggtggacatgaagagaggttgtgtccctagaggtggcagcagtgagaggatgggcaggtgggaggaacacagcccatccagggttgccagccatattaggagcgacagcctttcctctaagcctccagcctttttcctgaaacattccagaactttccacttcagcacttcccactgaggctcctcaggtctgtccctgagctcccagctgagcctacctacccatctgaaatcctgagtcctgtgtcaccctcgttccccattattctgtgcagttctgtgggacgcccagctctcctgacacccccagtcttcagaatggccatcagcgctgtcgctgtggcaccagggtgactgccgcctggaggctgagtcctggcttcctgacagctgtggggcccgctctaggctcccttgtcctgatcattcatcacctccaggatgcacagcagctgggccagggggaggagcagggacaggtgtcagccaccctgtgtgtctgcaagtcaggctgggggtgtgggaggacgccaggaatgactgaactttctgatttagagggtgagagcttgcactgatggaatttgggatttaataggaaaagcatagcgttttcctattttgtaggcagggtggctggagtttggaatcatagattcccctgggatgtcactgtggacctcagtcccacccgttaggggcacagatttcagaatccacaccctggggcaaagcaggcatgggaggctccatcagcctggccagggctctctatttgtgcagctgctgcaaggagatgtgcactctgatgggaacagtgctccctcctccttggggggcagtatctagctccctgcagcccctctccctgcaggccctgccctctctgaacctcaccttccccaacccgccccccgcaatcccatctcagctgtaatcccaacactttctcatccattatgggtggactgcttgagcccaggggttcaagactatgctggctggacaatatagcgagttgttgtctctacaaaaagacaaaaattagctgtgcatggtggcatacacctgtagtcccagtcactcaggaggctgaggtgggaggattgcttgagctggggaggctgagttggcagtgagttgagattgtgccactgtatacttcagtgtaggtaacagagcgagaccctgtctcaaaaaataaaagtaaaaaaaaaaaaagaaatatggaatacattattgttaactctaatcaaccatgctatgcaatagtccaccagtaataccagtaatagccaataatgaattatctgaaaaagaatacaatttattcttagctatctactgctaaaatttttaagctatcttttatgatagctgaaacaaaagaagtaaatttaaccaaggaagtaaaagacctttataatgaaaactgtaaaacattgatgaaataaattgaaaaagacacacgcacaaatagaagatattccatgttcatgaattggaagaactgatattgctaaaatgtccttaccacccaaagtggtctacagattcaatgcaatttctgtcaaaacaccaatgatattcttcgaagaagtagaagatcctaaaattagaaaccacaaaaattcctaaaacctgcacaaaacaccctgagttgccaaagcaatcttaaacaaatagaacaaagctagtggcattacacttcctgacaatcaaagcatactgcaaagctatagtaaccaaatcagcatggtcctggcataaaaacaagcacatagatcaatgaaacagaataaaaatcccagaaataaacccatgcatctctagctaactgattttcagccaaggagccacatgcacacaatggggaaaggacagcctcttcaataagtggtgctggggaattggatattcatatgcagaagaatgaacctagaccctatccctcaccatgcacaaaaaattaactcaaaatgtattaaataaagacttaaatgtaagaactgaaactatgaaactactagaagaaaatatagggggaaaatccatgacattggtctaggcaaagagtttttggataaaatctcaacagcataagcaacaaaaccaaatataaacaaacgggatttcatcaaactaaaaagcttttatacagcaaagaaaaaaaaggccagcagagcaaagagacaacctacaaatgggaggagaatatatttgtaaatatatacatatatatttgtaaatatatacatctgataagaagataatatccaaaatatataagaaaattatgtttctgtatagttttatctgactgggatacagaggccacatccacagtcccatcctcaaaggccacttgttcccaaaatgtcaagcacatccctcaatgatccatcatcaacacctatgtctgtaggatgaagggtgaatcatgaagcactaaaaaggaagaaggaagccaatcccaaaacaaaatgatgcagggtctggaaagtccaaagcattttttttttttttttactgcatcttcctcctttcttctccacattcccaatcctcactattgattaacaaaacaaaaaaaactgggacccaccatcttccctactgtcaggagatctagcgagattgtttgagtcttagaccaaactttgccataagccaaatttctggctgactttacaatgatatgagctagcacagtctctttttctgccagtcaacttgtgctcggttttatttgcaaccaaatagaggtggtaaccaaatataggtgaccctaaaattagtcatcaggatgaaatcctaaaatgtgcaacaaactgggttgaattcaggattagtagcaacatctctgttgtgggcttgaaaagggggcacccttttatgcagtagcaaaattgctaaattgttgtttgctgagtctttggactctcatcccggattttctatgaccattcaaacagggctgcaatgaacatctatggttgtttagcttggcacacttctacatttctatatagtaatatctagaagtgcatttgctcaatcacaagatatgcacattttataattgactgctatcgaactaccttaaatagccttaatttgttctcaacattgtttaacagggtctgtttaatgtcctacgtccagcaaggacagtatcacttttcttaatatttttcaaattattggaccttaacaaatacttaatgtgcaattaattgattcctttgtattcccatgccttcttttatatgtttccttatagtacacaaaaccacattattgtttctttacttgtgtcattccaccctggaccattcctatctaaactataacattatgagagagagagagagagaaaacaatatgaaaatataaattgattaatcaaaaaaatttaaataggacaaatcaggaagacacaagagagattttaaaattattcagagaataccacaatagctgtaccaatatattttaaaacttagatgaaacggacaactatctcgataaatgtaaattaccaaaactgactcatgaaaaaatggatattatgaatagagcaataatcagtaaagcaattaaaaagacagttgataatttttatttactgacaacaataacaaaatttcaggtcctgatatttttatggtgaattttaacaaattttcaagctcctcctcaaccaattctcagaaggtttaaaactttaacaagaaaacactttctaacacattttcagaagctgttatagcatgataccaaaaccacacaagaaaattatagaccaatctcacttacaaatatacatgcaaaatcaaacaaaatcttagtgaaccaaattcagaattaataatagcaaacaagcaaaatatgttatcatacgtatggcttatatcaggaatgcaagtatgtttcaacatcagaaaatacttctccacattaacagactaaaggagaaaaacgcttgtttaattatctcaataggtttttagagaattttgaaaattttataaagttatgcgtattctgtaaaattgatgaaatccaaccttgatttatttttaaaaattgcctttcctatagaattataggtaaaggaaacacatgcatcctcacagagctacttcaaggctaagttacttcccataagtaacgtatcctgtaatgtgtgcttggcacatattcaatactaaacaaatatttgcaaatcctcaaaccacttctcgctcaaataacccacctttgtcttttgcctttatgttagggttgattttctcaattgtatcttggagatcctttggtgggtctttcagcaattaccctgaatttgcttttctgtttacaattttaattcctgggaactctttcttgttctctgactgcacccttttcatgagagttcagccatcaatcctccagaaccccaccccccccgcccccccaaaaagcaataaagatgtctaaaagcttccttctgggctttcgaatgatgtttaccccaggcatttgttctattcgttcatcacccattttccctacaacttgcctacacttgatatcagatttttatttattagtcacctatcttcttcattggcccattttcctattttgccactggttgttctcaaatgtgttatgattcctggttgtacagtcaagtggttgataatcttggatatacgataaagatttgctctgtagctgtgtgtaagcctatataaaagcttttgtatttttcttcttaaaaaagacaaaagatggttgggaagatccctccagttcaccagttcgaggctgcagtgagctatgatagcgccgctgctctagcctgtctgtctgtgaaaaacaaggggggcggggggcgggggggaagactggagatgtaaatctcccgcagggccctacccgtatccgcaacaggtctctaacaggaacagcctcaggcctgtgttggaacaaggtaggttacagaaatctggaagccagatctgtaacttcagggtaaggactggctctcagggctgatcccccgggctgggtgtcccagaggcacccgcccccgccccttccccaaggcaggccaggacaccttcactcctctccttaggctccccacccccttctcctccccactgtgcctcctggagtagcggtggcggtgccacaggggagcggggcggggcgggctctgagggcaagggggatgggccccgccggggtcactggcggccaccctggaaactcgacgcaggccggcccttctagtgaatcgtcccagccacagctggcctcccagccgcgcttggggcgcctcggggcgcgaatggtgcaggttggggagactcaccacgcaccgtcgggggtcggtccggttattcctcaccgctcggctccagtgggcgcgcgggcctctcctcctcagttcctgcgctgcagtccctccctcacccttcgcagcttgggaatccaactgtgtcattccgacggagcgccgtgaggacctccgagggtgttagcgccaagtgatctctgtccagcgctctgaatatccaagtaaaggagttcaatgaagggcgggtcaacggaggagaaaccgtgactctctcaagggagcccaaggcctccttgtctaattagtgacgcgccaatggatggaggctcttcccaccatctcttcccagcatccagtgacaccaccgccaagggacgggctcggcggaacctgcaggaaagaagcatcggctgagcctgactgcagcgctgtgaagagacaggggaggggatcagtagttggtcccgcgcccaccccctgtttccgcgaggggcggagttgactggccatgcaggcagagggcgaaatgtgaaattccactactcctaccgtttttccctgacccgatggggcggagtgtcgtcaggctaagttccctggcggtaaggtggggagattgaggcgcacacctgccgaacggtaacgcaggattagctaaggcgagctcaggacagaagcctcccgaggagcaggagggcaaaataataaataaataaataaataataaataactcactccttggtctttatttgcggcaggaattcagaaggtgaaagcggggccttaggatctttctgaccttttgggttttaagcaggaggtgtcagaaatgttaccacagggctagctggcttgtggccagcaagcgttcacaatgccctcgatttttcatccctctctgtgggttctttttttcattgtaaggcagaatttctacgattgctcacccactcagagaacctgagctggtttagaccaggtgagacaggctaggtttaccctggtgatgatgtgttgttgccatggcgatcctgcccagtaccagaggccctgcagattcagatgcttggtgcctgtgcttggctgaggggccaatgggtgaagctgccatctgcgggatgatgactgaagcctctaagtcagaatccgcccaggctgagccttagggcagctccatggagcctcggctggcctgggatagagagtccaccactgtgccagcccccagccactgcctaggtcctgtgctgagagccccttgtccagggaaatggcgtccagtggaaaagggaccacccccttgcccttcactcaaggcaggttggtgacaaccctgaagctaatccgttcctagaggagctgcttctgggtccgagttttctctgcagcagagcagctccctggatgggatctgttcaaagtccgcctttcacgcggaattttccgtccttgcaattttccacctccaccactaggggatcctctctgaccgcctcatgccggctctggcctctgagcaggggtttctcttctgcatgtgcgaccttgcgcatgcctagtggccttttgggacctagagctgctccacaccccgatggggttacagagtgcctcgcctccactccaccccaccagggttccttccctggctgggatgggatttcagaagcgccgaggaacagcccagacaggtgtgggagagtagccaaggcccctgtcccggggtggccaggacagcggtggcctcgcataggacctggctgggctgctgcaatcagtgtcctgccccttggagagcaacagtgaaaacaacaagactatcttcacccaccttaagaaagaacagaaccagtatccccaactctgctgtgtatcccaacccaattccattccccaccccactctcagtagccaatatgcaaaatattagaatactcttactgttattattttcaaccacactctgcatcctgaaaaaccatatatttcgttatgtgcttttaaacttcttgaaaatgaaatactgaggctgggcgcagtggctgacacctgtaatcccagcacttcgggaggcggaggcaggcggatcacgaggtcaggagatcgagaccatcctggctaacacagtgaaaccccatctctactaaaaatacaaaaaattagccgggcgtggtggcgggcgcctgtagtcccagctacttgggaggctgaggcaggagaacggcgtgaacccgggaggtggagcttgcactgagccgagatcgcgccactgcactccagcctgggcgacagcgccagactctgtctccaaaaaaaaaaagaaaaaagaaatactgaattttcaaatacttgctttttttttcggtcaaaattatgttctcaaatttcactcctgtagatgtgcgtggctggctgtagtttttgcatttttattattaggtattctcctgttgcattaatatgccacattttatttctctcatgtttttggtgaccacttggggtgttttttggttttgtatttttgctgtatacatgctgccatggtggacatacctctttatacatatttcctgttgtatgcagacacaattttaggatgtgacatcttcagcttttctattgtgtcgtgtgtcttttccttcgtgctttgtgttatttacatattctggacacagattctttgtcaactgtatgtgctgcacatctctttcccagtttgtgtcttcttcttcttttttttttcttaaaaaaaactttctttatagtgttttttttttctttctttctttgttttgttttgtttttttgagatggagtcttgctctgtcacctaggctgaagtgcactggccgatctcggctcactgcaacctccgtctcctgggttcaagtgattctcctgcctcagcttcccaagtagctgggattacaggtgcctgtcaccacacccagctaatttttgtatttttagtacagatggggtttcaccatgtttgtcaggctggtctcgaactcctgacctcaggtgatccaccctctttggcctcccaaagtgttgggattacaggcgtgagccacagcacctggcctgtgttctttcttaagtagatgttacttttaatataatagaatgtatcatattttgcttttatattagtactttttctatctaattcaaacacatccccaagggtctttgtgtgtagactgaccaatttctcaagaatcatgaatgaatactgcttctctttccccaatttatctgtaatgctacctttattataaagtttctatgcatgtgtagaaatagttcctgatttttcactctgtgccaccagcataccaatagcacgctgtcttaaatattaaatagcagagctttatgagacaacttgatgtgcagtaggcaattgcccccttgttactcttcttcagggttctttgttgtaccacatgaattttagaattggcttgtccagctaaaagacaactgcaaggattttatttggaagttcataattctatacataatttggggaaagtattttcataataccaagtcttcctattaatgaacacagactctctctctctctcccccacccccacctgtttagttatttatatctttatggtctgttagttattgtttattgtctttcaaccaggtttcatgtttttctacatagaggccttgcatgtgaaagtctttcttcctagcttgctattacaaattttttttaattgcactttttgggtacagtggcttgtactgtaatccccgatacctgggaggctgaggcagatggattgcttgagtccagaagttcaagaccagcctgggcaacataatgaggtccctgtctcaaaaagtttgttttaaaaattgcatttgctgttattcaacaaatgtcattgtgtctcatatatggatttttatatctgataaccttgttcaacaatcttttgattctaacaatatatcagattcttttgagttttccatatagacaataatgtcatctgtaaattataattgtttcttctttgttatttcttggaccttttattttatatttttgtcttgctgcaaggcaatatccctctatatattgtggggtcttttttctcataaagtggggatggtgaacacccttgtcttgctctctgattgtataaagcatgctttctgtagcattttgtagacgctcttttttagattgaggtaattcacttttatttctggtttactgagtttttagcataaattcaggctgaatttgagctaaagctttttctggagacatcatttgaaaaattcatatgatttactttctttaagtcaccaaagttatgatttacattgaactgagtttctactgtttaactgtattcttgggagaaaacccacttgtcactgaacaatatctgttttatttactgctgtcttgtgtctaaattttcttttaggattttttgtatatgctcagattagcctgttattctcctttctgtatttttttctggtttgggggtcaaagttataatagcctcacaataagagctaagaaaccagccctaatggaggccggggcaggaggtttggagttcaagaccagtctgggcaaaatagtgagacccccatctctatgaaaaatagaaattagccaggcatggcagtgagtacctgtagtcctaggtacttgggagggtgaggcaggaggattgcttgagcctaggaatttgaggctgcagcgaactatgattgtgccactgtactccagcctggatgacagagcgagaccctgtctcaaaagaaaaaaaaagaagaaataaaaaggaaaagataaaagagctaagcatctgtttccttttttccattttctgggagagtatgtgtaagactgtaattaactgtttcttgaataatgggagaactctgtaaaataatctggctttggtgttacctgtattggaaggatgaaaaataccaattcagtttcattattggttgatagggctactcatgctttttgttttgttttgttttgttttgtttttgagaggaagtctctctgtattgccctgttgtccaggctgagatgcaacgttgttcacaggcctgatcctggctcactacagcttctaacttccgatctcaatagatcctcccgcctcagccttcccagtagctaggactacaagcatgcagcatcacatccagcctcttttcctgcctgacccagttctggtttcctttagttttctaggtgttcatccattttatctaatgtttaatgcatttggcataagggtgctcagtgtcctttcattgtctgttgtctgtaactgttgccattttcattcctatttatgagtactggcgtcttctctcactttttcttaataatcctgctggaactttgctttttaaagaacatcttttgacttgttgattcttttttcatacatattaactattttcttattttttgcctttatatttatttcttttcctgtttgaaacattgctcttttcttactataaaaatgggtaagtagctcatgaattaccacctcttttaaaaatcttttctactgtaagcattttagcagtttacatttgcccacaagtaccacttcagctacaccctatgtgcttttacataaagtcttcatttttggtaagacatattctcaaattttaattatcacttgtttttaaatccatgatgttttatttgaaatgttgtttctaaagatacattttctggttatacttttattcttctaatttagcacagtggccacaaaacatggtctgtgcagtgcatacaatcgatgagtaatttctgagctgtagtatttggcataatatatggcaaaatttcctaagttttccatgtgtgctttaaaaaacttccagtaaaatacataaatctgttagatcaagcttctcacattgttcaaatagtctatatgtttactgattcatttgactgcttgatttatcaattacaggtaggaatgtattcaaatctcctattaaagtgtgacactcaagtggctttttaaagacagagatgccaaaccaatgaatacatgattttccccaaagcctgcacaaattctctaatgaaattttaccatgaaagtttgtttaattaaggcttactaaagcagtatgttgtcttttactttttaaacagagaatatatattttaatacatcgtttaagtttatgattaattatctattactgaggataagaatctttgcctgtgctcattcagcatttgcacttcatttatgatctgccttctcatagcttctgttaatttttatactagagacatttatttgtttgtataaatgttgaaggtttttttttgttgttgttgtttttgagtcagagcctcgctctgtcacccaggctggagtgcagtggcatgatctcggctcactgcagcctccatctcctgggttaaagtgattctcctgcctcagcctccagagtagctgggactacaggcatgtgccaccaagcaaggctaatattttgtatttttagtagagatggggtttcgtcctgttagccagggtggtctcgatctcctgacctcatgatctacctgcctcggcctcccaaagtgctaggattacaggtgtgagccaccgtgcccagctgggttttttatattataaggagatgtaatagatagatagatgtttcaaagatagtcaaatgtttttaaaatttaaaacacttttttacaggttgactttcaccatttaatttcatctatgtgttttgccttagagaaattttaaatgctatgtagatctcatgacttataattatgaagcattttgttttctgttttccacgaaacttagcttaactttgagcatataatagttgtaaaggtaggagagtaacactgaaaaaaggaattgcataaaaatggcacattttctgtagagttgtttatcgcctgaaaataggccccatttcatggaagtaagatgatcaggctcaggtccccagacgaaactcttggcatggtttttggagatagtccagggctcagtactggctctatcatttgctacttctcccaaagtaaccaatatctcatccaccctgagcccatttccatatctctaacatgaggataatagcatctaccttacacaccaagtagagggatcaaatgtaggaactaaatcaaagtaccagcactgaataacctacatcctcccacttcccaaaaggaagagagatgtatcccctgttgacaaacgagaccattttgcaggagagaaaggaaatgccagttcacttgcaatgtaaacatgctctctctttttagggatgtccagggacctgagagagaacccatgcttaccaaagagtttctagttccagacacacaggactcgaagggtgacaagtatggttttcagggtccctgaatccacccagtcctcacagaaactcctaaaagctgtcgattgacagcgttgagttcacagctctggtcctcacatgctgatactgcttgtgatatcgaacccgacaggaccccacatcacaattgatttaccaactacaatataatacctcctgaatctccaaattggctcacccaggaacaaaggcttggggtaaaactggattaggagatataagctctgaattttctgagggtgagacacacaaggattctaagtgacacgccacagagtaacgggtctgtgactggaggacccacagatttgtcttactggagacaccacatgcacacaaactccatccttagctgtggaaacaagggtcttttgctatcttagccgaattctgggagtaatttttggaggggaggagatctttgggattgcctctttcaggccctttacaaaaatacctacttcttaaatggtaaagcttacactaaactgaaaaaattacatccttggctttttatgaagtaggtgttggattgaatcactactggaagaagtatggcatcgcaaattctaagcagtggtcaaaggatggatctgttaaattagaaaaatctctaaatttataaaaagattttagattcctttattctaaacaattgacctatttgtactcatgggacaatcaaatttcaaaggagatatgtaacgatttcatggcttgcattaaaaatccttctgataaaattaaagataaaaaatctgaccccctgccaaaaaaatcttttgaagttcatactgcctgctttcaatattctgtgggattcacaatgaaaggtgccttatattgtggcctagcttcaagtttatgccttcgccaccatggcctgggttcaattcccagtcagggccccagcgcctttggtttaatgtttgcgtggcatttgacttttttacctatttagtattggtgagattacctttggtaaaaaaaagtttaaagagtggaaatcgcaattctttgtgttggctaaaatctgattataagagatctggaaggttttatttttctttttcaaagagctctatggtcagaagtcggcttcatgaaaagctaatatttaattatatgtacatacagtctttctggattttctcttttgcctcctgttttgaaaaatatttggatttgagtgaaactccgttttagaaattaattgcttggtacaatatacccatgtaactaccctgcacatgtaccccctgaatctataataagagttgaaattttgacaaaataaaattagattttgaattaaaacaaataggtgcttggttcctctgctcacttctttttaaaaggaattcctctcccatgtacttcttcttttcccttctttaccttccttttggcatctttggtatcacatgaagggatctagagggaattttaagtgactctgaaattccttgagaaatacacaaaaagatcccactcaccccttttgggggtctcctgttctccttgtggagtccagagtcagggacaggctcctccaggtctgcagctctgctctcttttatttcatcttggctgattgctttggttttgtgagtaccaggcattactttgtactgtgagagacacgtcctttgtgagtgcaacggctgctgggtcactggtgagggctgcagtttggagatggctgagagccgttgcaataaatggttgtgattgcagggggctccttgtttctttgcaagtttagatgagaaaggtgcagtttggacacagtttaaaggctgtgaaaacaccaccaatgaatatgatttcctttggggatggtctgattaaaagtgggctgattgttgctgtgctactagccttgaagacatgtttctacagcattgtgcagtgtggaaaaattgtgtggcttggtcttgtggcatgtcccttcttttagagacctcagattcaatgtgaaattcgggatttttgattttcaaagatctagatgccctgccttccagatgtgcctactcttcacatattttaaaattagatcctataaactgcaaatactttgttggcttctgtgagatcagaggtccagttagaaaaggaagacagtttgttaaaattaaaaactatttatctaatctaactagattggcctccaaatatgactttctgacattcagctggttactctgaaaagatttctaaatctcttgaggctcatctatatgtttccttgcaaagaaaaaaaaaaaaaaaaaaaagcaagcccaagcactagtaagaaaaagatttgcaatgtttcatgaaaggagtagatgagtgaagcatttatttgtagatactgggttggatacctgtgcaaagaagaagaggtcaataataaaaattgccaggggatttcttggaacttaacaagctgaattaaatatagaaatgtcaggaaatcaaggcaggaaatactcacttgtggttaggcagacagggcagggttctgagcttgagatggagcaaacagttgtggtgggtgaagttcacatgctttagagctcagctgtcctagtaaagaagcctaagagtctctaaagctcttatgagaagatggattttttttgcctagattaaaaggttaaagaattgctttaagttggataaaataaagctaaatgtttaagcaagttgtgaaaggtttatgaaaaaattaattaaaatatttttgtgtgtaaacatattgactaaagttgaaggggtataattcagcatttctgtaaattgagcattgaaataaaaacacaatgggtttctcttagagcactaacctgctctttaacaaaaattgtaaagggttatagaaagtctataaaaatgttaccttatggtcaaacattaaaattgggtaaatatgtctatcaggttttattaagaattaggtttaacattaatagtacactaatgtaaaggtgaaatttggcttatttggtacaaaaatcatacaggaagcattgtgaaatataaaatgatttttagctttctttgggctatatttctataaatatgttattgatgagggttccaaagttatgggagactcctataattctgctatatctcagtgtacattatcagtcataattataattgtcatgttaaattattgtgggccacagaggtaacagatttccttgtcaattgtgtctttgactatgactaccctaaaacgttcagtcacccatatacacatgttaccttgttttggccctctttagaaggtaattttataatcagctataaagccctaacaggtgctcttaaatgcaaattttgataactttggagattgtgacatcagaagagaggaaaaatgttcgggacacttggagagctaaaatgttcattgatatcaagcaggacaggaattaactgcatgaagtgaactaataggaggctgaagtgatctttttgactttttgcttaaaacgttgctgatcctttgttttgcttttcagagtcaaggcaaattttcttttgagctattgacagcttttaacgattaatcaaaatatactcctatgaacaccatttggagcattatttgtttctctctacccgatttccccagaatttggaaactatttgtgggtattcttaatttatggcaatatagttatttgcataagtgcaataagaatgtgttttctttggtaacaggacacaatttgaaaaactggttattttaccaaggttttgaccagaatgctgtgctttcctttaaggaatcaaacttgacttgtggagctaataaagcctttggaaaactgaccttatatcctgtgaacacagtccctgtacagggttactgatctgtgggaagaaaagaatgtcacattctgacaggtcaggaatcccaagttatcttgaaacttcaagaggacaggaattcacccaaccatatgtatttgatggtagaaatccatggcaggggctcagctttaaaaagtcttatctcagattccttctataaaacaaagtcccattaaaaccaattttaaaagcctatgtgaaaaataattattcttgctgcacctcgtacaaataaagtggcaaagcataataaagcaaattggtcctgtcgtaatttgtctttagtaaaaacgggaaactggggtcgggtgcagtggctcactcctgtaatcccagcactttgggaggctgaggtgggcagatcatctgaggtcaggagttcaagaccagcctggccaacatggtgaaaccccatctctacaaaaatacaaaaatgagccgggcatgatggcgggtgcctgtaatcccagctactcaaggggctgaggcagggaagcggaggttacagtgagtcaagatcgtgccacttcacgacagcctgggtgacagagcaagactccatctcaacaacaacaacaaaaaagggtaactggagagagggaagttatgtttcaaaaacttttggaaactatagtacacctgtttttaaattctagtctggcattcagtttttattattttctacagtttgggttaaattcgtatttctctggctacaagtctcctaaataatcttttcatttgtttcctttttctttccctttttccccatttttcttaattggaaatcactgaaacctaagctgtgctttcttaaagccctgtgaactgaagactagacaaccgaaacttctgaaggaagtagcagcaacctatttatatgtgttgctgttgcctactattatgttttagcaggtgctgcctctacacccccgaaacagagagtgctactgggaacaaatcgactttttccactccagtgctgcattcggtgccccataacgatgaccccctctcagcaggaagtagccagaaagattacaatgctccatctccctatgattcttgtgataaataaatatacaagcatgatagaaatcatgcgcaaattgacagtggggattgtggcaggccagatttcactaatggaggtccccatcacaactacttcagtactgactgagtggttaagttcagtatcaaaagctgaaagtgccagcgcctttctacaaaggctagaatgtaacaaaagcccaccaagggttttacctaggcctttcctgggccttacagcatgacaaaacaaagaaggaattcttaaccagacctgtttaggattaaacaaatttaattgggggtctgaagaaactcgccaggcctccacaaacaagttcattgggggtctaaaggaaccccccccaaacctctgtgattgagcaggagacaaggtcagggtaattgccccagcacctggactcatttagatttaagtaaatgtactgaggctccagagaaaggtctccaagacttagactagagttacagattaaaagaagttaatcacttatatctttagataaatgcacactgacacgtagacatacatcttagaaaatatataagctctggaaaaccttgtaatttacagttggtctggagatattttctgggccttctctctgtaaccggttccagaaataaaaaactctcttcctccccagtttatctgcatctcgttattgggccgtgagaaatagcagccagaccctgagtttggtctgggaacacactggctgggcttcctgcctggcggtagagcttcactgtcctccttcccagccaaaatgtggcccttgaaggcttcctccccaactgaccggttttgggttctaggtactcagggaacaccgtcttcaaggaggccattttcatactgttcctggtttgatttttctgaaattaggaaatgccccttgaggcatccaggattgtctttatttcccctgaagcttcccctcctgaagaaaaaagttctcaaacaccctcaggactcaaaccccaagttcaccctgtgaaacattcccatttcctaaacccaggcaggctcatggccctcagcctctcagaccccatggaaacctcctcccccacttcacgggttctctccatattgagagcctcccctcctcggcacacaacccagagactcaccccaacatgtgtagcaaatcaccctggaaacaatcatggctgaacgtggtagcccatgcctgtaatcccagcactttgggaggcccaggaggtggatcacctgaggtcgggagttcgagaccagcgaggccaacatggtgaaacctcgactctactaaaaatacaaagttcactgggcattgtggtgtgtacctgtaatctcaactactcaggaggctgaggcaggagaatcacttaaacctgggagacagagattgcagagagccaagatcgcaccattacactccagcctgggcaagaagagtgaaactacatctaaaaaaaaaaaaaaaaaaaggaaaaggaaaagaaaaaaaaaatcatgaggcaacattgcatttaacaatattttatttatcaaaagacacttgtctttctcaggtaagtgaaggtctagagatgaaacgagtcccgatgtaaattgccccatgggcattgctgagatcacaagatcatcactgcagcatgcagcacaatagtaaatttctcaggatggaagttcaacaatccaaaaggtagtattttttttcatgatgctcagtccatcatacgaaataaaaataaattccttttcatgatcatccattcagtagaaaaaatgatagtaaatttgttctcatgaagatttttaccgtaacatataggatttatcgttattattattattctttgttttttgtttttttgaagcggagtctcactctgttacccagtctggagtgcagtcgtgcgatctgggcacactattaacctccacctccagggttcaagcatttctcctgcctcagcttcccgagtagctgggattacaggcatgcgccaccacacccggctaattttcgtatttttactagagatggggtttcaccgcattggtcgagctggatttgagctccggacctcgggtcatccgcccatctcagcctcccaaagtgctgggattacaggcgtgagccaccgcgcccggcctcaatttatcattattcacgcatccacaaactgggttcttatattttgtacgtgattttttccattgaggagagatatctgtgcatattcatgctgctcatatttcatccacaaactcggttcatatttcatccacaaacataattttttccgttgagaagagatacttgtacatatttatgctgttcaaattcacatttcatcattcttttacaagaaatagataatgtattttaaggttttccagtggtattacagatattttactgggtgtatagatagaaattaaaccaaacttctttgttctggccgccagtcatgcatcctgttttcaacatagttcacatacaactggttgtgtaaaaatgaaattattttgtttagtacaatcatcaacagttggttgattagatttttaattatcaagttaatcattgtcattatgcttctcatcgcactcgtcattaattgctgtgggaggaaatttgttatgttccctatgagagggtgtatcacaaattcaaataagaattcaacgacaatggactgtataaaggaaataagcaagtccatggaaaacatatttttttccggaaaggattaaaatatttttaaaaaggaattaaaaaaaaattgggcacggtggcaaatgcctagagtcccagctgctcaggagatggagacagaaggattgcttgagcccaggaataagttggaggctgtagtgaacagtgattccaccactgtactccagccagggcaatagagggaaaccctctttctaaaaagacaaaaagaaacaaaacaaaacaaaaaaacaccacatcaaaaaacccaacaacaaaatgaaaaaccaaataacagcaatacaattggagctattcgatccaaagaagtaaatgaaacataaagcaaataaaagagaaaagctaatacctgtgtcctgcaggactcagtccaagttctgctctgactccctcctggtgagccaccccttaaaaagtcacttggggcggggttactttgacagacagtcttctgtcaaagagggaggcggtaaatagcacttttttttttttaatttaacgcctttccaacaaattagcggctatgttgtctaagagtgcaaatgtcagaggtgggtacaggcagcaagaccctccccacaggggcagcagaaggaggaatgactaagggaacaagactttagtgtgctcaactacacaggacaggaaacagatgctttttacaaaagctggtggacttgaaggcagaatattttcaagttcctgtaactgcgaactatgacctgtagcctgtgagagtgactttctgtggcaaaggagcttttgtgaatgtgaggaagttaattatcttaacagtgggaggttctcccggcttatctagctagaccctcgtgaaatcccaagtgtccttaggaaggggaagcagagagagatttgagtccagaagaggaagaaggtgatgtgaggcccagtaggggaacaaagggcgatggcatgtaaacacttagcccccagaagtgggagagggctggggttcatcacaccagaatccctaacaatcagccttattttaattacccttgaaatggaaggaggccttagagagccagaggcttggaggggcaccctctgctgcatacacagatcccaactgctgtgggctccaaataattgcaccagggaaatcacaaattatcaaaaataaaggatgtaaagcttttaaaaaatattaaaagcccaacaaataaaaaaagttctaaatctataaaattgacctcagtctgtatatttagatgagtcatgtgtatatagcgtttcacttcaaaatatatgataaatctctcattcattggcttaaaaataaacacttcaatcaagtctttatcagaaaaattgaaacgttaactcaattgccttttagttcatgtgactttacaaaacttaaaacaataaagtcagttttaaaaattattagtaaagtaaaagaaaaatatcttcacaatgtagacattttgtccacatgagacatgtgaaatattgccattactaaatatttgcaggtcaaaaactgtttccaaaacattttaaataatcatctggcctgtctgttttagagcattcaattctagctgaggtctggggacatgtgaaaggagccacggcccgactccgtgctgggaagagtcagacattttccacagctctgtcctttgctgtgggctctgcaactcctaccaattaaaattgcttacgtttttgttttatttttactaaagaggggttcctaaaagctaacattatactgagtatatgtaactaaaactactaagaaaacaatttcacaattatacaaatgtgccaagtaaatgaaaaaataaactgtattttaataaaggttataaaaagaaaaacatatagtggtgtgaggactgtctcaggtcttcactgagcaagggatcatgacattctatggcggacagctgaccttggctttctgctcctcttgattatgtctactaagtgacatacttactctttttccacctgtcttgcctctaagggtaacaggttttatgagatccctcctagtgctttgcaggtcagcctccctttgctgcattccaattttactgcctataccctccagctggcttttgatgacaaaagtcctggtcccagccattctcagattctgtcatccccgtgggcactatggagctcagcactatgggaggttccccaaaaatctcgttttctatgaggaatggccaccacctgcatctcagtgatgctagtgacccctttcctactcctgtgctcactggtcctcatgaagatcctggttggtctgtagccccctatttttcctattaaagagaaattacagtaagacccatttgtgtgcaaaatcaattttaggcttattacacttggcctgataatttgcataaaatgcagcaagaattcatcggccatataggctacttttgagttaattttcctgggtttttacctaaaaatatactattttggttagagtcttgtgaaaataaccaatgtgttcaattgttttattttaaaaggctcttactgaacactataaatatgtataagttgaatatacaaactatattgtcataaaatcacaacccaaaatgtggagaacgcagagggaaaggtaaatttgctcgcaaaaacatacttcacccaaataactggaaaaaaaaaaagactttcatgacccttctttaaccagagcagcagctttcaaacaaggtgtttgccttggaaatgccattcacaagccaaacggcccttgagagctgtctgtcaggcactgtagaatctagcagctcctcacagagttagaaatagtttcaggaaagagattccctgcttttagtaactgcactttatattcccagatagcgagattgtatgtaaaccatttttatcttattctggaactcttttgggtactttttttttttttttttaaatgatggagtctggctctgttgctcaggctggggtgtagtggtgcgatttcagggtatgagaaaatgcagctggacctggctctttccaggaagaccctcacagccaaggagtccaaagcctggggttttcatctaattccagtgtgactggggtaggagcagctttggtgctgggtgtgtgtgtgtgtgtgtgtgtgtgtgtgtgtgtctatgcctgtgtctgtttagggtgttaggctcgtggttgtctagatacaaatgtcccagggctcaggagccccagggttatgtcaggggcaccagatgaaggtgtcaacagaagttagggcacaagggacaaaggtgagagcaaggttagattcatttaggtgcaagaaatcatagagggaggagggagaggaagccctcctgctaccaccgaggaagaagcgcagcttaaggcagaaagcctgtccggagaggaagtgagtttgagggcagggctctctgggtaaagtacggtctgggacaccagcctgggggaagggtacagaatgcagagtggcctggcgtggggactaagaacagaggagagcagctttcactgggagggtcagtgttttcagtgtccagcactgagcaaggtgagatttgggcagcttgctgtgaaataaggtcaggctctggcattgtccccattgcgtgtgtgtgtgaggggcactttgggagagtgaactctccacctccatcctctcatacgtccttcaaccgagcttgccagttaccctgattccaaggagatctatttattgttgacaatactggatcctagcagaggctgggtaggagcctgggcacaagcaagtggaggagggggcctgggcctgaaagacctgggaggtttgagagaggacacagcccacagaatggagcagatggggtagagtcggcaagcattcagggctcctagtaagttggacaatggagaccctgaaagatccagtaaaacggggagaacaaacaggtccccaactcacatccttgcagtgcctggagcttcagactccagacaggtggggaaggaaaattgagggatgtgaacatgttggagaatgtcgtgccctgaagaatgaagaaaaggggggtgaggaatgagagcaggaacggcttccagtgcctggtgcccaggagaactcagaaaatgggtgtggtggagaggaatcgaggaaccggaagtggtggaagtgtgcagggcccctccgagatcactgtgactgccaggcgtcctccctggctggagagcttcactgtcctccttcccagccaaaatgtgtcccttgaaagcttcctccccaatggactggttctgggtcctatatatttgaaggggtggcctgcctctccacacctgtgggtatttctagttgggtgggaggagagacagagaaaagaaataagacacagagacaaagtataaagaaacaacagtgggtccaggggaccagcactcagcacaccaagggcctgcaccggcaccggcctctgagtttcctcagtttttattgattattattttcattatttcagcaaaaaggaatgtagtaggagagcagggtgataataaggagaaggtcaatgaaaaacatgtgagcaaaagaatctatatcataattaagttcaagggaaagtactatgcctggacgtgcactcaggccagatttatgtttctctccacccaaacatctcagtggagtaaagaataacaaggcagtattactgcaaacatgtctcacctcccgccacagggcagcttttctcctatctcagagttgaacaaatgtacaattgggttttacaccgagacattcagttctgaggggcaagcaggagacagtggccttcctccatctcgactgcaagaggctttcctcttttactaatccacctcagcacagaccctttatgggtgttgggctgggggacagtcaggtccttctcatcccatgaggccatatttcagactatcacatggggagaaaccttggacaataccccgctttcaagggcagaggtccctgcggctttccacagtgtattgtgcccctggtttattgagactagagaatggcaatgacctttaccaagtatactgcttgtaaatattttgttaacaaggcacatcctgcacagccctaggtcccttaaaccttgatttcatacaacacatgtttttgtgagctccaagttgggtcaaagtggctgggtcaaagtggctggggcaaagctacaaattaacaacatctcagcaaagccattgttcaaagtacaggtctttttcaaaatggagtctcttatgtctttcctttctacatggacacagtgacagtctgatctctctttcctttccctacatatattcatggaccacagtcttcaaggagtccatttcctcactgtttttggtttgatttctctgaaattaggaaatgccccattgaggcacccaggattgtctttacttcccccagagcttccactcctgaggcaggagcttctcaaacaccccccaagactcaacacctaatttcaccctctgaaaccttcccatttcttaaatccaggcagggtcatggtccttagcccctcagatgctgtggagaccttctttccctttcatacattctctcaagattaaaagccacccctcctcagcacacaccccagagactcaccccaacatgcattgcaaatcaccctggaaacagtcataagaccacactcatttaataatattttatttatcaaaagacactctttctcaggtaagtgaagttctggagaggaaaagaggagtcctgatgtaaattgccctgcaggccttgctgagatcacaaggagattgttactgcagcttgtagcacaatagtaaatttcttctctggatggaagttcaacaatccagatcgtagtatattccttttcattatgctcagtccagcaaatgtgatgataacaaattccttttcatgatcatccattcagcagagaaaatgtttgtaaatgtgttttcatgaagatgtttaccataacatacaggatttaccattatcaatgcatccacaaactctgctgttgttttttatacataattttttccatcgagaagtgatagttgtacatattcatgctgttcatatttcaaccacaaactctgctggtttttttatacgtaattttttccattgagaagtgatacttgtacatatttgtgctgttcatatttcatgtttcatcatccttttacaataaataggttatattgtattttaagtttttctaactgtagtgcagaaattgtactgggtgtatacatagatatcaaaccaaatttacttgttctggctgataatgcatcatttatttcatagattatgtatttctttgacacatttcacgtacaactaattgcataaaaatgaattttcttttagtatagacatcagcatgtgcttaattcggaatttaattgttgagttaaacatcgtcattgccttttccgttgttattaattgctctggtgggaattttgttatctcatacataagacagtgtgccacaatatctcttaaaatttcaatggcaataaactttatatttaaaaacagggaatctatggaaaacacatttttttctaaaggattaaaatatttttttaaaataattttctaaaaagttaggcacggtagcaaacgtctagagtcccagctactcaggaggctgagacaggaggattgcttaagcctacgagttgggggctgcagtgaactgtgattgcaccactacattccagccagggcaatagaagttaaccctttttctaaaaaaaaaaaaaaaagaaagaaagaaagaaaaaaagcaacaacaccaaaacctcaccaacaaaatggtaaagaaaaaaaaaacagcaatacaatgtaagctatttgatccaaagaagtcaatgaaatttaaaacaaatgaaagggaaaaagtaatacttgagtcctgcaggactcagtccaagttctgctgtgcctccctcacggtgagccacccctttagaagtcacttgggtcataagttaacccgataggaagtgtcctggccaatgaactagggaggtggtaaatggcaccattttaaatttaaattcacggccttttcaacggatcagtagccatgttgggtaagagtgcaaatgtcagaggtgaaaagaggcagcaggaccctcccctagtgcttgggcaacagaaggtggaatcactaaggggacaagactttagcatgctcaagtacacaggacagaaaacatgctttttacaaaagctggtaaatatgaagagggaacattttcaagttcctgtaaccaagaactaccgcctgtaaccggtgaaagtgactttctatggcaaaagcgtttttgaaaaggtgaggaagttaaatatcttaatgttgggaggttcttctggtttatctggctagaccctaatggaatcccaagtgtccttatggagcggggagcagagagagagatttgagtccagacgaggaagaaggtgatgtgagtctgggtgcgggacagggggagaatgatgctatgtggggatctgggctggggaatgacttagctgcatgagcggagtgacttagactcctgaactagaagaaatctagggctcatcacctcagcagccctaaccatcaaccttatttttattacaggtcttccatcgacggactccctaaaaagccagcggcgtggaggggcgccctctattggacaaatagatcttgactactttcggccctcaaatagcctgactaggcaaataacaaataataataatttttttttaaatcatggaaaatattttaaaaaacaattaaaaagttataaatctataaaatctgcttctgtctgtgtgtctgtatatttagatgtctcatgtgtacataatgtttcactaccaaaatatatgatgaaaccctcattaatcggcttagaaaactaaacacctaaatattttctcagaaaatacaaaaactttaactcaaatcccttttaattcacctgactttaaaaatctttaaaaaataaagcatgctttaaaattattagtaaagtaaaattagaacatcttcagaatttagacatttggtttaaattatacaggtcaaatactgcccttagtaaatattttcaggtcataaacaactcctgtaatcttttaaataattgaattacatgtctgttttagagctttaagttctagctaaagcctggggacaaatgaagggcaccatgccccctctctgtgctggaaagagacattttctacagctctgacccttgcagtaggctttgcaactgctacctatcaaaattgcctacatcctaagtttattattaaaaggagttgcttggagttaacattataatgaatatatgtaactaaaactatttctcatacaaagtatatgaaaaagtagaatgtatttttaataaaaagttataaaaagacatgaacatgtagtttttataaaaaacagtaattttgtctagttttgcagttctaaaaagttatgttaaattcaaaaataaaaaataacaagacaagactcaaggtttaaataagttgtaaaagatttgtaaaaattagttctataaaaattttacaaaaaaaagcattggttaaaatttaaggaattattttgtttttacagaaattaaacattcattaaaaacactctgatacaaggccttaatttgggttcatgtatcagaatagcagggttttcttagaatattaatctattctttaaaagaactatgaatgttatgcaaactttataaaaatcttaccttagagtcaaactgattaaaattccatagattttacgtaaaattttattaaaaattaacttcaacaaaaataaaatttgattttctcctttaaacaaaagttttgcgtaatattaaataataaagcatttttgtttaccttttaaactataaacacacacacacatacacatacaccaacactaaagtcagctgacctcatactgtctttattggatattcttgtttaaaaaactatcttctttggaaaataaagttttttattttaaaccatattttaaattatcattttgactaaatccataacatacagtgatctgtaataattctattttataatatcaagtgttttgaagaactccaggaacagccatgagagaacactgtggtttagtaacactttatttcctcagtttgaaaatagttgtctttcttggggaggccggtttcagcagatgaaaacaagagtcatgatgaaaattacccagcagtggttagtgtgaccataggaacattgtcatcaggtcagcagaaaacatatcagcaaatttttctcatactggcagtgtgtaggggtggatgtttacagttcctgaagccccagtggtcgtgtggtcttttagttttgccatttataggcaacttgtggtaactagctcaattagacacattccttatcacaaggacagagggctttctgtatcctagggttcttgccttggcattccagaagaatcaggtcacacgtggacgtggagaatgagtgcaaggttttattgagtggaagtagctctcagcagatgggggagccagaaaggagattggtttctccctggattggggccgttcagcagccctggctctcctctgactgccccaggcaaaatccacatcgttctataagtcggtgccctgctggtgtgctggtgcctgttgtcatgttcctcttcatgtccagccgcctgtgtgttcctccgctgatgtgctcctctcgacgtcaagcctcctgtgtgtctgactgctagggtcttggggtttttataagcacaggatgggtcttagcaggccaggatgatcttgggaaagacaacattcggtcaggaaaacaaaaatgcctgttgtcatctaggtccgtggggacaagcccaggtgtggagcttttagccagggaccacagcctcctgtatccaacacttcccttcaccttttctatatcattcaaagggatcatgcccttcccatcccagcacttcactttcatgtcatttgccccctctgaagaggtacatctaactgccattagaatatggatgatgaccagtcttagctgcttcctgctgaaagggggcattgttttgggggaaaacggcagtcagattcctcccaggggtctctataataaaagatcgaggtggctactttcaggaggtcctctaatgtactatctggtcccaagtcccatttctgcaacctcctcctgatgtcaggagctgcctgagtaataattttatcctttaggattatctgtccctcgattgaattaggagatagagaggtgtgatttaccaaggcctctcttagcctctccaggaaggcagtgggattttcatcaaatccctggttaattatggacaacttagtataattgagaggcttggtcttagacctacgtaagccctctattatgcacacctgaaagtgtctcctcttccagtcttccatctcattattgggatcccatttagggtccttcactggtgctacttctcttccagttggataatattcgctcccttccctgatgctataggtgatgcaaagctcatccccaaatctctctgctgctggcagagcagcctgcttctcagtgtctatcaggttctgactcaaaagtaacataacgtctctccaggagagttcaaatgttagggtgaaattctggaaagcttctatatatctatcagggtcatctgaacacttgcccagatctcccttaatttgctttaagtcttgtagggaaaagaggacttggaccttactgggcccaaattcactgggcatctgtaggaggggcaagagtgagactgggcttgtttgggatgaagatttctaggaggggccaggtgagaggctgaagctggatacggaggttggggtggacccagaggagcagggcttgagggagctggcacgtcagctgggggtgcgtctgggactcgtgtctttaattccctgggcttgaccctggcagccttccccgagacagcaaacaggagggctggaacaatcctacatgtcagcaaaggtctggattgctttgcaaggtatagaaagcctgcacatttggggcctcagaccatgtgtcctcacatccagagaaaagttctaattgcaggatggtattgaaatgaatggtcccttcctgaagccaagccagtccttcctgtaaaccataatttggccaaacctatgtgcggagggctatgagatgcttttcctctggattctgagggtcaaaacagtcccaatggttcaggatacactcaaggggagtacaagctgggggtggtgaggagaactggctgcccattctgaaagacagggaatagaggtgttcctcatttcccttccttcttttggcaaaaagctcagggtgtgatggggagggaaagcaagcatcttcacttcactttccacctcttacccctgcgccctggcaaccttggcaggtgccggccacaggtacaaatgcggtatgtacccatgaagcagggagaacctggagattaggaattaactgccctcacctatgtttccttttctccctgctgttgaaaaactttgagttccctgggcctttttatcccatgaggcatggcctccttctgtgggatggggttcagtcagcaggaattggtcctgtccatttacattgtgcctgttgcctggctttgaattcctcagacctgctttctctttctagggcctcagcctgaagcttggaattgagtttgggactgaaaaagcatttcagaggctgtttatatccatttagtgcctcaaataagccctgctgaatttgcaattatcagccagcaggggtcactcctctgttaacttccctattagaaacagagcggtggggattctcacttagaaaagaaaaaaagagaaaaacagttaaagaggcaaaaagtggggaatgctgggggaagaaccccttgcttagtgcaagtgggcccctctaatccttataactttcccatccttcccccagttcagaccaggttgaattccttggccatggaaggaaaggttccattgatgcagtgggtgagaagcactctgtagggtcctggctaccatcggttttctcacacccccctcatcccaggcagtggagggagacacttctgcgacattgctccccctgccccttcatggctattgggtgtggcctttgcctgctgcaggcatgcctaggtgctggagctgggagggaaaagggtaaggagaggtgccctggaagccgctcatgcctggggctgtcaaggtggaggcatacatggcacctctaggaaaaattggtctgatttgcacctttggcggctgagccaaatgctcattttacttagtaacattgcctcagcctgtagcaaaactcttaacattataaaggaagagataagatccatttcaaataatgtgtgagagagaaaagagatgaaaggaaaacagagtcttttacctgcaggaaagggagagaagtggcagagttttggaagaaaggcaggcccaacagtttcccattcactcacactcaccttccgagatcccagacgagccaccagttgaaatgggaaaagtttccttgtccccctcacaggaggtggagtgggggtgtggcttgcttctttagtactccgctgctcaaacctctagggaagcatacagactggcaagttgtggggctacaaccccatggcagcatctaggggtagatgtttacagctgctgaagccccagtggacatgtggtaccatgtgctcttttagttttgccatctataggtggctttgtggtaaccagctcaattagacccattccttaacccaaagacagagggctttctgtatcccgcggttgttacctaggtgtaccagaaaaatcaaatcacacgtggtcttggagaatgagtgcaaggttttattgagtggaagtagctctcagcagatgggggagccaaaagggagaatagttttcccctgaagtcgggttattcagcggcccaggctctcctctggctgccccagccaaactctatgtcaatccattggtcggtggcctgccagagtgctggtgcctgttggtggattcctctcagcgtcgagagtttttccctctcaggaaagggagagaagtggcagccacccatgtgttcttgcactgatgtgctcctctcgacgtccaacctcctgtgtgtctgcctgctagggtcccagagtttttttaggcacaggatagggcatggtgggccagggtgatcttgggaaatgcaacatttggtcaggaaaacaaaaatgcctgtcctcatctaggtccaggggcacaagcccaggtttggagccctagccagggaccccggcctcctctacccatcactttccttcaccttttctgtatcattcaaagggaccatgcccttcccttcccagcacttctcttctgtatcaataggtgatgtttttaaaatttcccaactctagtgcaggcatggtactagacatatacatagaaataaaaccacacttattcttctggctggcaagacatagtatttttgccaaattatgtgttgttttgaagcattttatgtacccctggtcatataaaaataaagctattttgttcagtacaaacagcagcattttctggattagaaagttaatcatcttaaaagatcatcacggatttttccattgcactcatcactaattgctttggcaaaaaatttcttatctcacgcatgacaaaatcagccgcagtatctcctagtaatttaatggtgatgatctttataaaggaaataagcacatcaagggaaaacataattttttttaaaaaaagagtaataaaactttttaaaagtcttttttaaaagactgcttttctaaaatagtaaaataaaactccaccaataaaaccaccaacaaaacagaaaagaaaaaataatgatatgatcggagctatttgatgaaagatggtaaattaaatttaaaatgattagaagagaaaaagcaatacctgtctcccgtaggtctcagtccaggttctgctatgcctttctcctggtgagccacctatttaagagtcgcttaaagcatatgttaatccaacaacagcagattaaaaaccaatgcaatctgaactatttgatctaaaaacataaataaaatttaaaacaaataaaagagaaaaagcagtacctgtgtcctgtaggtctcagtccaagatctgctctgactcccttgtggtgagttagccctttagaagtcacttggggtggggcatatgttaattccactaacattggttctggccaatgagtcaggaaggtggtaaatggcaccttttcttcttgctgatttctttcagttcctttggagtctggacattagtcctttgtcagatgcctagtttgtgactactgtttcctatactgtgggttgtgtgtttaccctgctgatatttcttctgccttgcagaagattttcggtttcattaggtcctattgatcttattctatttttatatttttgcgtttgcttttggggcattagtcatgactacttggcctaagccaatgtctagaaaagctttttggatgctatcttgtagcatttttagactttcaggtcttagatggaagtttttatatgctttgttaaagatcaggtgactgaaagtaccgggctttgtttctcggttctctattctgttccattgctctatgtgcctatttttatacttcctgcaccatttattgaataaagtgtcctttccccaattagtgtttttgcatactttgttgaagattagttgtctgtaagcatttggctttatttctgggttctctattctgttccattgctctatgtgcctatttttatacttcctgcaccatttattgaataaagtatcctttccccaattaatgtttttgtgtactttgttgaagattagttgtctgtaagcatttggctttatttctgggttctctattctgttctattgctctatgtgcatattttataccagtatcatgctattttggtgattgtagccttgtagtataatttaaagcctgccttcagatttgttctttttgcaaagtattgctttggatatgcggtcacgtttttggttttgtataaattttaggattcttttttctagttctgggaaggagaatgatgatattttgatgagaattctactgctctgtagatggctttggagagtatggtcactttcacaatattgattctacctattcataagcttataatgtgttcccatttgtttgtgtcaactgtgatttctttcagcactattttgtagttttccttgtaggaaacttacattaacctacttggttaagtatatttctaagtattttacttattaaaaattctcagggaaatgcaaagtaaaactgaggtgggaaattaaagaaaaataaaattaaaaagaaagggaaataagctttcttgtattaagctaacttgtcccagaggcagcaacaggcacagcccagacccaggaaaagtcttgataatattatttattgtattctggagactcttccagcactccttcaatgtagggagaagaaaaacaaattttcctttgttttatggtatgagtttatagattcttgttctctttaactagtaacttcaagtattctgttttatctaagaagtatggcaaaggtcatgagaagcctgagcaggcctgaactacagctctctaggcaccatagtgaagataaaccaatgcaagcctctttagagcaaaacctagataatagacatctgggttgcatagcaacagttatgtgcaatcctgagttatgaacctgttacaatttgattaactgtctttttcctgcctctgtatccctgctttcacaccactgtaagcttgcttcaagctggcccacccccttttgtgaagtgtgtataaaagtcaagtgctgtctttgttccaggccctgtctttggacgtgagtctgctgggcctgagagcactcaataaaagattctcctgttttaacccaaagcctctctctcatcctcctaaatcccacaacaaaaccacaatgagatgctatcttaatcttgctagaagcccataatttaaaagtcagaaaacaatagatgttggcatagatgtggtcaaaagggagcactttgacactgctagtgggaatttaaactagtccgaccactatggtaaacagtatggggattccttaaagaactaaaagtagaccattcattccagcaatcccattactggctatctacccaaaggaaaagaagttattccataaaaaagacacaagaatatggatgtttatagcagccgattcgcaattgcagtgatatgggaccaacttaagtgcccatcaacgaacgagtggataaagcaaatgtggtacaccatggaataatacttgataataaaaaggaacaaaataatgtcctttgcaacaagttggatggaactggaagccattattctaagtgaagtaactgaggaatggcaaatcaaatattgaatgttttcacttttaaatgagagttaagctatgagaatgcaaaggcataagaatgatataatggacttggggactcagggggaaaggttgggagggggatgaggaataaatgatgacatattgggtatattatacactgctcaggagacagatgcctcaaaatctcagaaattaccactaaggaacttttatccacataaccaaaaaccacatatattccacacactattgaaagaaacataaacattattttaaaaaataaagccacttttaaaattagcaaaataaaataaatatgtcttcagagtttagatattggatccaaattagacagatcaaatactgcctttactaaatattttcatgtcattaacaacttctaaaacctttcaaacagttttttgacatgtcttggaaccatccatttctagctaaggcctgggcacctgtgaaatagggccatgcccccccttatactgggaagagtaagatatttcaagactaagatgttttctacagctccatctttttctttaagctctacatcaaggacataattaaaattggttgtctcctaagtggtttactaaaaatgcatacttaagagttaccattataattaatatttgtatctaaagctacttaaaaattttcacacacaaatctgactgaacaagtaaaatatattttaagtcaaagtttataaaaggacatgagaacatagcttttatgaaaaaattagttttgtcaagtttagaggttttcaaatattttaaattcaggaaataaaataacaaaaagacaaaagaaaatggttgaacaacttagaaaaggtttgttaaaattcatcttataaaacaatctacatgtaaaaagtgggctaaaatttgaaagagattatttaggttttccataaattaatccagaaggggtaggaagtcttaagaatgaggaaggacaggaggaaggggaggtcatcctgacactgcagaggcagaagtgcagctgaaggtatgaaggctaagaggggaggggagtttgagtgctgctgcctggctgtcagagcagaggagggtcctgggcaccagacttgaggaagggatgaaaatgctgggcagacctgtagtgggcccttgagatggcagatagtggtttccagagagagggccattgttttccagtgcccagcactgagcagagagagttttgggcagtgtaaaaaaaaaaagagaacttacctctttctcgttttagaaaaagaacagtctaagaatatcagcagggaaactctcagtgcttcaaggggttaaacgcccttttggctttcttgtgttggtttcatcatagaggaggagaaacttcttggaagtgttcctaaaaacacaacacgtctgcttctcctttcaaaaaaggaagtgctaaaacacgaacactctagatccaaatattaatacggatgtctaaatgcttccgttttccaaggggcagaaagctaaaggttgtaacctattcatttcagtcaaagttggtgaaagggaagcaaaggaactgggtggggcttggaaggatgacgaagctcaagctcattggccagcaacctctctcctgggggcgggaggggtgagcatacgtcattgctttggcttctataaaatgaggaggactcaccgagtgtgaagagtccttctggtgattgcagctgagagcacactcacgacgttctgcaaggattctctgattatgattctgaagggaaaagcgatggaatggacagcagagattgtaattttctttatcttgaattacggaagaaagtatctaggacagaaatccacgacaagtccttggaaccagcagatctcttcgttcacggagacgttgacgtattctctattgaagaagattcttaccttcttactggacaaggttttgtcagttctgcgtgactggattgtccgggagactctgaggaaactgatgtcacatgtttttccaaagaagatgtttctggaaccaacaactgtgattgtggtttgaggacttctgagagttccagtacaggaaataagcagaacatcagctggaggctaaacggatccagacttcactcttcacttcccttcctattcagtctattgtgcctgctgactgagaagcttggctggtatgtgagcaaataaacggaactattcagaaggagatgttgacatattctgtattgaagaagatccttatcttctcacctgacaaggttttgtcagttctgtgtgactggattgtccggaagactctgaggaaactgatgtcacatgtttttccaaagaagatgtttctggaaccaacaactgtgattgtggtttgaggacgcctgggagttccggtatgcgaaataagcagaacatcagctggcggctgaagggatgcagcctccactcttcacttcccttgccattccatctattgtgtctgcctgactgagaagcttggctggtatgtgaggaaataaacggaattataaacaaggagattgtttctcatctacttcattctgttgtggcttttctattttggggttcagggtgtgtgacaaggaccaaggagatgaaaggtttcatgatggagaaagcccaggcaatcagattgaagagctatccacagggaatcttggctgctgaggggctgcaccctgcaacggactgaccatatgacagaaaagggttttaaaggctcaacttctggactgagaacccagagtaatttgggaacctcctctgtgaggagatatgaaagctgggaatcatgacatccctaggaatggaaggcacatttcctgatggaaggggtgctttggaaaacaggagcagagtagacacagcagccttgtggatacgggtgggcagcatgcatgggtgatgtgaacgtggagtgtttgtgatcgaaactcaaaatgtctgacaaagtgaaaacctagaaaccacaatgaggaggaagagtttgtgagggcaatcactctccccatgtgtgaaaatcgggggctcttaaaatctcatctggagaggtgcagtctaccaaactctgggactttagcctccccttttaaaaaaccgtgcatcaataccaacgtccgaaaccacagaaataacacctggcttgcatggagacaaggacaaaaagccgtcatgatgagttgttctgctcacttgctgcctctgttcagtgcacaggatattgtccacccactagcaggctactgcaagagaagtgtgcaatatgttccctatgtgccatatatgtgccatatggcccatatgacaactgagtcagaaaatatctgatgccctcagagttacactccacctggagcttgcccccagccatccaggacctaggctccctaccctgtccaattttctggtgttttgggggcttcattctctaaggtgtgcccactctttactcaaaccaaaacacccacatattcctgcccatgaacaaccaatcaaccacttctcagttccacatcctgctgttgggtctctagtggtgacactgtaactcccaggtcatagtggtgacactataacacctagctaaattgatgccttgtctctaggaggccatgggctcctgcaggtctcatctgactctctgtagccttccctgacaatgctcacaatacccaagccagagccacattgacagcaagctgctctcatcttacctttgccagacctggccactggaaaaggctgaccctcatcctgcaatgcctatacctccaacctttgtctcaagctggtgtcctggagggacttctaagcagaaaacagattcagactcccatcctctcctgaatggcctcatatccaattctcagaccctcagccttcattgtaaggacacttcatccatgcccttgagtattctgtctgcactgtgtattctgcaatagattctcctccctctgcgaccctcaactccttccgcagactttttgttttcttgatcatctaccatagtcttccactgggacactgccaagcccattctggagagtgagttgtgcaagtacactgccccccatctacctttcgggaggtgtatacacccttctttctcccaggtctggaggctttctattttcatcctgaggcatctccacctgctcttggattcttcaaattgacaaccaccagttaacaagaactatgtgtcaccaaatagccaaacaatggcaattacaaaaataaaattaatagctgtaacccccattagcaaggatacacaaatcaaatcagggatagtgggtgaggaagtctgcctaacattcaaggaaggattctgaagtgatacaaaatcattgcctttgctatctttagaatggacactttcagccaggcacagttgctcagcctgtaatcccagcactctgagagccccagttgggtggatcacttgaggccagcagcttgagaccaccctgggcaatgtgcagaaaccccaactctactaaaaatacaaaaatagccagttattgtggcacatgcctgtaatcccaactccttgggaggctgaggcacaagaatcacttgaatctgggagccagagtttgtaatgagcgaagatcatgccactgcactctagcctaggcattagagtgataatctgtctgtggaaaataaaaacattcctcttcaaagttttcttctttaaatcataaatgttggaattaatatatcctctttgaaactcactttcttcaagcttctttatttgatggtagtaaatctttgttaagctttatgaggcaagagtaatggaagaagcatattatatatatttatactctaacctcagtgcttgttctagcaagctcaggcatgcgtgaatgtgcccaggcatgttccagcccataccttatatcctttccttattgggaaatgctgttactcctataagcattcttgtaagcaacttcctctttttctttgtctccactatctttacctattgaggacagttttaggttcttagccagttggatgtagcatagactgtgaggtccaaccccagccaatggagatagcacacagcagtagcgacctcatgcttaacagataaatattcctgtctccctttgtttggggtgctctcagctgatgagcaacaccctttctaaagaaattaaagttgtcttgctgagaaaacttttggtctaaatgctgattcttccttgcagcactgaagaagaagcaattatttccaacactttctcatacacaaaaaaagaagaaggtggaagaaaactttcttgtgcaccctatccctcactcagaaagacaacagaaggctcctagtggcaagccctagaggattcatttcttttgggaaccctcttggctgggatactaggactcaggtcaaactcagcattttcagtgtgtgggaagtgtgcttgggtttcactgttacttccaataatgtgatttggtccttggggttcaccaaattttggtatggagtggtgaaccctgttaagtttaagtgtctataaaattaacaaagcaaaataaccattctgccccatggttcagagaccaaatattgtgtaggaaatgctttagcgagagaaacagagaagaataaaaaatgtcctcaagcgctgcattatttcttgttatcgtccagatcttagaggaaaggctttcattttccctcattcagtatgatattagctgtgcatctgtcatttatggcttttattatgttggggtatgttccctgtgtatgtagttttttcagggtttttgttatgaagtgatgttgaactttatcaaacgtttttcagtttcagttgaaacgatcatatgctttttgtccttcattctcttgatatgatgcatcatgttgatgatttccatatggtgcactgtccttgcatcctgggcatgaattccacttgatcatgacaaatgaatttttaatgcattcttgaattccgtttgctggtattttgttgaggatttttgcatcaatattcatcagagatattggcctgcagtttctttttttttcttttttctttgttttgttgtttgtttgtttgtttgttttgatgtgtctatgtctggttttggtatctgggtagtagtgttccatccccttttattttttagaataatttgaataagactggtgttggttctttaaatatttggtagaattccgaagtgaagtcattgggccccgggcttttctttagtggaaggctgtttattatggcttcaatctcgttacttattattggtctattcatgttttgaatttgttccttatttaatcttggtaggctgtgtgtatctaggaatttgtccatttcttttagattttcaaatttattggcacataattgcccattgtagcctctaatcgtcatttgagttcctgcagtaccaattataatgtctccttcttcatttttgattgtatttatttggatcctgcccctttttttcttacttaggctgcctaataatttcttaattttgttgaactttttcttttgtttgtctcgctctgccaccaggctggagtgtagtggtgtgatcttggctcactggaacctccgtctcccaggttcaagcaattctcctgcctcaccctcccaaatagctgggactacaggcaagtgccaccactcccagctaatttttgtatttttagtagacacgggttttcaccatgttggccaggatggtctcgatctcttgacttcataatccacctgcctcagcctcccaaagtgctgggattacaggcatgagccactgcgcccagcctaattttgtttaaattttcaagaaatcaacttcttctttcattgatttctgtattttttatttccattttatttatttaaactctaagctttattctatcttcttctcattttagctttggtatgcttattgcctctctagctctttaatgtgcattgttagattgtttatttgaagttcttcctctctacaccataagacgtaagcatgtcctcattatgtcataagatgtaaccacttacagctataaacttccttcttagttctgcttttgctgtatctcataggctttgttatgttgtgtttccattatcaattgtgtcagaaatttttcaatatttttcttaatttcttcattgagcaactgatcatttgggagcatatttttaaacttccatgtacttacatagtttccaaaatacctcttgtgatcaatttctagttttattccactatggttcaagaagatgcttgatattatttcaattttttttcacattttaagatgtgttttgtgacctaacatatggtctactttttttttttattaaactttaagttgtggggtacatgtgtagaccgtgcagttttgttacataggtatacacgtgccatggtggtttgctgctcccattaacctgtcatctacattaggtacttctcataatgctatccctcccctaacctccaccctctgacaggacctggtgtgtgatgttcccctccctgtgtccatgtgatctatttttgagaatgatccatgtggattagaatgctgtggaaaagactttggattcctaatatccagggagggagacgatgatattactttcaatatcacacgggtgtacacactctctgtgacattgttcctaatatccagtggaagagaggatgatataacacccagggagggagaggatgatattactcttaatattgcagggtgtgtacccatgcctatgatattgttcctaatatcaggagggggagaggatgatattactcagaatatggcagggggtgtacacacactctgtgacatggttcttaatatacaggggagaatgggacaatattactctcaatatcgcagggggcgtacaaccctgtgatttgttcctaatatacaaaaggggacagtatgatattgttcctaaaatcgcagaaggtgtacaacgccctgtgatattgttcctaatatccagggcgggagaggatgatattacccccaatatcacagggggtgtgcactttccctgttacattgttcctatgatccgagtggggggaaatgacattagtcccaatatcgcaggatgtgtacactactcccccatgatattgttcctaatatcaagggggagagaggaggatattactcccaatatcgcaagggaggtacatcctccatgcaatattgttcgtaatattcaggaggagagaggaagatattactctcaatatcgcagaaagtggacacccaccctgtgatgttcttcataatatccagggaagcagacgattatatgactttcaatatcgctgggagtgtacatcccttttgggatattgtttctaatatccaggaagggagaggattatattacttccagtattgcagccagtgtacacatttcttgtgatattgttcctaatatccagaaagggaaaggatgatattactcccaatattgcaggtggtgtacacccccctctgatattgttccttacatcaaggaaaagaaagaagaatattactcccaatatcgaagagagtgtacacccctcctgtgatattgtatttaatatccatggggaaagaggatgttgttactcccaatatcgcagggggtttacacccacactgtgatattgttcctaaaatccagtgaaggagaaaataatattgctcccaatattgcagggtgtatacaggccctcccccgttatattgctcctaatatccagcggtggagaggatattactttcaatttttgcagggagtgtgtaccccctctctgatatttttctaatatcaaggatgggaaaggatgccattactcccaatatcgcaggaggtgtacatgccctgtgatattgttcctaatatccagggaggtagaggatgatattactttcaatattgcaggggctgtacaccctctatgatgttgttattaatatttaggttgggagaaaatgatatttttcctaatatcctgggaaggaaaggatgatattactgtaaatattccagggagtgtacaccttcctaatattctaatattgttcctaatatccaggggtgggagaggattatattactcccaatatcgcagtgggtgtacacccctcctgtgatgttgtttctaatatccaagcgaggagaaaatgatatcactctcaataccgcagggggtgtacaccttccccatcatatcgttcctaatattcagagggaaagaagatgatgttactttcaatatcgcaggggttgtacacaacccctgtgatatttctcctaatatccaggaagaaagaggatgatattgctcccattatagcagacggtatacgcctccctgtaacattgtttctaatatcaagactgggagaggatgatatcacttccagtatcgcaaggggtgtacacctcccccgtgatattgttactaatatccagggggaagaggataatattactttcaatattgcaggggctgtacacccccgtgatattgttgttaatatttaggttgggagaaaatgatattagtccaaatatcgcagagagtgtacacacttccgataatattgttcttaatatccatgggggagacgatgatattacacccaatatcgcagggggtgtagtctccccttgtgatattgtccctaatattcagggaagtaaacgatgatgttagtgtgaatattccagggagtgtacaccccctttgtgatattgtcctaatatccgcaggagagaagataatattactcccaatatcgcagggggtgaacacaccccctgtgatattgtttctaatatccaagcgaggagaaaataatattactcccaatgtctcaggggatatacaccttccctatgatattgtttctaatattcaggtggaaaacgggtgatattactcctaatatccaggaagaaaggggattatgttactccccttatagcagggggtatacacctcccctgtaatattgttcctaatatcaaggctgggatatacgtggggggaaggatgatattactcccaatatcacaggggttataaaaccttctgtgatattgctcctaataaccatggcggaagaagatgatattactcctaatattgcaggaggtgtacactcccccattatgttgttcctagtatgcagaaaaggagaggatgacattattgccaatatcgcagggtgtgtacaccacccatgatattgttcctaatatttagagggacagaggatgatattactcccaatatcgcagggggtgtacacgcatcccctgtgatattgttcttgaaatcgaggggaaagagaattatatttctctaaatattgcagagggtgtacaccgccccctgtgatattgttcctaatagccgggggcggggggagataattaaattactttcaatatctcagagagtgtacatcccccttgtgacattgttcctaatatccagagcaaaagagaatgatattcctcccagtatcgcaggaagtgtacatttaacctgtaatattgtttctaatatccagggggaagagaatagtaatactcccaatatcgtaggggttgtacaccttttctgtgatattgttgcaaatatttagaagagagagagaatattactcgcaatatcacagggaatgtatacttcccctgtgatattgttctaatatctagaaaaagagaggataatattactcctaatattgcagggggtgtacacccccacttgtgatattgttcctaatataaaggaaggtcgaaaaacaaacggggagcccagggggaaggaaggcaggcgaggaagaggcagcgccggggcgccggagggagcagccgggccgcggaagcgcgagcacgagaccggtcgcggtcgcagtcgcatttttgccgttgtcgcggccgccgccgccgaggcttacccggggatgtctgagcccgcgcctcgcggcccccaagctccacgctgcgcccgctgtcccggcctctaagggccgccacgtccctgcggcgcgcgcaggcagaaagcggcttcgtgccggcggagggggcccgggcgggccgggaaaggctgccccaggccccgcgcctaccccatcaccgcggccggcgccgggccgggaggatgagcggtgtggggctctgaagcatggagggggttttgtacaagtggaccaactatctcacaggttggcagcctcgttggtttgttttagataatggaatcttatcctattatgattcacaagatgatgtttgcaaagggagcaaaggaagcataaagatggcagtttgtgaaattaaaggtgacagctttggaggggaccacccttgattggatacataaattctgttcattcagcagacaacacaagaatggaattaatcattcctggagagcagcatttctacatgaaggcagtgaacgcagctgaaagacagaggtggctggtcgctctggggagctccaaagcatgtttgactgatacaaggactaaaaacgaaaaagaaagaagtgaaaccagtgaatcgctgaaaaccaaaatgtctgaacttcgcctctactgtgacctcttaatgcagcaagttcatacgatacaggaatttgttcaccacgatgagaatcattcatctcctagtgcagagaacatcaatgaagcctcttctctgcttagtgccacgtgtaacacgttcatcacaacgcttgaggaatgtgtgaagatagccaatgccaggtttaaacctgagatgtttcaacggcaccatccggatcccttagtttctcctgtgtcaccttctcctgttcaaatgaggaagcgttctgtcagccaccctggttcttgcaccagggaggagtagccactgtataaaagaaccagtatctgcacttcaccgactctcccagcgacgccgaagaacctactcagatacagattcttgtagtgatattcctcttgaagacccagatagacctgttcactgttcaaaaaatacacttaatggagatttggcatcagcaaccattcctgaagaaagcagacttatggccaaaaaacaatctgaatcagaagatactcttccatccttctcttcctgaagaaactgtagtgtccaactttctctaagtattgctatgcaaaagctgctgtaattgaactattgttatagggagtagttttttcccttaggactctgcactttatagaatattgtaaaacagacaaacaagaaaacaaaccacatacttttgaagcgtgttttatctttatatagtttgtttgcaagagtattttcctaataacttcacagtatgaatgtgcatcttttttttctttttttaacaaatgatggtgtaacattttgacatccataaggacaaatgtagatatttttctaaaaaaccgtgaggggactgacagcttggtcagggtgtattgtagcttataaacatgaaatcttacaaggtttcagtttgacagaagtgtgatatatgtaacttgtgccatggaccaaatggtcactttaccacagctaaaaatgagttatgatagcagcttgatggtgattgcattgtattcctttaatcaaaaaggaaacgcaatattctaagtatctttagcccaaataccatgacatattgagcatctttaaataaccagactgtattgtccttcatatgtgaagttgacactactgatttgtcaataccaaattttgggttaaagtgtttaatttttatttatttattttcttgttgcctcaaaagatgattgcattctaacttttgtgacctaccaaatttaagatgtgtatacattgttctttacgttgttctagaaaagagattttaatgctgtagtgacttagctcacttacatcagagaaataaacaactttcaatggaaaaaaatatatataaaggaaggaagaggatgatattacttctcatatagaaggggttgtacaccccccttgtgatattgttcctaatattcagggagggagaggattatattactcccaatatagcagggagtgtacacccccccccccgtgataatgttcctaatattcagggaagcagaggatgatattactttcaatatcacagggggtgtgctgtccccctgttatattgttcttaatattcaggggggagaggatattattatgcccgatatcacaggagaagtacaccccacaagtgatattgttcctaatatccaggggtaaagaggatgatatcgcaggtggtgtacacccctccccgtgatattgtttctaatataaagaaggagagagcatgatattactcccaatatcgctggaggtctacaccccccttgtgatactgttcctaatatccaggaagggaaacaatgatattgctgtgaatattccagggggtgtacacccctttgtaatattgttcctcatatccagggggtagagaggatgatattactcccaatatcgcagggggtgcacggccccactgtgatattgtttttcatatccaggaggggagaggatgacattactctcaatatggcagggggcgaacaccccctgtgatattgtgctagttaggttgggagaaaatgatattactcccaatatcgcagggggtgtacaccgctcctgtgatattgttcctaatatccatgacgggagaggatattactcccaatatcgcagggggtgtacctctcccctgtgggattgttcacagtatccaaaagggaagaggatgatgttactcccaatatcacagggagtgtacaccaccattgtgatattgttcctaatagccagggaagaaaacgatgatattattgtgaatattacagggggtgtacacaccccctgtgatatggtttttaatatacaggttggaaaaggatgatattactcccaatatcacaaaaggtgtacacacccccccatgatattgttcttaatacttcggtggggagaaaatgatattagtctccatatcacaggggtgtgaactcctccggtgatattgtttttaatatcaagaggggaggagatgatattgctttcaatatcgctgggggtgtacatccctcctgtgatattgttccttatatccaggcgaggggaaaataatattactcccaatagtacacaccccatgtggtattgttcctaatactcagggggaaagaagataatattactttcaatatcacagggtttgtacacctttcctgtggtatagttttcaatatccagggggaaggtacatgatattactcccattgcagcaaggggtgtacacacctcctgtgatattgttcctaatatccagaagtggtgaggatgatattactcccagggggtgtacaccccacctatgatattgtttctaatatccaggggaaaagagtgtgatattatgcccaatatcgcagagggtgtacacttatcctgggatattgtttctagtatttggggagggaggagaggatgctattattctcaatatcgcagaaattgtacacccccgctgtgatattcttcataataatcagggaaaaagaggatgatattactaccaatattgcagggggttacacttcccctttggtagtgttcctaatatccaggaagaaagaggatgatattaatcccattttccaggaagtgtacacccaccgtgtcatgttgttcctaatatccagcagggaagaggatgatattactcccaatatcggagagggtgtacacttcccctgttatattgtttctaatacccagggggaagaaggatgacattactgccaatatcacagggtgtgtaccccaccctgctattgttcctaatattcaaaaggaaagatgaaaatattactcccaatatctcagggtgtgtacacctctcctgtgatatcgttcctaatatccacaggaagagagaatattactctcaatattgcaggggggtgtacacccccctgtgatattgttccaaatattcgggcggggagaggatgatattagtcccaatatcgcagggggtgtgcaccaacctgtgatattgttcctaatatccatgcgggggaggacgatatcactctcaatgtcgcaggaagtgtacacctctcttgttatatttttcttaatatccaggagggaaaagatgatattactgccaatatcgcagggtgtgtccaccccccttttatattgttcctaatatccaatggaaaagaggatgacattgctctccatatcccagaaggtgtacaacgcccctgtaatattgttcctaatattttgggggaagagaggatgatataacttataatatcacaggaggtgtacaccacccctatgtattgttcctaatatcctttaagggagaggatgatattactcccaatatctcaggtggtgcctattccccctgtgatattgtttttaatatccaggggaagagagtatgatattacgcccaatatcgcagggggcatacaccctctctgagatattgttcataatatatagagggagagaggatgatattacttccaatatcagaggtggggtacaccccccggttatattattcttgatatccaggaggggagaggttgatattactggatatatagcagggagtgttcacatcttctgtgatactgttcctaatatccagaaaagtagaggatgatattactcccaatatcgcagaacgtgtacacctccctgtgatattgatcctaacattcaaaggggagaggatgatattactcaaaacatcacagggcatgtacactcccctgtgatattgttcctagtatccagaagggagcaagataatattactttcaatatcgcagggggtgtacacccctctttggtatgtttcctaatatccagaaggaaagagggtgctattactttccatattgcaaggggtgtacacccccctgtggtatggttcataatatccagggagggaaagggtgctattattccccatatcgcgaggcatgtacaccctgctgcggtacggttcctaatatccagggggaaagaggatgctattacttcccatatcgcggggtgtgtacacccccgtgtggtatgttttgtaatctccgggaacgaagagggtgttattacccctcatatcgctggaaatgtacactcccctgtggtacggttcacaatatccaggggattgagggtgctattactccccatatcgcggggggagtgcacctccctgtggtatggttcgaaatatccagggtaagagagggtgctattattccccattttgcaggaggcgtacacccctctatggtatgttttgtaatatcccaggtaaggggtgctattgagagaagagagcaaaagaccccccccatattgttctgtattattttatactcagtacctgttttaagaagaaacaaggaagcgaaaccaaaggcaggcagcccggcgccaggcaccagatccaaaaccagacccgaaaccaggcctgggccttcctgaccttagcctgaaagttaaaattcaacccatgacctagcaactgatgttatccatagattccagacattgtatggaaggacattgtgaaatttcttgttctgttctgtttcactctgagtactggtgcatgcagcccttgtcacatacccactagattgctcaatcaatcatggccctttcatgtaaaaaccttagtgttgtgagcccttaaaaaggacagaaattgtgcactcaacaagcttggattttgatactctagtctgctgatgcttccagctgattaaaagccacttccttcactacctcggtgtctgtgggattttgtccgcggctcctcctgctacactgtgactccccttatagagaggggtgtacacccccctttggttcctaatatccagcgggggagtaggtgctattactccccatattgcggggagtgtacacccccttgtagtacggatcgtaaaatcaaggagggagagaaggtgtaattatccccatatcacagggagtgtacacccctttgtggtatagtttgtaatatccacgacgggagagaatgctattactccccatatcgtggagggtgtacaccgccctgtagtatggttcgtaatatccggaaggggagaggttgctattactccccatatggtgggaagtgtacacccccatgtgatatggttcataatatccaggggggtagaggatgatattacccacaatatcatagaaggtgcacacccttttgtgatattgtccataaaatccagaaggggagaggatgatattacttccaatatcacagggggtgtgtagccccatatgatattgtttgtaatatcaaggtagggagaggatgctattccttacaatagctcaaggggtgtaaccttcttgtgatattgtttgtaatatccagaaggggagaagataatttttttattttaaaagtaaactttaatgtcaaaaatgcaaacttgagaagggcagaaagatcaaacagaaggctgccacttcacaattggagggttgcacagtggccgggcagaggcgctcctcactccccagacggtgaggcagccgggcagaggtgctcctcacttccgagatgttgcaggagccgggcagaggtgctcctcacttcccagaacagggggctgccgggcagaggtgctcctcactgcccagacggtttgcaggcctggcagaggcactcctcacttcccaaacggagcagcggcaagccagaggcgctccacacttcccagatggtggggcagccgggcagaggcgatcctcacttctcagagggtagggcggcccagcagaggcgctcctcacttcccacatggtggggcggcaggctagaggcgatcctcacttcccagacggtggtgtggccatgcagaggtgctcctcacttcccagatggtgtggccgccgagctgaggcactcctcacttccctgacagtggggcggctgggcagaggcgctcctcacttcccagacacttggactccgggcagagactctcctcatttcccagatggtggggctgccgggcagaggcgctcctcacttcccagacggttcagaggccgggcagaggcgctctggggagaggataatgttactcccaatatcgcagggggtgcacactccctgtgatattgttccgaatatccagagggggaaaggatgatatagctcccaaaatcgtggggagtgtacacccccctgtgatcttgtttgtaataccaagaagaaaagagaatgctattatttccaatatagcagggggagtacaaccccctgtgatattgttcgtaatatctagggggagagaaaattatattagtcttaatatctcaggggacgttcatccccctgtaatattgttggtaatattcagaatggagaagatgatattgttcttaaaatacaggaaaaaatatgataatattacttccaatatcgaagggggtgtacactctcctgtgatattgttcccaatatccagaatgaaagaggatgctattactcccaatatcccagggagtgtacacccctttgccatattgttcataatatccaggggaagacaggataacattactcccaatatcaccgggggtgtccacccactagtgatatttattgttcatcatatccagaaaaggagaggatgatattactcccaatattgcaggtggtgtacggtccctgtgatattctttgaaatatctagaaaaggagaggatgatatcactccgagtatcacagggggtgtacacccccctgtgatattgttcgtaatatccaggggagaaaaggatgatataattgccaatatttcaggggatgtgcacctccctgtgatattgtttgtaatatccaggggtggagaggatgatattactcaaaataacgtaaacatcctgtgtgtacatcccctgtgatattgtttataatatccaggggggtagaagatgacattacccccaatatcacagagtgtacacacccctgggatactgttcataatatccaggcgggaaagaatgaactacttccaatatcgcaggatatgtacacccccctgtgatatatttcctaatatttatgtgggtaaggatattacccccaatatcacagaaggtgtacatcctctttgtgatattattcctaacatccaggaaaggagagaatgatattactcccagtatcgcagggggtgtacaccacccctgtgatattgttgctaatatccagggggagaggataatattactcccaaaatcacaggggacgtacactcctcctgagatattgttcctaatattcatggggaaaagaatgctactactccaaatacagcagagggtgtacaccatccccgtgatattgttttttatatccaaagggtgaaaggctgatattactcccaatatcgcagggggtgtacaggccccccatgatatcattcttaatatccagggaggcaaagaatgatgttactcccaatattgcaggctgtatacaccccccgtgatattgttcctaatatccagagtaagagaggatgacattgctcccaatattgcaggggttgcacgcacgccctgtgataatattactcccaatatcaacagtgggtgtacactcctcctgtgatattgtttgttatatctaagaaagaagaggatgatattactgtcaatatcacagaaggtgtacagccccttgtgatgttgtttctaatatccagcggtgagaggatggtattactcgcaatattgtagggggtgtccaacggccctgtgatattgtttctcatattcaaaaaggaaaagaataatataactccaaatatcgcagggtgtgtacacttccctgtgatattgatcctaatatccaggaagagagaggatgatattaatcccaatatcacagggggtgtacatcgcttctgtgatattcttcctaatatccagggggggaggggatgctattactcttaaaatcgcagggaacttacactcccactatgatatttttcctaatatccaggaagggagaaaatgatattactcctaatatcacatatcacaatgggtgtacatctccccgtgatattgtttctaatatcaaggatgggagaaaattatattactctcaatatcgcagggggtgtgcacacctcctgtgatattgttcctagtatccagcggaggagatgatattactttaaatattgtagaaggtgtacaacccccctttgatattgttcctaatatccagggggaaaggagatgatattactcctaatatcgcaggggctgtacaaccctatgtgatattgtttcttctaatatccaggggtggagaagataatattactcctaaaatcgaaggggacatacactccccctgtgatatttttcctaatatccagaaggaaagaggatgatattactcctaatattacaagaaatgtatacctgtcctgtgatattgttcctaatatccagaggggtaaatgattatattactcccaatatcgcaggggtgtacaccttccctgagatattgtttctaatatgcagtggaggagaggatggtattactcccaacatcacaggagatgtaaactccccttgtgatattcttcctaatgttcaggacgaaggagggtaatattactcactgtattgcagcagggggtgtagagccccctgtgatattgtttttaatattcaaggttggagaaaataatattccttccaatatcgcatggggtgtacacccttctttttatatagtttctaatatctggggggagaggatgatattactcccaatatcgcagggggattacacccccactgtgatattgtttttaatatccagggtgggagaggataatattactccaaatatcccagggctatacaccctccgtgtgatattgtttctaatatccagaggaagagaagatgatattactcccaatgtcacagggtgtgtacaggccttctttgatattgttcttaatatccatgagggagaggatgatattactcccaatatcgcaaagactgtacaccctttctgtgatattgcttccaatatccagggagggagaggatattacactcaggatcacagggggtgtacaccccaacctgtgatattgtttctaatatctagggaaaatgagggtgatattactatcaatatcacaggaggtgtacactcccttatgatattgttcctaatatccaggagaatgacaggataatattactcccaatatcgcgggtggtgtctccccccactccgtgatattgttcctaatacccagagggggagagaatcatattactcccaatatcgcaggggatgtacacctacatccggcggagtagaagataatattactcacaatatcgcaagaagtgttcaccttccctgttatattgttgctaatatccagggagtgagaagatgatattactttcaatactgagcgtgtacactacccctgtgatattgtttctcatatccagtagaggagaaaatcatgttactcccaatattgcaggggtgaacacctcctttgtgatatttttcctaatatcaggaaagggagagtatgatattacccttaatattgacaggggtgtacacccccctttgatattgttccaatatccaggggggcagaggataatattattcccaatatcgcagagggtgtacaccccccgtgatattgttcctaatatccagagaaataaaaaatagtattatttccaatatcacagggcgtacattttccctgtaattttgttcctaatatctggggggtggggtggcaggataatattactctcaatattggagagggtgtacacccccctgtgatattgttcctaatattcagggtgggagagaatgatgttactcccaatatctcaggagtcgtatacacccccttgtgatattttttctaatatccaggaggcagaggatgatattgctcccaatatcgcagggggtatacacccgagctgtgatattgtttctaatatgcaatatgggggaaggatgattttactttcaatatcgcagggaatgtacactttccttgtgattttgttcctaatatccaggggtggagaagatgctattactatattactcctcatatcgcaggcggtgtacaactccctgtgatatggttcagaatatccagagtgaaaaaggagggtgacattactcccaatatcgggggggtgtacacccctttgtgatgtggttggtaatatccaggggggcagatgagggtgatatcactccccatatcgtggaaggcgtccacttttttgtgatgtggttctttatatcccgaggggagaaggtgatattactccccatatcgcgaagggcatacacccccctgtgatatagctcataatattccggagagtggaggaagatactatgccctatatcgcgggtggcctacaaccccctatggtttggcttataatatccaggggggagagggtaatattgctccccatattgtggagacgtacagccccctgtgatatggtttgtaatatctttggggggcgagggtgatattactccccatatcgcggggagcatacacccccgtgatctggttcatagtatctcaaaggaagaagttgatgtgtacaacttaagggaaaaagttgaagtgaagtgtacacacgccctgtgacgtggttcataatatccaggcgggggagaggagagtgatatttactccccatatcgcgggtgttgtaaactcccctgtgatatagttcataatatccaggggagagaggagggtgatattgctcctcatatcgcgaagggtgtacaaccccctgtgatatggttcataatatccagaagggtagaggacgatgatattactccacatatcttgggaggtgtgatatggttcgtaatatccagcgatgagagaatgatattactccccatatcgcaaaaggtgtgatagggtttgtaatatcctgagggggagagggtgatattaatccctatattgcagaaggactacaccctcccatgacatggtttgtaatatcccagggggtagagtgtgatattactttccatatcacagggggtgtgatatgattcgtaatattcgaagggggagagggtgacactactctccatatcacggggtgtgtgatatggttcttaatatcccaggggttagaggttgatattaccccctttttggggggtgtgtacaccccctgtgatatggttcgtaatatcccgggggagacagggtgacattattccccatatcgaggggatcgtacaccccctgtggtgtggttcataatatccctagggggagatggtgatattactccccatatcagggggcgtgcactcttctgtggtataattagtaatatccagggggcagaggtcgatattcgtttccatatcatgaagggagtacacttccctgtgatatggttcctaatatccaggggggagagggtgatattattccccatattgcggggggacatacaacccctgtgatatggttcataataaccagaaaagaagagggtgatattaatccccgtattgcagagggcatacaccccccctgtgatatggtttgtaatatctaggggaggaaaaggtgatattactttccatattgctgggtgcagacacccctttatgatatggttcataatatccaagttggagagggtgatattacttcccatatcatgggaggtatacccttccctgtgatatggttcgtaatatccagaaggggagagattgatattactccccatattgtggggggcgtacaccttcctgtgatacggtttgtaatatctaggggatatagtgggtgatattactcaccatatcacgggggttgtaacatggtttgtaatatccaggggaggagagggtaatgttactccccatatctcggggcatgtacaccctcctgtgacatggttcgtaatatccaggtcgggagagggtgatattactcctcatattgccgggggtgtgttatggttcataatatcctggggaaggaggctgctatcactctccacatcttgggggatgtacactctcctgtgatatggttcataatatccagggtgggtgagggtaatattactccccatatcgcgggaagtgtacatacccctgtaatattgtttgtaatagaagagagggtgatattactccccacatcgcgggtggtgcccacccccctgtgatatggtttggaatatccagggggatgaggagggtgatattactccccatatctcggtgggagtacatccctctttgatcaagttcataatatccaaaaggaaacaggagagtgatattactccccatatcgccgggggtgtacacgggagggggagtacacccccggcgatatggtctgtaatatccagggaaggagaggagggtgatattactcaccatatcgcaggtggtctacatttacctgtgaaacagtttgtaatatccagggggggaaatgagaatgattttttttttttgagtctcactgtgtcacccaggttggagtgcagtggcacgatcttggctcactgcaacccccgcctcctggactcaagcaattctcctctcccagcctcctgaatagctgggactacaggcgcaccccacaacgtctggctaatttttgtatttttattagagacggggtttcaccatattggccaggctgatctcgaactcctgaccctgtgatccatccgcctcggcctccaaaagtgctgagattacagatgtgagccaccacgcatggcccaaggagaacgatattactccccatatcccagggggtgtatatccccctgtgatatggttcagaatatccggaaggaaagacagggatattacttcccatatcgcaaggggtgtgacatggttcgtaatatcccatgggggagagggtaatattactcttcgtattgtgaagggcatacactcccctgtgatacagttcataatattccggggagtagaggaagatattatgctccatatcgcgggtggcataagccccctgtggtttggttcataatatccagggaggagagggtaatattactccccatattgtggggacgtacaccctcctgtgatatggtttgtaatatcccagaggggagagagtgatattactccccatattgcagggacatacacccccctgtgatatggttcaaaatgtcttttttttttgaaggactggttctttatttcaaaaagacacttgtcaatattcattatcaaaacagttgcactattgatttctctttctcccaatcggccccaagtagaccacatcaaaggagagtacatattaagccaataagctgtaggatgtacacctaacagacctcctagaaaccttaccagaaaatggggacagggtagggaaagaaactttaaaagatcaacaaactgccagcccacggactgcaggggctgtcacagccagatggggtggccagggtgccacaaacccaaagaagcaaagtttcaaaataatataaaatttaaaaagttttgtacataagctattcaagatttctccagcactgactgatacaaagcacaatgagatggcacttgtagagacagcagcttcaaactcagaaaagggtaatgagatgagtttcacatggctaaatcagtggcaaaaacacaatcttctttctttctttctttctttcaaggaggcaagaaaagcaattaagtgctcacctcaacataaggggaacatgatccattctgtaagcagttgggagggggtagagatggaacaaaattttggtctcagaggtcttgccatcttaatttggtcacttctaatgaaaaaaataaaaaatagaaataacattatccaaaggtatcttaaagctgaaaacttgaacagcacattttttgttgttgttgtttggctaactcctcctggaaccacctttctggcttagctagtactttgtacagagcaatgaggcttcccatagtggagtctccctgggctctgtttggctctcagcaaggcaggcctataccttttcctctcctccatggagagaggaatatgcattaaggtgaaaaatcaccttccaaaagtgagaaagggattcgatcgctgcttcagggctgtggtattatatggaatgttttacaaaaggttgctacaaaacaacaaaagaggtaattacaaaatgtgtacatcacaacatactttttaaagacattatgcattgtgctcacattcccttaaatgttgtttccaaaggtgctcagcctctagcccagctggaatctccgggaagaggcggacagtttggtgaaaaagacacagggaaggagcgggcggcggaaggagggggcggcgaaaggagaaagcagccttccagttaaagatcagccctcaattaaaggtcagcttcgggcaggctggcctcaggcggagtctggttcagagggaggagcagcagcagggtgagactgaggcgttctacatctcattcaggtcaagcagagtctggtccagcatcctttgtgtacagaggtgctcccctttggtgcatttcagtttatcttccaagtcatcaattgtcttttccagcttggctaccgatctctcagcaaactcagcatgggtctccgcctcctttattttatcagtaagaatcttgatctcttcctcatatttgtcttctttttgagagtacttttcttcagcagcactcagacacttcaggttctggtccatcagtctaatctgctcatccatctctcggcaaagggattctgccagctcagctcgttcctctgtgcgttccaagtctccttcaatgatcaccaacttacgagccacctcttcatacttcctatctgcctcttctgcaatgtgcttagcttctctgagttggatttcctggagttccatcttttcttcatcttttaaggcccggttttcaataaccttcttacctctctcactctcatcagcagctttttccgcttcttccagcttttgcagggcagtagccaggtgctcctgagcacggtccagctcctcttcaaccagctggatcccacgttcaaggaggccacctcagcctcagcctgttcccgggcccacctttctccctcaacttctcgctggaggcgctcagctcgctcctctgcatcatctgcctgctgctgcagaacctggatcttgcgcttcaccgcctcgatggtggtgatcccagccatggtgcccacccagctactgctagagctccggttcctgcctcctccgatcggcgttgcagcctcctctcacccttacttccgcctcggttcaaaatatcttaagggaaggagttgatattactccccacatcacgggaagtttacatcccctggtgatatggtttgtaatatcccagggtggatagggtgatattactctccatatcgcgaaggagtactcccccctgtgatatggttcataatatccttggggggagagtgtgatattactccccatatcgcgagggccatatactcctttgtgacatggttcgaaatatcccggtgggggagggggtagagggtaatattactccccatacagcgaagagcatacgcccttctgtggcaaggttagtaatacttcagggaaaagagtgcaatattacttttcatattgcagggaacatacactcccctgtgacatggttcgtaatatcccgggggctgagagggtgatatttctccccatatcaccgggggcctacacctgggtgtgatatggctcataatatacagggagggagagggtgatattactccacataccgagtgaggggttacacaccctcgtgacatgttcgaaataccccaaggaggagacaatgatattactttccctgtcgcgggggctacaccctcccagtgatatggttcacaatatcccggggtggagagggtgatattactccctatatcaccggggggtgtacacttccctgggaaatggtttacagtatccccggggggagagggtactattactccccatatcacgttacatatcagggtacacccccacgtgatatggtttgtaacatcccaggaggaagaaaatgatattactccccatatcgcggtggcatacacccctccccgttaaatggttcataatatcttggggtggagagggtgatattactccccatatcacgtggggcatacaccccactatgatatggttcataatatcccggaggggagagggagatattactctccatgtcgcggggggcatatacacccctgtgatatggtttgtgatatcccgggggcggagagggagatattactctccatatcgtggggtcgtacacttttctgtgatatgattcgtaatatccagacggggagagggtgatattacttcccatattgcgggggcgtacacccctctgtgatatggttcataatatcccgaagaaaagagggtgatattactcctcatatcgcggggaacacacaccaccctgtgatatggtttgtaatattcagcgggggagagagtaatattactccctgtatctcggatggcgtacactcccctgtgatatggttcataatatccagaagaaaagagggtgatattactccccatattccagggaatgtacaccaccctttgaatatggttcgtaatatccaggaggggagagggtaatattgctcccaatatcgaaggaggtgttatacggttagtaatatccagagaaggagagggtgacattactccccacatcgtggtgggtgtgcacccacctgtgatatggttcataatattcaggttaagagaggtgatattgctttccatatcgccaagggtgtacactcccgtgaaatacagttcgtaatatccaaaaggggagagggtgatattactcccatatcgtggggggtgtacacccctctgtgatatggttcataatatccagggtggaataaggtggtattactccctgtatctcggggcatgtacatcgcctgtgatatgattcataatatccagaagaagagagggtgatattaatctccatattgctgggggtgtacaaccccctgttgtatggtttgttacactgagttggggagagggttacattactctcaatatcgagtggggcatacacacttatgtgatatggttcataatatcccagggaggagagggtgatattactccccatatcgcgggaggcatacaccccaatgtgatatggtttgtaatatctacatttttttttttgagacgaagtctcgctcttgtcccccaggctggagtatgatggccggatctcggctcactgcaacctcagcctcccgggttcaagcgattctcctgccttggtcccccaagaagttgggattacaggcgcacaccaccacgcccggctactttttgtatttttagtagagaaggggtttcaccatgttggccaggctggtctagaactcctgacctcagatgatccacctgcctcggcctcccaaagtgctgggattacaggcgtgagccactgcacctggcctggtttgtaatatctatgaagggggaaggtgatattactttccatatcacgggaggcgtacaccacgatgtgatatggtttgtaatatccagggggtatactgggtgatattactccccatatcgcggggagtgtatacccttttgtgatatggttcctaatattaagctgaggagaaggtaatattactccccatatcgcaggggtttttatatggttcataatattcaggaagagagagggtgacattactctccatatcacggggtgtgtactcccccatgtgatatggtttgtaatatccagggaaggagaggttaatattactccccatatcgcagggggtgtacacctctctgtggtttgtaatatccaaagggaagaggatgatattatcttcaatatcttggggggatacagtccccagtgatattgttcataatatccagagggggaggggatgatattactcccaatattgcaggtggtgtacaaccccctgtgatattctttataatatagagggggatgatgatattactcccaatatagtaaacaacctgtgtgtacaccccctgtgatattgtttataatatccaagggtggaaaggatgatattactcctcatatcgcagggggtgtatacccctctgtgacattgttcctaatattcaggggaggagaagatgatactactcctcatatcacaggggatgtacacccccctgtgatacttttggtaatatccaggggaggagaaaattatattattccccatgtcacagagggtgtacaccccgctgtgatagtgttcataatatccaggtgaaaagaggatgatattactccgaatatctcaggaagtgtacacccttctgtgatattgttcataatatccaaaggtggagaggaggatactactccccatatcgcagtgggtgtacacccccctgtgatatggttcataatatccaatgtaggagaggatgatattactttccatatcgcggagagtgtacatccccctgttatattgtttgtaatattcagggagaaagaggatactactactccccatatcacacggggtgtatattcccctgtgatatggttcctgatatccaagagatattataatcctctcttggattatgctacctctcatatcgcatggggtgtacacacactttgtgatatcgtttgtcatatccaaggagggagaggattatattaatcccaagatcacggggggtgtacaccctcctgtgatattgtttgtaatattaaggggggagaggataatattactcccaatataattaacaccctgtgtgtactcctccttgtaatattgttcataatatccaatgggggagacgatgatattactttcaatatcgcagaggatgtacatccctttgtaacaatgtttgtaatataaaaggcaagagaggatgatactacttccaaaattgcaggacatgtacaccccccggtgatattgttcctaatatccagtggggaagaggatgatagtagtcccaatatcgcaaagggtgtacacaccccctgggatattgttcctaatataaaaggaggagaggatgctattattcccaatatcacagaaggtgtaaaatcccctgtgatattgttcgtaatattcaggaggggagaggattatattactcccaatatcacagggtgtgtacacagggaggggcaagggccagaagcgggcgggaatccccatgtttgggcggacccagtttctaatggccagcatttgccaatcaaagcttaccagagaactctaaaagccagggctttcctgctagacaagactcatttctggaactgctttaaaaagaaacaaaacttcccaaggaccccttttcctctctgtctgcctaaaataatgttttaaaaactcctaaagcagctgaattcagcccccttcctgggggaatgtatagacggaactcccacctttcccggcatcccaaggccagagtatgtgaaactcctgggtctctatgtgtgtctgagcggctgctctgccaacactccacacagccctgtgtcctggacccaaggcccttatgacctgagctcaagaggggatctcctgatccatgggttgcaaagatccatgggagaagcatggtttctggggcggggtcacacgctcagtcactgtttccctcggatgccggagatggttcctttggctctctgccaatacagggtgaatcatcatccatccctcttttctttgttctcccgggtcaagttgtttgcctagtcagtcccaatgtgagaacctgaatatttcagttgacgcgctgacttcaaaatccccgggcttcgggaggcggagcttgcagtgagccgagatcccgccactgcactccagcctgggcgacagagcgagactccgtctcaaaaaaaaaaaaaaaaaaaaaaaaaaaaaagtccccgggcttttcttttcactcagtggaaggcagctgcttctaattggccatcttggcccgcccccaccacgtgaccttctgtaaaatgcctccactctccaggaacgctctcattatataactttgcctgaaaccaacagcacgctcattgcacatatcatgggctcatttatttcacttataaagaacctggccaaggaagagatagtgcctaaagtggccagtattctgaccgatatgttagaaaaatggtgtgccgaccaattcatgacatgtgtcccaaaactagcaacggaaattgtattcgccgtgttgaggtctctaatccagatgatgctcatctatgtactggaaaaggcagagtcctttcctgacaagctgctgaaactcttcagaaacatctcatatttcctgaagaagatgatgtctggacaagcagcacaggtcgttcagatttaactttctattcatatatccagcacgatattcgcacaattgtcacgaaaccttaccagttgatgagtcctgcacatttcctttaatttcaggaggaagagggtaatccggatgagttttctgacctactctgctgctgtgattaaacaaccaccaggaaattttgacgacactgttctcctgagctcctccctttcctccgggaacaaaacaattgaatttacaaaaataaagtgttatttgactggagtgaggtctcatgtctgcttatgcggtggctcgctgctcagaacagggtgagtctctgggttgtgtgctgaggaggggaggctctcaatctggagaaaacccactgcaggggacacctccatggggtctgagggactgaggatgaggagccggactgggtctagggaaggaggaggtttcagagggtgaaattctggcactaaagcctgggggtgtttgggaacttcctccttccgaagaagtttcagggagggataaagacaaaccctgggctccttgaggggcccttactaatttgagaggactctatcgggaaggagagtgacaatggcctccttgaggactgaggcccctgaataaatgaggcccagatacagtccatgggggatgagaccttcaagggtcacattttggttgggacagaggaaaagtgcagctctgcagccgcagaggaaaacccggcagtgtgaaagcgaccttggaggggccctgtgcgctctgaatgcgtctgagcccccatcccctgtccccgcctctctttctggattcttccagctcggctgtctccgccatcttctgagcgctccaccctgacttattcaagtttcccttctgccttccaagtactccaaaatctttcagatctgtgtccctacccctgtttttagcatgtgttggggctccaggtccctgaaggtttctggcctgaaatccacctccccagcggagtggactgcgttctagagactccacactccgcgaggttcccaggcccctgagggacaaccgagtggcctgcgcacttcagggctccacactcggcaaggtctttcaagcccttggggtccccttcttagttttttccacctttctgggctgcagtcactccataaatgctgggatctgatccccacccccactctcgtttcctcaattctgcgggctacacgctctggcaaggtcctccgggccctggatcccctccctctccctatgcccacgctcctagtcagcccttctggggtccactattttcaggaactaaccgttctcatggagccttgctaaccggaaagctgtgtggaagaaaggctttgaggatagaggtggagatttggctcttccatagtgccactcacccaccccaccatgctgccactgccagacccggacccctgtttcagaacaagtgaccagattcgctcctggacagccctggacactggccttttctctgaaaactactcaccctttctctagtccccacttcatgccagcctcataccctcttccttcccccacgctggcttccgggatcctcctctgctcagacaacctcttctgtgtcccacccccgtttttagaatgctttggggcaccaggttgggggaaggtttctggcctgatatccatctctttccaaactcccttcttcccttgaaaggcttcttgccttcagccccacttctggctccgaggtttcaggacaccctcctcttcatcctcattcttttgaccaccagctttttaggaattcgaacgtccctctcatcttcgtgaatcctgtccaggcatttgttgaccccttcatctgatacccctgacctcacattgccaaaagtctacccctacccagtacactggaattagacaaaatcccaggagttttacctcaactctgagtgtgcccacaggagctctccctgaagccacgtccttttaagcagggtctagggttcctcccttgtcttaatgaactctttgtcacacggaggacgttatggagcccttatgatctttcactgcctttctgcccagcgttttgtctttccatggacatttataatattttccatggacattttgttctctcaatgtccacccctaatttccaacatcccaaagattctcatgtgtttcctgaaagccatttacaggaatggctgtgcccagacccccttccccaggatcctccttcacacctggtaggtgcctctcctagagagatttgcactcagttgtcgtgcagtcacatggcccagatggttgttaatcacccccttcctggcaacagctagcagccagggaatcactggcacagaaacctcagggtgaccaagatgaggccacctctgtgctgaaggctgtgctccagagcctgcttgggatcaggcttaagcaggtcttcagccagacctgatgttacctggtttccttgagctgccctgcctgagctatcgggagcactccctcaatgcacatcttgattccctatctcatgctctgcttctagaaaccatgagctatcaattgctactggcaatggtcctgggaagtcaaccctaagtatggattctggggttggatgactccccacaggacttcagtgagcaacaatcactgctggcagttggaggacagagtcgctagggcatgtgaccactgtgaaaccaccgatgtttcacctggggtaattttggatgaactacggtagaagcactgaaggtacattgcttttggtttggaagattgtaggtaaataatagcgatatgaatgtggaattggatggctgcaaacgagtgccattgatgcattgaaagaggaaaagtcaggctgtcacctgtcactcagcaatttaaagtgtgagagttgggactagatgtggtggctcacatctataatccagagattcgggggaagcttgaagaggtaggatcttttgagtccaggagttccagaccagcctggacaccagagcaagacctcatctctacaacaaaattttcttaaaaattagatgggcttggtggcacgcacctgtacttgtagatctagctaatggggagcatgagataaaaaaatcacctgagtcagggacttaggggttacaatgaggtatgattgtgccagtgcacacactcccacctggccaacagagtgagattctgcttccaaaaaaataagaaataaatcaggtttgagagttggaaagcatcatcttctcctagagccaaaggacatgtacaactgagacccaggaacaaagcttcatcacaaagagaccatcatcagtggagccgggagatgcattccccctcaccctgccttgaggaggcagtggagtcatctgtctgggatcctttctgacccagccctatttgtttgtctctttggcttctttggatttgtatattttagctgttataacactgtaaaacaaacagagtgatttttttgagttgtgtgaatgatgctagctccatagtcaccctgagagtgatgggaacttttgaatttgtggcaagttggagggtagtgtaagtgacctgagattgccaaattggggctagcactggatgtgaggttaggctagtggaaaaatatgcccagaaccagaggagtgtgggctcactgcaggtggttaggctcagatccaaattgtacagatggatagctttggggtaaagaataacatagttgagaagtgcatgtgttagtctgttcatgcactgctataaagaattacctgagactgggtaattatttataaaactcaggtttaattgggtcatggttccacaggctgtacaaaaagtatgatgctggccatcagctcaacttctggggaggccccagaatagttagagtcatggcaaaaagtacaagggaagcaggctcatcttccacggccagagctggagcaagtggtaggagaggtgatacacactttcaaacaagtaggtcttttgagaactccatcaccggacagcacctatgggatggtgctaaattattcatgaaatatccgcctccataatccactcaactgtcaccagcgcagccagccccacctccaacagtggggattacaattccatatgaggtgtgggtggggacacagctccaacctcaatcagtgggcatcctggattgggtctactatagaaggagaaccaggagctgactatgatcttgaaccctacccatgatggccgggcggggtgactcatgcctgtaaccccagcactttgggaggctgaggtgggtggatcgcctgaagtcaggagttagagaccagcctggccaacatggtgaaaacctgtctctactaaaaatacaaaaaattagaccggcgttgtgctggatgcctgtaatcacaccactacgctccagcatgggaaaaaataccaaaacttcgtctcaaaaaaaaaaaaaaaaaaaaaaaaaaaaagactgcccatgaccactgcaccagtgagagggacaccagcatcactgagatgcaagggctggacattcttcataggtcagagctcaaagcaggggacactgatacagagatgggctccatccatagcaccaaagtggtgagaggatgtgggaatggcagaggccagcactttgccatcaatgcaagggggtataaggaggtgacaccagtgccagagtacatcacggggggactgccctacaatatctaggacttacctcttagagcgtgtttcattagcgacaacagatataaatggcagacaggtgtgtccctgcattaacaggaaatagaaatcatcaagaggaacagaaggcagatgtcagcagccccttagaaagtcatcatccttcatacagttaaaatctgagacagttctcacacgagaaggcctaactcaaaaagaggctgggttctcatgaggcaggtttatgcaaaaccaaggaaggtgtacaagtttggaattctccagtttcccttggaaaagacctacagtcatttgcttaggtaactgagcactgaacaaaggtgagtattgttgtcttttagaagctcttggccaagaaggccttgttggcataaaacccatggtttggaaacatcaccatgacccctgttagagtaatggcctaagggtgggggtcaggaaattgatgtattccttgccaacttctgcctctaagtgagtgaactctgtttgtgaacctctctcctctgtggttatgttcctaggctctcatgtataatcaggagtcatagacttagaaacaggaaaaatacttacagtgtttttgtggcctgtgagctatgacttataattttaggaaaaaaacaattgcaaatggaaagcctaagtctatcaatgctcatccaagacaacataatcaataaaaaccaatatcaaatctcaaggcaaattatttcctgtatatagatggcagagatgagcaccaccatcaaaaactcaaggaccagtgctgtgggtccagtcatctgtttcatggaattcaccagtctggtatcttcaaaatccagaaggatgatggcagatggcaggaaagtaatgcaaacgtcatcaggtgtgaccccactgtagcagctgtgatggatgttttctctcaccatagcaataaataacacaacctcggtcacactgtatgcattgttggtctgcaaaatccatgttttgcaaaactcttcaggaaggtggatctgtaatattggcattgacatgagaacaacagcagtatttattcacaatctcaagctctctgtcttcccgtctctctcattagccatccaagtagtcctgaggaaccaagcccatcagaacattctgcaacataatacacagctccattctccattcaaattttgttgttgttgttgttgttgatgagacaacatcttactccatcagccaggctgacgtacagtggggctatctgggctgactgtagtcttgagcttccaggctcaaggcatcctctcacctcagcctcctaagtggcttgaactacagacacacagcgacatgctgggctagtttttgtatattttgtagagacgtgctctcaccatgttattcaggctggactcaaactcctgagcgtaagtgatccaagcaccttggcctcaaagtgctgagattacaagcctgagccactgcacccagcccaatctccattctactgataacaatgtcattaccaggtctgatggacaggaaatggtaaggtttctgaaaacctaaggatcacacagcgagttccaaaggctgaaagtgcatacctgtcgacactgataccaatgacatccaatggtgagaatgacattccttgtagtcctagctctgctcataacaaatctatactgaagtgtaagagtttgatggtcatggggattttccatgtctctgcctttcagcgatgtgccatatctgtgaagtgttcagaaatgcaacagcctgaggcatgctgggcatatcctctaataaaaaggaaaatgccattttatggtcctgtatttctacaagttggaacacatgggcctgtgatccagatgggggaaatgggaatattcccactcattcaccttcatccacgaagcccatttgaaagctttgggcttcccatccttgtagattttagtgttgtgggctgggtgcagtggctttcacctgtactgccaacactttgggaggcctagacaggtgaatccactgaggccaaaagttcgagaccagcctggccaagatggtgaaaccccgtccctactaaaaatacaaaaattagcaaggtattggggccagcacctgtaatcccagctgctcgggaggctgaggctggagaatcgcttgaacccaaaaggcagagactgcagtgacccgatcctgcctttgcactccacctgggcaagcagaacaaaacttctgtcttgaaaaaaaaaacaaaaaacgaacaaaaaagatgttagagttctgggtttagaggtctataccccagaaagagaatggtttcaacaagggacaaagaagttgctttaaacgttgacttgccatttcttttcagtgtgtttgttctcttgcgtcaagagaccaccagaaaagtggtgcaattactctcctgtcaagaatcattgactatcatctgcaagagggtcagatcctggtatataattagggcagaaatacttagtctgagaagggtatgacatccagaggccctattaatgatgtccttttctccatgcctgactctgaccccatgtgctggactgcccctgtgtggatggcctcatggcctgctcggactctgaggtcccaccccaagtggcacctccatggagggctctactcttgtatgggctctgacactcacactgagacactctcccatggacacctcttcacccacttggggtctgaaactgggctactccatccctccctaacctggaacagagagctttcactgctattacacaagtcatagaggctaactcctcatttttccaagctaattattgaaacattagtcctgggttgataagacaagataagttaacttttcataaatttgcttatcaagttttgaataaattcaaataaattcaccttccccacacaccttagttgtcgacatcacacgcgcacccatactcacagggtgagcacgaaggcttcactgtcagtggagaaagtggcaaaacccttctgtgcctcatcctggtctagacctggccctcatcctttcccactcttcccctcactcccttggattcatccacactggcctcctgcctgctgctccacctccctgcgaagctcacccctgcctcagggcctttgcacgtgcagtggcttcaagccatatcctcttcacccagatctcccagatctcctgaatgatcttcttttatcattcaggtctcagcttgcatgtaatcttctcagtgaggattacccaaaccacatagttcattcattcattcaaatattcattcaatggcatattgacaaagcagctacttcatgccaggccttgggccaggtgttatggatatggcaacaaacaaaacaagagttttctgctctcaaatttttacccacttaaaggagatatcatacatcatctgtaaataaatacatcatctgtaaataatgatgtaaataaatacatcatctgtaaatctgtaaataatgatgtaaataaatacatcatctgtaaataaataaagtataataaaagaaaatagtaggtttttttggttggaggtgaccgtgaagtttgcaaataccatcttacaacacattattttattttatttcatttcatttttaattttattattattatactttaagttttagggtacatgtgcacaacgtgcagatttgttacatatgtatacatgtgtgaagttggtgtgctgcacccattaactcgtcatttagcattaggtatatctcctaatgctatccttcccccctcccccaccccacaacagtccccggtgtgtgatgttccccttcctgtgtccatgtgttctcattgttcagttcccccctatgagtgagaacatgcggtatttggttttttgtccttgtgatagtttgctgagaatgatggtttccagcttcatccatgtccctacaaaggacacgaactcatcattttttatggctgcatagtattccatggtgtatatgtgccacattttcttcatccagtctatcattgttggatatttgggttggttccaagtctttgctattgtgaagagtgccgcaataaacatacgtgtgcgtgtgtctttatagcagcatgatttataatcctttgggtatatacccagtaatgggatggctgggtcaaatggtatttctagctctagatcactgaggaatcgccacactgacttccacagtggttgaactagtttacagtcccaccaacagtgtaaaagtgttcctatttctccacatcctctccagcacctgttgtttcctgactttttaatgatcgccattctaactggtgtgagatggtatctcactgtggctttgatttgcatttctctgatggccagtgatgatgagcatttcttcatgtgttttttggctgcataaatgtcttcttttgagaaatgtctgttcatatccttcacccactttttgatggggttgtttgtttttttcttgtaaatttgtttgagttcattgtagattctggatattagccctttgtcagatgagtaggttgtgaaaattttctcccattctgcaggttacctgttcactctgatggtagtttcttttgctgtgcagaagctctttagtttaattagatcccatttgtcaattttggcttttgttgccattgcttttggtgttttagacatgaagtccttgcccgtgcctatgacctgaatggaaatgcctgggttttcttctagggtttttatggtttgaggtctaacatgtaagtctttaatccatcttgaattaatttttgtataaggtgtaaggaagggatccagtttcacctttctacatatggctagcctgttttcccagaaccatttattaaatagggaatcctttccccacttcttgtttttgtcaggtgtgtcaaagatcagatagttgtagatatgtgacattatttctgaggactctgttctgttgcattggtctatatctctgttttggtaccagtaccatgctgttttggttactgtagccttgtagtatagtttgaagtcaggtagcatgatgcctccagctttgctcttttggcttaggattgactttgcaatgcggggtcttttttggttccatgtgaactttaaagtagttttttccaattctgtgaagaaagtcattggtagcttgatggggatggcattgaatctataaattaccttgggcagtatggccattttcacgatattgattcttcctacccatgagcatggaatgttcttccatttgtttgtatcctcttttatttcattgagcagtggttttagttctccttgaagaggtccttcacatcccttgtaagttgggttcctaggtattttattccctttgaagcaattgtgaatgggagttcactcatgatttggctctctgtttgtctgttattggtgtataagaatgcttgtgatttttgtacattgattttgtatcctgagactttgctgaagttgcttatcagcttaaggagattttgggctgagacaatgggttttctagatatacaatcatgtcgtctgcaaacagggacaatttgacttcctcttttcctaattgaataccctttatttccttctcctgcctaattgccctggccagaacttccaacactatgttgaataggagtggtgagagagggcatccctgtcttgtgccagttttcaaagggaatgcttccagtttttgcccattcagtatgatattggctgtgggtttgtcatagatagctcttattattttgagatatgtcccatcaatacctaattattgagagttttcagcatgaagggttgttgaattttgtcaaaggccttttctgcatctattgagataatcatgtggtttttgtctttgggtctgtttatatgctggattacatttattgatttgcatatattgaaccagccttgcatcccagggatgaagcccacttgatcatggtggataagctttttgatgtgctgctggattcggtttgccagtattttactgaggacttttgcatcaatgttcatcaaggatattggtctaaaattctcttttttggttgtgtctctgcctggctttggtatcaggatgatgctggcctcataaaatgagttagggaggattccctctttttctattgattggaatagtttcaggaggaatggtaccagttcctccttgtacctctggtagaattgggctgtgaatccatctggtcctggactgtttttggttggtaagctattgattattgccacaatttcagatcctgttattgctctattcagagattcaacttcttcctggtttagtcttgggaaggtgtatgtgtccaggaatttatccatttcttctagattttctagtttatttgcgtagaggtgtttgtagtattctctgatggtagtttgtatttctgtgggatcagtggtgatatcacctttatcattttttattgcatctatttgattcttctctctttttttctttattagtcttgctaccggtctatcaattttgttgatccttttaaaaaaccagctcctggattcattaattttttgaagggttttttgtgtctctatttccttcagttctgctctgattttagttatttcttgccttctgctagcttttgaatgtgtttgctcttgcttttctagttcttttaattgtgatgttagggtgtcaattttggatctttcctgctttctcttgtgggcatttagtgttataaatttccctctacacactgctttgaatgtgtcccagagattgtggtatgttgtgtcttttttctcgttggtttcaaagaacatctttatttctgccttcattttgttatgtacccagtagtcattcaggagcaggttgttcagtttccatgtagttgagcggttttgagtgagtttcttaatcctgagttctagtttgattgcactgtggtctgagagacagtttgttataatttctgttcttttacatttgctgaggagagctttacttccaagtatgtggtcaattttggaataggtgtggtgtgatgctgaaaaaaatgtatattctgttgatttggggtggagagttctgtagatgtctattaggtccgcttggtgcagagctgagttcaaatcctgggtatccttgttaactttctgtctcattgatctgtctaatgttgacagtggggtgttaaagtctcccattattattgtgtgggagtctaagtctctttgtaggtcactcaggacttgctttatgaatctgggtgctcctgtattgggtgcatatatatttaggatagttagctcttcttgttgaattgatccctttaccattatgtaatggccttttttgtctcttacgatatttgttggtttaaagcctgttttatcagagactaggattgcaacacctgcctttttttgttttccattttcttggtagatcttcctccatccctttattttgagcttatgtgtgtctctgcacgtgagatgggtttcctgaatacagcacactgatgggtcttgactctttatccaatttgccagtctgtgtcttttaattggagcatttagcccatttacatttaaggttaatattgttatgtgtgaatttgatcctgtcgttatgatgttagctggttattttgctcattggttgatgcggtttcttcctagccttgatggtctttacaatttggcatgtttttgcagtggctggtactgactgttcctttccatgtttagcgcttccttcaggagctcttttagggcaggtctggtggtgacaaaatccctcagcatttgcttgtctgtaaaggattttatttctccttcacttatgaagcttagtttggctggatatgaaattctgggttgaaaattcttttctttaagaatgttgaatattggcccccactgtcttctggcttctagagtttctgccaagagatcagccgttagtctgatgggcttccctttgtgggtaacccgacctttctctctggctgcccttaacattttttccttcatttcaactttggtgaatctgacaattatgtgtcttggagttgctcttcttgaggagtatctttgtggcattctctgtatttcctgaatttgaatgttggcctgccttgctaggttgcagaagttctcctgggtaatatcctgaagagtgttttccagcttggttccattctccccatcactttcaggtacactaatcaaacgtagatttaatcttttcacatagttccatatttcttggaggctttgtttgtttctttttactctctttcctctaaacttctcttctcacttcatttcattaatttgatcttcattcacttatatactttcttccacttcatcaaatcggctactgaaggtattgcatgcatcatgtagttctcatgccatggttttcagctctatcaggtcatttaaggtcttctgtacattgttttctctacttagccattcgtctaatcttttttcaaggtttttagcttccttgtgatgggtttgaacatcccctttagctcagagatgtttgttattactgaccttctgaagcctgcttctgtcaacttgtcaaagtcattctccatccagctttgttccattgctggtgaggagctgcgatcctttggaggagaagaggtgctctggtttatagaattttcagcttttctgctctggtttctccccatctttgtggttttatctacctttggtctttgataatggtgacctagagatggggttttggtgtggatgtcctttttgttgatgttgatgctgttcctttctgtttgttagttttccttcgaacagtcaggttcctcagctgcaggtctgttggagtttgccggaggtccactccagaccctgtttgcctgggtatcaccagcggaggctgcagaatagcaaatattgcacaacagcaaatattgctgcctgatccttcctctggaagcttcgtctcaaaggggtgcctggctgtatgaggtgtcagttggcccctactgggaggtgtctcccagttaggctagatgggggttagggacccacttgagaaggcagcctgtccattcacagagctcaaacactatgctaggagagccactgctctcttcagtgctgtcagatggggatgtttaagtctgcagaaatttctgctgccttttattcagctatgccctgcccctacagatggagtctacagaggcaggcaggcctcattgagctgcggtgggctcctcccagttcgagcttccagaccactttgtttacctactgaagcctcagaaatggtgaacacccctcccccacccagtctgccgccttgcagttccatctcagactgctgtgctagcagtgagcgaggctccatgggcgtgggacccactgagccaggcacaggatataatctcctggtgtgccatttgctaagaccattggaaaagcacagtattaaggtgggagtgtcccaattttcccagtacagtctgtcacgggttccctcatctaggaaaggtaaatcccctaaccccttgtgcttcccggtgacgcaatgccccaccctgcttcagctagccctccatgggctgcatccactgtccaaccagcccaatgagatgaacaaggtacctcagttggaaatgcagaaatcacccatcttctgtgtggatcaggctgggagctgcagaccggagttgctcctattcggccatcttggaatggcaatctatgtttgctttttacatttgaaaaaactggtgtcacgtacctaggtattaatcattgtggtatcctcttgccgatttacctctttatcattaactagtgaccctccttgtcttttgttgttacagtctgtgattttagtctattttatctaatatgagaatagctactctggcacttttttggtttccagcttcatgaaatatccttttccatttccctgttttcatttccctttcggtgtctctatagatgaagttgatttctttaaggcaccataagttgggtcttatttctttatccatttgaccatttagagaatttagaacactgtcagtgttattattcataagtaaaaacttaagagtgggtgtagtggtgtacatctgtatttcctgcactttgagagactgaggcgagctgatctcctggggtcaggagtttgagaccggcctggtcaacatgatgaaaccctgtctctactaaaaatacaaaaattagccaagcatgctggcatgtgcctgtaatccaatttacttgggaggctgaggcaggagaagcttgaacctgggagacaaatgttgcagtgagctgagatcacacagagaagtcatctccactctcctcatcagaacctcttgttcacagcatttgtgagcacaaatcaatgatggttattctttcctactaattagggatattttattacacagcaatagcctccagcaaagggaaccatcatacatgattcctacaagttgacagggctggaattatcactgaaaaactaaggtggctatacttgattcccaatgtccaatttttcatgaatagagaaatttatcctttttccccccagccagaaaccaagttttgctcttacgcccaggctggaatcaagtggcacaatctcagctcactgcaacctctgccccccagcttcaagaaattcaccttttgaacaaggagatattaaggatacactatgtgtatgctaccggtggttgcaggagactcagaaaagagagaaacagtcactggcctcgtgcaactgatattctcgggaggagagaaaggcaatcaagaaagaaacatgctgtatttcagacagctgtaagtcctccacaagaaaagaaagcaggtgaggaacataggaaatgtgtcaaccataaggttcccgctaattctataagttggtcagggatatcctccaagaataagcagcatctgagcaatcacctgaagggaggaaggaaggaagactgtgagtggtggcttacacctgtaatcccagcactttgggaggccaaggagggcagattgcctgagctcaggagttcacgaccactcagagcaacctgttgatacccaatctctactaaaaacacacaaaaaaattacccgggtgtggtggcacgcacctgtagtcccagcttccatgcccagctgatttctctctctccatatatatatatatatacacatatattgtttttgcagagatagggtctcactgtgtcacccagtcatcaagcaattctcttatactgttttggaaaagcatgggaattacaggtgtgaaataccctgctggtcctgaaaaatgtgatatttgggattctctgcctggcttgttttacccaaaataatgacctccagttccttccaggttgctgcaaaagacatgattttcactgttttataactgaatagtattcctgtatgtatacataccacattttctttatttattcttctgttgattgacatgtagggtgattccatgtctttgctactgtaaataatgctgcagcaaatatttgtgtgcattttgatctattcctttgagtaggtacccagtactgcaactgcaggactgagtagttgttatattttttgttctttcagaaatctccatagtgtttgccataaaatctgcactaatttacattcccaacaacaatgcataagatttccccttttctccacattctcactaacatttgttatgtttttgtctttttcataatacccattctgactggagtaagatatctcattgtggtggttgttgatatttttgagacggggtctcactctgttgccagactggagtgcagtggtgtgatcgtggcttgctgcaacctccacctcccgggttcaagcaattctcctgcctcagcctcccgagtagctgggactacaggcgcgtgccaacaggcctggctcattttttgtatttttagtaaagacagggtttcaccatgttggccaggatgatcacagtctcttgagctcatcatacacctgcctcagcctcccaaagtgttggaattacagtcatgaggcagcgcacccaacctcaatgtggttttaatgaccatttctctgacgattcatggtgtggagaatttctttgaaataccttttggccatttatatgtgctcttttaaaaactgactcctgtccaggtgcggttgagcatgcctgtaaccccagaacttcgggaggctgaggccaatggatcacttgaggcaaagaggcagaaatcagcctggccaacaaggcaaaaccccatctttactaaaaatacaaaaaatcagccacgggctgtgactcgtgcctgtggtgcaagttactcaggaggttaaggcacaggaattgcttgaacccggtaggcacaggtcacagtgagccaagatcatggcactgcactacagcatgggtaatagagaaagacctgtctcataaaaacaaatgaataaataaataagataaaaaataaaaaagtctctttatgtcctttgccgactttttaatgggattctttggagttttctgttgtagttgagatctttgtttactctcggtattagtcttttgtcaaaggaaaagtttacaaataatttcttccgttctgcagtttgtctgctcactctgttgagaggattatttctttggctgtgcagcagctttttgtttcagtaaagcttttgaatttatataattaaaattttcagtttggtttaaatttgcactggtcgatttttggttttgttgcctgtacttttgaagtcatactcttgaactctttactagacaataaccagaagagttttctctagttttcttctcacatttttattatttcagtacatatatttaagtctataattcatcttcaattgatttttgtagaaatagtgagaaataggagtccaggtttattcttctgcaaatgacaattcaattgttccagcaccaattattgaaaagggtgtgctttcctcaacgtatattcttatcagctttgtcaaagatcagttggctataaatgtgtggctttctttctgggctctctagtctgttacatcaatctgtgtgtctatctgtatactactaccatgctgtattggtgatgatggctttgtaatataatttgaagtcaagaaatgtgatgctcccagctttgtttatttgcttcagaaaggctgagtcaacagctgcagagatgaagctgcccctcctcgcagggctccttcccggaaaaagatcatggctcccactgaccatataaccatggctggaactcctgaaattcccaaagggaggccctacccagtgaggggggatgaatgaaggtcctacttaaggaatctgtctggccacaatcaggcacagcagctgtgctgccttgtgggggaccagaccacctggattccctggagcctgcaggctagaatgtctgagtccatggaaacacagaaatggaggccgccctcacctccccagaaaactgtagtctcaggcagtctccagccgattgccactggttggctgctattccaagccagtgggtcttaacttgagaggtgctgtggaagtggggcccacggaatgaggctgcttggctccctggattcagccccttttctaagggaatgtacagatggaactcccgccttgcccagctttccaagtatataaaactcctgagtctctgtgagtgtctgagcgagtgctctggcaacattcgacacggctctgtgtatctgacccaagacccttatggcatgagctaatgggaggatcttctgatccatgcgtggcaaagatgcatgggagaaacatggtttgtgggtaggggttgtgcattcactactgcttctcttggctgtaggtgaaggtttctttggctctgtgctgatactgggtgcaccatcacccaccccctttgtttcttctcctgggtcaagtcatttgcctaatcagtcccaatgtaggaacctggatacttcagttcaaggtgctgaattcaccgtgcttttcattcaggggaagacagctgcttctcattgggcatcttggcctgcccacttcacgtcactttttgtaaaatccacaccactccaggaatatccattacttaacttcgcctgaaataaacagaaggctcattacacttatcatgggctcacttacttcgcctataatgaaggtgccatggaaatgctagtggatgacgtggtccattttcttagggatgagatagaaaaatggtgtatggctttttaatttaattaaaatttttagtttggtttaaatttacattggtctctttttggttttgttgcctgtacttttgaagtcttactcgtgaactctttactggacaatgaccagaagagttttccctaagtttcttctgatattttgaccatttcagtacatacatttcagtctataattcactttaaattgatttttgtaaacatggtaagaaataggagttcagatttattcttccgcatatgataatgcaactgtcccagtaccaattattgaaaagggtgtgctttccctagtgtatattcttgtcagctttgtcaaagatcagttgcctatgaatgtgtggctttcattttggattctctcgtctgttacatcaatctgtgtgtccacatttatacctgtaccatgctgtattggtgactatggctgtgtaatatattttagagttaggaaatgtgatgctcccagctttgttcatttgcttcagctgaaaaggttgagtccacaattacaaagatggcagccgcccatccccggaggacctccaacccagaaagagatcaggcttcccaccaaccctataaccctggctggagttcctgaaattccaacagggaggaccttcccagtgaggagggatgaatcaaggtcaaatttaaagaaacagtctggccactatcaggcacagcagcagtgctgccttgtgggggacccctcctgctccagaccagctgccctccctggagcccgaaggctagattgtctgagtctacggaaacagagacggtggccgccccaaccacccagaactcggtagtctcaggcacttggcttgctatcttgccactgcttggctggtattccaagcccgtgggacttgagaagtgctgtgatgatggggaccacaggatgaggctgtctggctccctgtgatatggctgtgatgagtggaggaacaccagggctcatgtctcacacagaattggagaaaatgacacaaacacatgtacagtggttttatggcgtgcagtttaataggcaagaacgaaggaagagctccccatactgagacagagggaggggggctccaaagccaaaagaggaaacccggagtgctgtggataccaatgagttatatgaagaaactggagggggcggtgtctgatttgcatagggttcaggcgattggttcgaccaggcatgtcatttatgtggcccacggaaaaactggccctcccacctagcctttgaatatgcacgtgccggacaccctgatttcctacactcatggggatatatgggggtggccatatcgccaggcacaggtggggacaagggccagaagagggcgggaatcgctatgtttgggtggacccagtttctaatggccggcatctgcagatcaaggttaccggagaactctaaaagccggggctttcctgctagacaagactcatttctggagctgctttaaaaagaaacaaaacttcccaaggaccccttttcctccctgtctgcccaaaataatttcttaacaactcgtataacacctgaattcagcccccttactgggggaatgtaccaacggaactcccacctttcctggtttctcaaggctagattgtgtaaacctcctgggtctcggtctgtgtctgagcagctgctctgccaacactccacacagccctgtgtactaggcccaaggccgccgtgactcagcccatgggaggatctcctgatttcttggttgcaaagatccatgggagaaaaatggtttctggggcggggtcacacactcatggcttctcttggctgtgcaagaaggttcctttggctctgttccaatatagcgtggttcatcacccacccctgttttctttgttctcctgagtcaagttgtttgcctagtcagtcccaatgtgagaacctgaatatttcagttcacgtgcttatcgtgaaattcactgagactttaattcagtggaaggcagcctcttctaattggccatcttggcccgccccctccacgtcacctcccataaaatggccacgctctccagggacgatgccattatatatctttacgtgaaaccgacagaacacttattacactttttgtgagctcatttacttcacttataatgaacatggccatggaaatgctagtggagaaagtggtcgattttctgatggatgtgataaaaaaatggtttgccgaccaattaatgacatatgtctcaaaactagtaacgagacccttaatcgctgggttgaagtttctaatcaagaagatgctcatctatgtattcaacaaagcagcttcccttgcttctgaaatgcttccaaacaacatctcatatttcctgaagaagataatgcctggacaagcagcacaagtcattcaggtttactttcagctcataaatccagcaggatattcgcacaattgttgggaaaccttatcagttcatgagtcgtgcatgtttcctttaatttcaggaggaagagggtaatctggaagagtttcctgacctactctgctgctgtgattaaacaaccaccaggaaattttgatgacactgttctcctgagctcctccctttcctcggggaagaaaagcattgaaactacaaaaataaagtgttatttggctggagtgaggtctcatgtctgcttatgcggtggctcgctgctcagaacagggtgagtctctgagttgtacgctgaggaggggaggctgtcaatctagaaaaaacccattgcatgggacacctccatggggtctggggggctgaggatgaggagctggactggatctagggaaggaggaggtttcagagggtgaaattctggcagtaaatcctgggggtgtttgaaaacttcctccctcagaaggagaagactcagggaggaataaggacaaaccatgggtcccttgaggggcatttactaacttaagaggactttatcgggaagcagagtgacaatggcctccttgaggactgaggcccctggataaatgaggcccagatccagatccagtccatgggagatgagaccttcaagggacatatttttgttgggacagaggaaaagtgcagctctgcagctgcagaggaagccttggcagtgtgaaagcgaccttggagggggccctgtgcgttctgaatgcttctgaggtccatcccctgtccccgcctctttttctggattttttgggctccatggtctccgccatcttctgagcgctccacgctgccaccttcagttttctcttctgggctccaaatactccaaaatctttcatatctgtgcccctacccctgtttttagcatgtgttgggactccaggtccctgaaggtttctggcctgaaatccacctccccagcggtgtggattctgctctagagaccccgcacttggcaaggttcccaggcccctgggggacaaccgagtggtatgtgcacttcagggctccacactcggcaaggtctttcaagcccttggggttccctcctcagttttcttcacatgtctgggatgtagtcactctataaatgccgggatgtgatccccaccccagtgattttttttagttccatgagtgttgctatctgaatagtcatcctgagagtgatgggaccttttgaatttgcagcaagttttagattagtgtgagtggcctgagatcgcaaaactggggctagcattggatgtgaggttaggctggtggaaaaatttgcccagaacctgaggagtgtgggctcactgcaggtggttaggatcagcacagaattgcaaggatgtatagctttggggtaaagaataacatggttcagaagtacatgtattagtcttttcatgcattgctataaagaattacctgagactgggtaattaattataaaaactcaggtttaattggctcatggttccacaggctgtacaaaaaggatgatgctggccatcagctcaacttctggggaggcgtcagaaaacttagagtcatggcaaaaagcacaagggaatcaggctcatcctccatggccagagctggagctagtggtaggagaggtgctgcacacttttgaacaatcagatctttttagaactctatcaccagacagcacctagaggatggtgctaaattattcatgaaatatccacccatatgatccactcaattctcaccggcccaaccaggaccacctccaccattggggattacaattacacatgagatgtgggtggggacacagatccaaactcgatcagtgggcatcttggactgggtctactatagaagaagaaccaggagctgactatcatccttaagactgcccatgatggccaggcagggtggctcatgcctgtaatcccagcactttgggaagccaaggtgggtgaatcccctgaggtcaggagtttgagaccagcctcgccaacatggtgaaaccctgcctctactaaaaacacaaaaaattagatgggtgttgtgccagacgcctgtaatcacagctactccagaggctgaggcatgagaattgcttgaacctgggaggcggaggtggcggtgagccccaatcgcactgctacactccagcatgggcaacaataccaaaacatcgtctcaaaaaaaaaaaaaaaaaaaaaaaaggctgcccatgaccactgccccagtgagagggacaccagcatggctaagatcaagtgctggacattcttcatgggtcagacattaaagcaggccacactgttacagagatgggctccattcatagcaacaaagtggtgagaagatgtgggaatggcagaggccagcactttgccatcaatgcaaggtgggcataaggagctggcaccagtgccagagtgcatcaggggaggactgctttgcaatatctagcacttacctcttagagtatgtttcattagggacaacagatataaatggcagacaagtgagtcccttcagtaacaggaaatagaaatcatcaagaggaacagaaacagatgtcagcagccctcatataaagtcatcatccttcatccagttaaaacctgagacagttctcacataagaaggtctaattcaaaaagagactgggttctcatgaggcaggttcatgcaaaaccaagggaagtatacaactttgggattctccagcttcccttggaaaagacctacaatcatttgcttaggtaactgagcactgaacaaaggtgagtattgttatctttcagaagctgttggccatgaaggtcttgctggcataaaacccatggttggaaacatcaccatgacccctgttagagtaatggcctaagggcaagggtcaggaaattgatgtattccttgccaacttctgcgagacgagtgttggtccactcatctctttcacggaattcaccagtctggtatcttcaaaatccagaaggatgatggcagatggcaggaaactaatgcaaacaccatcagttgtacctccactgtagcagcagtaatggatgttatctcttcattgtaatatccagggagggagaagatgacattattctcaatattctaaacaccctgtgtgtacagcctctgtgatattttttgtaatatccgtgtgggagagaattatattactcctaatatctcaggggttgtgccccctctgtgacaatgttcctaacacccaggaggggataggatgatatcacttttagcatcacagggggtgtacaccccactgtaatattgttcataatatccgggggggagagaatgatattactcccaatatcgcaaagactgtacaccaacctgtgatattatttgtaatatccataagaggaagaataatattactcccaatgtcacaggaagtgtacacccttctgtgatattgttcaaaagatccagttagggaggggatgatattactctcaatatcttaaacaccctgtaggtaagccctctgtgatattcctcataatatccagagggagaggatgatattactcccaatattgcatgaagtctacaccccacctgtgatattgttcctaatatccaggatgggagaggatgatattactcccaatgtcgcaggggatgtacaccttccctgtaatattgttcgtaatatctagaaaaggagaggataatattactttcaacatcgcagggggtgtacaccttccttgttatattgttgctaatatccagggaaaaagaagatgacattaccaccactattgcagaaggtgtacacccccccttgatatagttcctaatatccagaaaaggagaggagatattactccaaatattgcaagaggtgtacattcccctgtaatatttttcctaacattcaggaagaaagagagtgatattgcccttaatattgaagggagtgtgccccccccgtgatattgtttctaatatccaagaaatgaaaggatgatattactcccaatatcacaggggctgtacagccccctcccatgatattgttcccaacatcggggggggggtgaaatagtattattcccagtatcacaataggtgtacacacctgtcgtgatattgttcctaatacccatgggggaaaggacgatattattcttaatatctcagagggatgtacaccctccctgtgatattgttcctaatatccggggtgggagaggatgatattacccccaaaatctcaaagggtgtacacccctcttgtgatattgttcctaatatccagggtggagaggataatattattcccaatatccaggaaaggaaacgatgatgttactgtgaatattccagggggtgtcctcccctctgtgatattgttcctaatatccaggttggggagattatgatatttctccaaatatcacaaggggtgtacaccaaccctgtgttattgttcctaatatcgatggggggagaggacgatattactcccaatatcacagggggtgtacaccacctttatgatattgttcctaatatccatgaagaaagaggatgatattactttcaatatcgcaggggatgtacactccccctgtgatattgttagtaatacctaggagaagaaagtgtgatattactcccaatatcgcaggggatgtacacgcttcctgtgatattgttcctaatatttagggggaaaggggatgatattactcccaatatcgaatggtgtgtacacccccccgtgattctttttttttttttttttttttttttgagatggagtcttgctctgccgcccagactggcgtgcaatggcgcaatctcggctcactgcaacatttgcctcccaggttcgcacgattctcctgcctcagccttcggagtagctgggattataggcagctgtcaccataccaggctaatttttgtatttttagtagagttggggtttcaccatgttggtcaggctggtcttgaattcctgacctcaaataatccacccaccttggcctcccaaagtcctgggattacaggcataactttccctgtgatattcttcctaatattcaggaagaaagaggatgatattgctcccaatatcgcagagagtgtgcactcctcctgtgatatggttcttaatattcagaggaggagaggatgatattactttctatattgcagaaggtgtacacctccctcgtgatgtctttcctaatatccagtgggggagaggttattagtctcaaaatcacagaaggtgtaaacccccatttgatattgttcctaatattcaggggtggggagagaaaggtattactcctagtatttcagggcatgaacacccccaccgtgatatcattcctaatatccagaaggggaggcaatgatatttctcctaatatcacaaagggtgtacaccccttctgtgatattgtaaatattctgtgtgtacacccccctgtgttatagtctgtaatatccgggtgggggagagggtgatatttctccccatattgtaggggatgtacacccttctgtgatatggttcgttatatccagggaagaaaaaggtaatattgctgcccatattgtggagagtgtacacccccatgtaatatggttcgtaatatccaggagtggagagggtgatactgctccttacatcgaggaaggtgtacaccttattgttatatgattcgcaatatccaggggaggagagagtgatattgctccccatgtcgcagggggtgtaaaccctccgtgatatgattggtaatatccaggaaaggaaagggtgatatttctccccatatcgcgggggacgtacatcctcctgtgatatggttcgtaatatccaggaggaaagaggaaaatattgctcttcataacccgaggggtgtacaacccctgtgatatggttcgtaatacccagaagtgtacacccctctgtgatatggtttgtaatatccagggggttagagggtgatattgctccccatatcgcagtgggggtacacccccctggattggttcataatattcatggggggagaaatttacatttatcctcatatcagggggggtgtacaccccccgtgatatggttcgtaatatccaggggaagaaagggtgatattgctccttatatcgcggaaggatcaccctcccctgtgatatggttcataatacccagacgggaagagggtgatattgttcttcataaagcgaagggtgtacagccccctgtgatatggttcataatatgcaaaaggggagagggtgatattgctccccatatcacggagggtgtactcccttctttgatatggttcgtaatatccaggggtgtagatggtgatatagctcgccctattggggagggtgttcacccctctgtgatattgttcgtaatgtccagggaaagagaggatgatattactcccaatatcgcagaaggtttacaccactctgtgatattgttcataatatccagggaaggagaagacgatattactcccaatatggcagggggtgtagaactcctgtgatattgtttgtaatatccaggcaaggagaggatattactctcaatatcgcagaaggtttacacccctatgtgatactgttcatgatatccagggaaaaagaggatattactccctatatcacaaagggtgtacacccctttgtgatattttttgtaatatccaggggagagaggataatattactctcaatatcagaaggggtgaaaaccctcctgtgtcattgttcataatatttagggaaggagagagtgatattactccaaatatcacagtgggtgtacacccccctatgatattgttcctaatttccagaaggggagatatgatattattgccaatatcgcagaaggtgtacaccttactctgacattgtttgtaatatccagatggggaaatgatgatattactcctaatatcacagggggtgtacacccccttgttttattgtttgtaatattcaggggaagagacgattatattactcccaatatcgcagggtgtgtacaacactctatgatattgttcataatatccaggggaggagaggaagtgtacacccccccgtgatattgttcgtaatatccagaggtagagaggatgatattactcccaatattgcaggtggtgtacacctttctgtgatattgtcatgatattaagaaggggagaggatgatattactaacaatatcacaaaaactgtacactccctgtgatattgttcataatatccagaagaagggaggatgatattattctgaatctcgcagaagatatacaccaccctgtgatatggttcataatatcctaggggaaagaggatgacataactgtcaatatcgcagggggtgtacaattccctgtgatattgttcacaatattcagagggaaaaaggataatattactttcaatatcgcaggcggtgtacacattactgtgttattgtttataatatccggaatgagagaaaattttctcccaatatcacaggaggtgtacactcccctgtgatattgttcgtaatatccagggaggggagaggatactattactcccaacatctcagggagtgtaggccccccctttgatattgttcctaatattcggaagtggagaagatgatattacttccaaaatcgcagggggtgtacactccctctgtaatattgtttctaatattcatgagtggaaagaaagatattactcccagtattgcaggggacatacaccacactgtgatcttgttcacaatattcgggggggagaggatgatattactcccaatatcaaagtaggtgtacacccccttctgatattgatcgtaatatccagaattaaagatgataacgttactcccaatattgcagggggtgtacatttttgaatactgttcataatattaagagggggaggggatgatatctgtcccaatatcgcaaagtgtgtacacctcctgtgacattgtcccaaatatccagaggaaaaaaggatgttattactcttaatatctcagagagtgtacacctccctgtgatattgtttgtaacatccagaagaaagaggctgatattactcttaatatcgcagggggtgtacacccccgccccgggatattattcgtaatatccagggggaagtggaatgttcagaatgggagaggatgatattacttgcaatatcatagtgggtgtacaccccactgtgatattgtttgtaatatccgggaaaggagaaaatgacattcctccccatatggcaggggctgtacaccacctatcatattgttcaaaatatccagaaggggagaggatatgtctccaagtatcacagggggtgtacaccccgctgtaatattcttcctaatatccagggtgtgagaggataatagtactcccaatatcccagggcatgtacaccccccttgtgatgttgttcctaaaattcatggggagaaagaatattactcccaatatcacagggggtgtacatacactctgtaatattgttgccaatatgcagcaggagagaggatgatattactcccaatatcacaggggctgtacaccccgctgggatattgtttctaatatcaagggggaaaaaggatgatattactcccaatgtcgcagggtgtgtacttcctctttgtgacattgttcctaatatccaggagagaagagggtgacattccttccaaaactgaaaggggtgtacacaccctttgagatattgtctttaatatccagaacgaaacaggatgatataactcctaatactgcaggggggtacaccctctctgtgatactgtttctaatatccaggaggggaaagaaaaatattaatcccaatatcacagggggtgtacattccccctttaatattgttcctaatatccaggaagacacaggatgatactatttccagcagcacagggcatgtacacccctttgtgatattgttcctaatatccaggaaaagagaggatgatattactgtcaatattgcagggcgtatacactggttctgtgatattgtttctaatatccgggggtggagaaaatgatattactcccaatattccagcgggtgtacacccgttctatgatattgttcctaatatctgggggagagagaatgatattattgtcaatatcacaggggatgtacagattccctgtgatattgtttctaatattcacagggggagaagggtataatactcccgatatcgcagggggtgtacactccccctgtgaagttgttcctaatatccagggattgagagaatgatattactcccaatatcacaggcggtgtaaaccccctgtgtgatattgttcctaacatccagaggaaaagatgatgatattattttcaatatcacagggggtgtacgcatccctgtgatattgtttctaatatccaggggaggagaggatgatattattgttaatatcgcagggggtgtaccccaccctgtgatactgttcctaatatccggggtggaagaggataatattgctcccaatatcgcaaagggtgtacaaccttcctgagatattggtcctaatatccagggagggagaggatgatattactttcaatatcacagggagtttacacaacccctgcgatattgttcctaatatccagcggaagaagagttaggataatactattttcaaaattgctgggtctgtaccccctccccgtgatattgtttctaatatccaggaggggagaaagtaatatgactcccaatatcttagaagatgtacaccctccccataatattatttcttacatccagggggtagaggatgattttgctttcaatatcacagagggagtaaacctttccggtgatattgtttttaatatttaaaaagagagaagataaaattactcccaatacaaaggggatgtattgtgtactcccccctctgatattcttttttaatatccagatggagagaggatgatattactttcaatattgcatgggatgtataaatcccctgtgttattgttctgaatatacaggtggggagagtatgatattactccaaatatcgcagggggttctttccccctgtgatattgttcctaacattcagggagggagaggatgatattactcttaatattgcagggggtgtacccacgcctatgatattgttcctaatatccagagggggagaggatgatctaactcagaatatgacaaggggtgtacacacagcctgtgatatggttcctaatatacaggggagaaggggataatatttctcccaatatcgcagggggtgtacaaccccctgtgatactgttcctaatatacagaaggggacagcatgatattgttcctaatatcgcaggaggtgtacaacgccctgtgatattgttcctaatatccagggcgggagaggatgatattaccctcaatatcgcagggggtgtgcactttccctgttatattgttcctatgatccgggtggggggaaatgacattagtcccaatatcgcaggatgtgtgcaccgctcccccgtgatattgttcctaatatcaagggggagagaggaggatattactcccaatatcgcaagggatgtacatcctccatgcgatattgttcgtaatattcaggaggagagaggatgatattactcttaatatcgcagaaagtggacacccaccctgtgatgttcttcataatatccagggaagcagacgattatatgactttcaatatcgctgggagtgtacatcccttttgggatattgtttctaatatccaggaagggagaggattatattactctcagtattgcaggcagtgtacaccttttttgtgatattgttcctaatattcagaaagggaaaggatgatattactcccaatattgcaggtggtgtatatccccctctgatattgttccttatatcaaggaagagaaagaataatattactcccaatatcaaagacagtgtagacccctcctgtgatattgtatttaatatccatggggaaagaggatgatgttactcccaatatcgcagggggtttacacccacactgtgatattattcctaaaatccagtggaggagaaaataatattgctcccaatattgcagggtgtatacaggccctcccccgttatattgctcctaatatccagcggtggagaggatattactttcaatttgtgtagggagtgtatacccccctgtgatatttttctaatatcaaggatgggaaaggatgacattactcccaatatcgcaggaggtgtacacgccctgtgatattgttcctaatatctagggaaggagaggatgatattactttcaatattgcaggagctgtacaccctctgtggtattgttcttaatatttaggttgggagaaaatgatatgagtccaaatatcgcagaaggcatacacacttccaataacattgttcttaatatccgggggagagggtgatattactcccaaaatctctggggggtgtacacccccttctgatatttttcctaatatccagggaaggaaacgatgatattactataaatattccaaggagtgtacaccttcctaatatcctaatattgttcctaatatccaggggtgggagaggattatattactcccgatatcgcagtgggtgtacacccctcctgtgatattgtttctaatatccaagctaggagaaaatgatatcactctcaataccacagggggtgtacaccttccgcatcatattgttcctaatattcagagggaaagaagatgaagttactttcaatatcggaggggttgtacacaacccctgtgatattgctgctagtatccaggaagaaaggggattatgttactccccttatagcagggggtatacacctcccctgtaatattgttcctaatatcaaggctgggatatacgtggggggaaggatgatattactcccaatatcgcaggggttatacaaccttctgtgatattgctcctagtaaccagggcagaagaagatgatattactcctaatatcgcaggaggtgtacactcccccattatgttgttcccaatatgcagaaaaggagaggatgacattattgccagtatcgcagggtgtgtacaccacccctgtaatattgttccaaatatttagggggagagaggatgatattactcccaacatcgcagggggtgtacacacatcccctgtaatatagttcttaaaatctaggggaaaaggggatcttatttctctaaatattgcagagggtgtacactccccggtgatattgttcctaatagccgggagggagataattaaattactttcaatatctcagagagtgtacatcgcccttgcgatattgttcctaatatccagagcaaaagagaatgatattactcccaatatcttaggagtgtacatttaacctgtaatattgttcctaatatccagggggaagagaatagtattactgccaatatcgtaggggttgtacaccttttctgtgatattgttgcaaatatttagtagagggaaagaatattactcgcaatatcacagggaatgtatacttcccctgtgatattgttctgatatccagaaaaagagagggtaatattactcccaatattgcagggggtgtacaccccccttgtgatattgatcctaatataaaggaaggaagaggatattactcctcatatagaaggggttgtccaccccccttgtgatattattcctaatattcagggaagcagaggatgatattattttcaatatcacagagggtgtgcagtccacctgtgatattgttcttaatattcggggggagaggatgttattatgcctgatatcgcagtagaggtacacccctcaagtgatactgttcctaataaccaggggtgaagaggatgatattactcccaatatcgcaggtggtgtacacccccccatgatggtttctaatatacagagggggagaggaaaatattactcccaaaatcgctggaggtctacaccccccttgtgatattgttcctaatatccaggaaaggaaacgatgatattactgtgaatattccagggggtgtacacccgctttgtaatattgttcctcatatccagggtgtggagaggattatattactcccagtatcgcagggggtgcacgacgcccctgtgatattgtttttcatatccaggaggggagattattatcaatatggcaaggggtgaacaccccctgtgatattgtacttaatagttaggttggcagaaaatgatattagtctcgatatcgcagggggtgtgcactccgcctggtgatattgcttttaatatcaagggggagaaaatggcattactcccaatatcgcagggggtgtacaccgctcatgtgatattgttcctaatatccaggtggagagaacataatattactcccaatatcgcacaaggtgtacacccctcctgtgatatggttcctaatatccatgggaggagatgatgatattactcccaatatcacaggggatgtacaccacccttgtgatattgttcctaatatccagggaagaaaacgatgatattattgtgaatattacagggagtgtacacactccctgtgatattgtttttgatatacagggtgggagaggatgatattactcccaatatcacataaggtgtacaccccccgtgatattgttctaaatatttcggtggggagaaaatgatattagtctccatatcacagggggtgtgtgctcctcaggtgatattgtttttaatatcaagagggggaggagattatattactttcattatcacagggggtgtacacccctcctgtgatattgttccttatatccaggcgaggggaaaataatattactctcaatatcgcaggaggtgtacacaccccatgtgatattgttcctaatattaagggggaaagaagataatattactttcaatatcacagggtttgtactcctttcttgtgatatagtttttagtatccagggggaaagagcatgatattactcccattgtagcaaggggtgtacacacctcctgtgatattgttcctaatatccagaagtggtgaggatgatattactcccaatatcgcagggggtatacaccccacctatgatattatttctaatatccatgggaaaagagtatgatattacacccaatgtcgcagagggtgtgtatttttcctgtgatattgtttctaatattcaggcggggagaagatgatattactctcaatatagcagaaattgtacatccccgctgtgatattcttcataataatcagggaaaaagaggatgatattactaccaatattgcaggggggttacacttcccctatggtagtgttcctaatatccaggaagaaagaggatgatattaatcccattatccaggaagtgtacacccaccctgtcatgttgttcctaatatccagcagggaagaggatgatattacaccccccccccgtgatattctccttaatatccaggaggggagaggctgatattactggatatatagcaggggtgttcataccttctgtgatattgttcctaatatccagaaaaggagaggatgatattacttccaatatcgcagaaggtgtacacctccctgtgatattgatcctgacattcagaaggggagaggatgatattactcaaaataccgcagggcatgtgcattcccttgtgatattgttcctaatacccagaagggaacaggataatattactttcaatatcgcagggagtgcacacccccctttggtatggttcttaatatccagaaggaaagagggtgctattactttccatattgcaaggggtgtacaccccactgtggtatggttcataatatccaggcagggagagggtgctattactccccacagtgcggggcatgtacaccctgctgcggtacggttcctaatatccagggggagagaggatgctatgactccctatatcgcggggtgtgtacacccctgtgtggtatgttttgtattctccaggaacggagagggtgttgttacccctcatatcgctggaaatgtacactcccctgtggtatggttcgtaatatccaggggattgagggtactgttacccccatactccccatatcgtggggggagtgcacctccctgtggtatggttcgaaatatccagggtaagagagggtgctattattccccattttgcaggaggcgtacacccccctatggtatggttcgtaatatccggggtgaggggatgctatcaaaagaagagagaaagagaccccccatattgttctatattattttatactcagtacctgttttaagaagaaacaaggaagtgaaaccaaaagcaggcagcccggcgccaggcaccagacccaaaaccagacccgaaaccaggcctgggcctgcctgaccttagcctgatagttaaaattcaacccatgacctagcaaccaatgttatccatagattccagacattgtatggaaggacattgtgaaatttcttgttctgtgctgtttcactctgattaccggtgcctgcagcccctgtcacatacccactagattgctcaatcaatcatggccctttcatgtaagatctttagtgttgtgagcccttaaaaaggacagaaattgtgcactcaacaagctcggattttgagacgctagtctttcgatgcttccagctgattaaaagccacttccttcactacctcggtgtctgtggggttttgtccgcgactcctcctgctacactatgactccccatatcaaggggggtgtacacccccctgtggttcgtaatatccagcaggggaaaaggtgctattactccccatattgcagggagtgtacacccccttgtagtatggatcgtaaaatcaaggggggagggaaggtgtaattatccccatatctcagggggtgtacacccctttgtggtaaagtttgtaatatccagggatattacagggatattatccccaaattaatacttttataatttcttatgcctgcctttactgcaatctctgaacataaattgtgaagatttcatggacatttatcacttccccaatcaatacttttataatttcctatgcctgtctttactttaatctcttaatctcatcatctttgtgagctgaggatgtatgtcgcctcaggaccctgtgatgattgcattaactccacaaattgtttataaaacatgtgtatttgaacaatatgaaatctgggcaccctgaaaaagaacaggataagagcgatgttcagcgaacaagggagataagcataaggtctgactgcctgtggggctgggcagaacagagtcacatttttcttattgcagaaaatgagtaggagaaatatcactgggaagggaacgcattcctaggggaggcctatggacggccgctctgggggtgtatcccttatgtggttgaagataagggatgaaatacaccctggtcccctgcagtgccctcaggcttgctaggattagaaattccagcctggcgaattctagtcagaccagttctctgctcttgaaccccgtttcctgttaagatgtttatcaatgacaatgcgtgcacagcaggacatggaacctcaatagtaattccattttctccctggccttgtgaccttgctaggcccttctgcccttgtgatcttttattgccatttgaagcatgtgatctctgtgacccactccctattcgtatccccctccccttttgaagtccctaataaaaacttgctggttttgcagatcaggtggtcatcacagaacctgccgatatgtgatgtcaccccggaggctcagctgtaaaatttctctttcgtactctttcactttatttctcagaccaggtgacacttaaggaaaatagaaaagaacctactttgaaatattgggggctagttcccccaatagacattgttcctaatatccagaaaaaaagaagatgatattactcccaatatcacaggggttgtgaaccccacctgtgatatggttcctaatatccaggaagggagagaatgatattactctccatattgcagggggtgtgcacatccctgtgatattgttcctaatatccaggggaggagagggtgatattactcccaatattgcaagggttgtaaactccaccctgtaatattgctcctaatatttaggatttagggggggagaggataatattactcccaatatcgcaggggatgtatatgccctctttgatattgttcctaatatccagggggggagaggataatattactttccatatcacaaagagtgttcacccccctgtgatattgttcctaatatccaaaaaggaagaggatgatatcaatcccaatatcacaggaagtgtacaccccccccttttatattgtttctaatatccaggggaaatgagggtgatatttctctcaatatagcagaatgggtacactccccctgggatattattcctaatatccaggggaaaaaaagaggttgatattcttcccagtatagcagggaatgaatacaccctttgtgatattgcttctaatatcaaggggaaaagaggatgatatgactcccaatatcacaggggatgtaaacctgtggcgttgttgctaatatcaaggagggaagagtatgatattactcctaatgtcgccgaaggtgcacactttccctgtgatattgttcctaatatccaaaagggaagagaatgatattacccccagtattgcagggtgtacaccacccctgtgatattgctcctaatacccaggaaaaaagagaatgctattacccccaatatctaaggggacgtataccttccctgtgatattgtttctaatatccaagtggggagaggatggttttactctcaatattgcagggagtgtacactccccctgtgatactgtttctaatactcgggctgggagaaatagtattactcccaatatcgcagtgatattgtttccctgtgatattgtttctaatatctagtgggggagataattatattactaccccatacacaggggagggtgtacattcccctgtgatattgtttgtaatatccagggaaggagaggatgttactcccaatatcacaggggttgtacaccccttttttgatattgttcctaatatctggggggcagagaattatattactgtcaatatcacagagtgtgtacaccccctctgttatattactctttatattcagggcggtagaggatgatattactccctatatcacagggggtgttcacccctcctgtgatattgtttataatatctaaggggaaagaggatgatatcactctcaatatcaaaggaaatgtacacctttcctgtgatattgtttttattatataggggggcagaggatgatattaagaacaataccacaggggatgtacacccacgtattgatattgtccctaatatgtatggggaaagaggacagtgtaactcccgatatcgcagagtgtgtacacccccttgtgatattgtttctgatatacacggggagaaaagataatatttcttccaaaattgcagggggtgtacaaccccctgtgatattgtttttaatatccagtgggggagagaatattactcccaatattgcagggcgtgtacacaacccctgtgatattgttcctaatatccagagtaggggaggatgacattactttcaatatcgcaaggggtgtacattcccctgtgatattgctcctaatatccatgaggggagaggatgatattattcctaatatggcaggggctgtacaccttccctgtgatattgtttctaacatccagtgggggagaaaatgatattactccctatatcacagaaggtgtacactttccctgtgatattgttcctaatatccagaaggggagaggataatattactcccaatatcgcaggaagcttacaactcccctgtgatattgtttctaatatccagggaggtagggatgatattactcccaatatcgcaggggatgtacactcccccgtgacattgtttctaataaccagggggtgagaggatgatattacgcttaataccgaagggggtgtacacacccttgtgatattgtgcctaatagccagggggaagaaaattatattaattttaatatttatggggaaaaaggatgatattactcccaatatcacaggggctgtacaccgaccttttgatattgtttttaatatccagaagagaagaggataatattgctcccaatatcagaaaaggtgtaaaccccttctgtgatattggtcctaatatccagggagggagagaataatattactaccaatatcacagaaggtgcccacccccaaggtgatattgctcctaatatccaaagataatagggtgatgttactcccaatatcacaggaggtgttcacaccccttgtgatattgtttctaacgtacagggaagggagaggatgatattattcccaatatcacaggaggtgtatactcctctgtgatattgattttaatattcggggggaaaggatgatattactccctatatcgcagagggtgtacaccctctgtaatattgatcctaatatccagggcgggataggatgatattactcccaatatcgcagaaagtctacacaacccccagtaatattgtttttactatccagggggaagaggatgacattactcccaatttcacagagtgtgtacactcaccatttgatattgtttctaatatctagggggagagaatatattactcccaatatcacaggaattgtacaccacctctgtgacattcttgtgaatatccggggaaaaagagaataatattactcccaatattgcagagcgtgtacacccctccatgatatcgatactaatatttttttaaagaggatgatattactcccattgtcacaggatgtgtacaccccccttgtgaaattgttcataatattctggggggagagcataatattactccccatatcgaaaaaggtgtccaccctccttataatatggttcctaatatccaggatattacttaatccaggatacttgtaataccctaaatatacaattgcttgaacctccacctcccaggttcaagcaattcttctgcctcagcctcccgagtagctgggactacaggggcacaccaccacacccagctaatttttttttcttgtatttttagtagagatggggttttgccatattggccaggctggtctcaaactcctgaccttgtgatctgcccacctcagcctcccaaagtgctgggattataggcgtgacccaccgtgccaagccaggaagaggatgctctatagatttccccaataagagatggctttgcagggccattccaaaatatgtcaaagaaatacatttggggataaaatactttgatttcctttagggaatgttatctattatgtgatgctataccagagtcaggttggagtcggttatcttattgcaacaaagagtctgttccgtcactgttgggatctctattttttcctcttatttcttgagacagggtctcactctgtcacccagtctggagtgcagtggtgcgatcttcattcactgaaacctctgcctcctgtgttcaggtgattctcgtgcctcagccccttaagtaactaggattacaggtgtgcgccaccacacccagctaatttttgtattttcagtagagatggtattttgccctgttggccaggctggtcttgaactcctggcctcgtgtcatctgcccacctcgacctcccaaagtgctgggactgcaaatgtgagctattgtgcccagccaggatctctgttttaatgttagtgctggtcactttgcatgaactccaaagggaagaaatataatgaggtgtgtctgaccccctgccttctcatcgtgacctgaattagtttttcaggtttgcaggggatacccttggacaagaaggggctctattcggttggttggggggattagaattttactttttgtttacaatatttctcctgaaagagttaggggctcacaaggaatttccgcgtgagcaacttatgaggaaagccatctgggaagatatgtgtccttgtgtcactgggatattctcgtttaccccaatgatacggcaatgacgcagggttgtgaaattacagctatgtgtttggggaaaaaagaaagcaggattgtgtgactacgtttccaaacttcacttgcccttagccatagtgagttgggggcctggagattctgttttctttcacaatgatatagatacaattaaatgtatagaaagcaaaaaaataaaaaggtgagtaatgaggaacctctgattcctgagtggccatgtagttacccatggcacagagccacagttactgaaggtaaagtttgctggggaatttagaaatgaatccagctcttggaggagtcagtttactggatgcctaagaaaatgcaaacaaaataagaaaaaagggtaatattcaatcccatagttattgttacctgtcatagctaaagtaaaattaaaacagagtgctggcttcaatcttgatgctacactaagcttagatttcagtgaatgtgagtctcagccactagctcagagccacctcccaaagaccaaatcatgtagggacaatagaaagtacttctgagaattgtggttaccaagaacctagtaactgttggggaggagcaaaacaaagtacagaaaccagagggtacaatctgagtgagactgctatcagcttctggaggagcctttactaaaatgaatgatgagagtaactggatgatgagagtaactaatggatgatgagagtaagcaatgtctttggttttcttttttttttttttttttttttagcagacgtctcactcttgtcgcccaggctggagtgtaatggcatgatctcgcctcactgcaacctccacctcctgggttcaagcaattctcctgtctcagcctcccgagtagctgggactacaggcactcatcaccacacctggctaatttttgtatttttagtattttctggtgagggtccaggtttccggaaacaactcagagacatatgttaagatgttatctttagttttcacagggaaccaaatatgttacgactccaatttccttggctattgttttaagttaccattaccttctcgttgatcaagttgctcatttacttctcaagcctagctagatgcctggaatttcccttgaaggaagtcaagattttcctttatctccatactggctgatggtgatcgagtaagcccctaagaggggtccctgctccatctcgagatgctgctagattctacagtgcctaataaacagctctcgcctggccgacaaagagctgcttgctctctggatagcaattccaaagtgaacagacaacatcctgtttggaagactgccactctgttagaagaagcatcaggaaaacctttcttttgagctatttataactaacagcaattgaccaagtatacttttgtgagtgaaactgacctttctccctgtaagaattctccaaaatttggaaactatttgtgagtatttttacttatggcaatataattattggcacaagctcaatcagattcggttttctttcgtaacaggaaccattggagatactcattactctttgaaggcttacagtggaatgaattcaaatacgacttatttgaggaattgaagttgactttatggagctgataagaatcttcttggagaaaaaaagactgggtatattttcaatatgctttccttttaaggtccctcacctgtggaaagtaaagaatgtcactttctgacaggctcaggaacctcaagttatgtagggatctcaagaagatgggggaattcacccagttcatacaggtgaaattgctgttgcaaagattatgaatatgagagaagtccagcatggctgacttcatctcgtgtctggcctcaggctggctgcccttgctcactcttgggcataggccaagctagccatgggaggaatttagtttatagtttaactttgaagcacggatgataatagtctctccctaaaatgaaccccttccttgctcagggactgaaactacctttgtatgacaaatgaaagcccacaagattaagattatgagaggggcctgaattctgctaaaatgcaggtgtagctgactgataacaagtcattgtcccacagcttgcctttctataatctcttgcttctcaggagtcacatggccagaggtcctgagatttccagtcctgtgacccccacccagagatggacttagtgcatgaggaccattttccacacccctatgatttcatcctcaaacaatcagcagcaaccattccctagccccctgccttccaaattatccataaaaatcctagcctctgagttattagggagattgattaataatcccagtcctaccccttgggttgctctgatttaattaaaccttctctactgcaataccacggactcagtaaattggttttgtctgtgcaatgggcaagaagaacatgttgcatggttatacaggtactacaagcacagtctgatggcaaattattggttttgcttcctgcccttgatgtttctaaacatctagtccaaaattacttgtgaaaggtccagcaaagccaattttaaaagaggctatatggccaatcactattctttctacacattattgcaaataatcaggccacggctgggcacggtggctcatgcctgcaatcccagcactttgggaggctgaggcaggatcacctgaaatcaggagttcaagaccagcctaggcaacatgataaaaccctgtctctactaaaaatacaaaattagccaggcatggtggcatgcacctgtaatcccagctacttgggagactgagggaggagaatcacttgaacctgggaggcagagattgcagtgagctgagatcacaccactgcactccagcctgggcaatagagtgagactttgtctcaaataataataataataatcagaccaagtataatgaaattaaaatttattttgcaaataaattggtcctactacaatttatccttcatagaaatgtggaaactgaagataaaaaaaattaggtttcagaagaaaactatactacacctgttattagattctagccctaaacattgtttttgaggtttttattatttacctgcaatttggtctaaattctgaattatttcctgactacaagtatccaaggaataaatgggttttctttttctttatgatagttttagttggcttctaatgcaacaacaatttttattgtaatcctgtgtgcattctattcctactattcaaattattaatgttatagatctttcattgtagtacttctgaattaaccaaaatcacagtattctgaagatgattctacaaagcctgctgtttctacaaaggctgctgatgatttctacaaagcctgctgtagtgttgctgtggcctctgcttaaaaaagtagaaaacacattgatgcagcatgttcaccccaacctccctgcctaaaggctcagggaccatcttggaagaggaaggcgcgtgagattgtaagagccgaattagggggatggagtgtggagaataaggacacttcatcttggatgctcacctgccaaattgacttctgatgaaagccagctccagaaatgtgcctacagttactactttcacctaaaccctgcccttagtcaaatccttctcttcttctaagcaatcaacttcaattccttgtataacccacagtataaaagggcttttataccattctatcctattgcatgtaagccttgggtctgggaggtaacagtgtgggattccaccatctcatctccctgccacccaaacatgcctgctcttctttaagcaatattaaatgtttgtacttcagaaatttgatttgtcagcctcttcttcagactctcagcttctttggcctttgggagtaaatttgcataggcctgctcaaaacaggatgttctgggggtttgggggtgttgttttgttttgttttttgttttgtttagagacagggtctcactctgtcacccaggttggagtgcagtggtgcaatcatggcacactgcagcctcaaactcctaggctcaagcaatccccccaccttggcctcccaaagttctgggattacaagcataagccaccatgcccagccctggacttttctttaaagacatttacacagtgtaggaattactgtgggtgcactgctcaggtccccttctccaggatgctcattcctacctcatagatgattttcctgcagagatttgacctcagctgaagggcagtcacctggtccaggtggttgctattcacctccttcctgagaacagccaacagccagggacacgctagcacagagatataagagcgaccaaggtgaggccccttctgtgctgcggtgcatgctccagagcctccctgggatcagacttaagagggtctccagccagatctggtcttcgctgctttcctcgagctccccagcgcactcctgcaatgcatcttttttttttttttttttttttttgagacggagtttcactcttgttgcccaggctggaatgcaatggcgcaatctcagctcaccacaacctctgcctcgcgggttcaagtgattctccttcctcagcctcccaagtacctgggattacaggcatgcaccaccacgcccagctaattttgtatttttagtagaaacgggtttctccatgttggtcaggctggtttcgaactcctgacctcagttgatcctcctgcctcagccttccaaagtgctgggattacaggtgtgagccactgtgcctggcccaatgcacctcttgaatcacctcctcatgctttgcttttagagaacatgatccccaacatgtgattccagcaaagattctagaaagccaaccgtgacaatcacttctgggtttagatgacccccccccaccacaagatggcagtgagcacctcatcacagaggtgctgatggtctgcagcaccgcgccaggccagaacgtgccttttacagaagaaaataacccagtagctgactaggatggtgaggagggctggtgagcactgcggtagtgagagggacactagcatcactgagatgcaagtgatggtcatttttcataggtcaaagctcaaagcaggggacagttacagggcagggcttcatagcaccagtgtgatgaaagtatctgggagtggctaaggccagcactatgccatgggaagcaaggtgggcctgaggaggaggcagcagcgtcagcctgcaacaagtgggggctgccctgcagagacctaagagtcatgttatagagcacagtgtctgtaaggccaagaagtgtggacagccaagtgtgtcaattactagacatactcaagaggagcaggaagggcagggcatggtggctcatgcctgtaatcccagctacttgggagactgaggaaggagaatcgcttgaacccgggaggtgaaaattgcaatgagccgagatttcgccactgcactccagcctgtgtgatgggagcgggactccatctcaaaacaaaaaaagaaaaaggaaaaagaaaaaaagaaaaacctaggtatacttctcaagcaaataaaaataatcaaaaccaatatcatgcccgggcacaaatttcatatatataacagatttaaatatatgagggtgattatcctctcatatctccatttttttttgtttttccatttttttctttactaaaaaaagttaatgccaatgacacacaatttttttttttttttttttttttgagatggagtctcacttcttcgccctggctggagtgcaatggcgtgatctcgactcactgcaaagtctgcctcctgggttcaagcaattctcctgcctcagcctcccaagtagctgggaccacaggagtgagccaccacacccagctaatttttgtatttttaatagagacggggtttcaccatattggccaggctggtctcaaactcctgatctcaaataatctgcccgcctcggcctcccaagattctgggattataggcgttgagccactgcgccccgcctatgtatgattttttttttaattttattttcataagtttttggggaacaggtggtattttgttacatgagtaatttctttagttgtgatttgtgagattttggttcacccatcaactgagaagtatacactgaacccaatttgtggtcttttatccctcacccccttcccaccctttcccccggagtccctgaagtccattgtatcattcttatgcctttgcatcttcatagcttagctcttgaacccttactttctgtttgagggagaagacatatcatctacaagtagatactgtgtaaacattccattgcatgactatcccataacttatttattatttgtgtttggttatttgctgctatgtaacaaccccactcccaactaaatggtgtgacaattccatgattctgtggatcaaaaattctgaaaagtcaaacccaaggagttttgtctctgctccatgatgctaaagcctccgcaggggtgaggcgaatggctcagggtgactgaaaagctcagggttggaacagctggggatgaggcctctatgtataagatgattcttcactcacaggtctgaaactatggtggggacagccagaaggctcggctcagctgggacagtcacctgagccctacacatgacctctccaacatggtgatcctgaagcagttgggtttcttacacagcatcacacttttcttttttttttttttttttgagatgaaatattgctctatcacccaggctggagtgcagtggcacgatctcagctcactgcagcctccgcctaccaggttcaagcgattctcctgctccagcctcccaagttgctgggattgcaggcgcctgccaccaagcccagctaatttttgtatttttagtagagacggggtttcaccttgttggccaggctagtcttgacctcttgacctcaggcgatccgcctgcctcggcctcccaaagtgctgggattacaggcatgagccaccgcgcccggccaaagctcacacttcttatgattcagccttagatgtcacatcagttcattttccccacacttattagtgttagaagtcacaagcccacccatactcaggggactggcacacagaccccactctcaatggaaggggtgggacaccaccattcctgctgatgggcatttgggtaacttcctgtttgaagctattaagattgggctgctgtggccgggcgcagtggctcacgcctctaatcccagcactttgggaggccgaggcgggcggatcacgaagtcaggagatcgagaccatcctggctaacacggtgaaaccccgtctttactaaaaataccaaaaaaaaaaaaaattagctgggcatggtagcgggcgcctgtagtcccagctactcgggaggctgaggcaggagaacggcgtgaacccgggaggcggagcttgcagtgagccgagattgtgccactgcactccagcctaggcgacagagcaagactccgtctccaaaaaaaaaaaaaaagattgggctgctgtgactattctagtaggtgtctttggtgagcgcctacacgtgtttctctttttctctttagtatatgcccaggaggggaactgctggctcccagataccgtatgttcagggtcacacacacttccacagggttttccaaagcccttgtaccagcacgcactcccagcacctgtgtgactgctccagctgtcccacagtctcatcagttctattgctgatattttcattttagcttaagttatatttaataggaaaattaccgttgcctctgccccccgttcctgcctgtaggagtttctcgtagctgttgctacaggtggccacaaatctgtcacttaaacccacacaaattgatgtccttatggctttggagtcagaagtgtcaactgaaggtactagcagggctgtactgacctggtggcctcagggagcatctgtgctgcttctccaccttctagaggctgctgcatccctcgctccagccccttcctgacaccactcaccctcctacttctgttatcacatcctcaccttctctgtgttcagggctccctctgtctctctcttgcaagcacacttgggattccattgagggccacccacataacccaggagaatttctccacctcaatatccttaacaactgcagagcccttttgccataaaagttaccattcacgggttccagggattgtgacatgggtagctttaggagtgattattcctgcctgtctcccgctcaccagaacttggactttctctctcaacaggagccccctgtgtgggaatagcctgtctcaacgacgccctctataaggacctgcttcctcaaaggacctcatagtcgggtcctgcccctcagtgtccagtctgccttggctggaggggctgcaggggtgtgttggcgccacctggtggagacagggcatcacagcaggtgggagcccagtagaagcacaaccaaaacatgggtaatgtttaaaattttctggctaagcgctgtggctcacgcctgtaattccagcactttgggaggccgaggtgggtggatcacatgaggacgggagtttgagaccagcctggccaacatggtgaaacatcccctctactaaaaaatacagaaaaattagctggacatgtggcgcgctcctgtaatcccagctactcgagaggctgagacacgagaatcgcttcaaccccggaggggttgccgagatcgcgccactgcactccaggctgggcgatagagcgagactctgtctcaaaaaaaaaaaaagaagaggggaggcgaggggaggggaggggaaaagggggaatttgtttggagctgagacatccatcttctcctgacctcagatatttgcactcctggttatgaagccttcacacttggactgaatacaccaccagctttcccgatttccagcgtgcaaatggcagatcgtgagacttctcagcttccataattacatgagccaatttatatatataaattgggtcctccagaaaaacagaataaattatatatataattatacgcataacttaattaaattatacgtataacttagctatatatataatttattctgtttttctgaagaaccctactgacacaaatgttgagcatcttttcatgtgcttattggcttaataacttgtacatcttctttggggaaatgtctattcaagttctttgcccattttgtaactgaactattaatatttgtctttacattgttgagttgtaaaagttccttatatattctagatactagagccttatcagatatatttctgcaactattttctcctaatatataggttgtgtttttattttctttttctttttttttttattgagacagtctcactctgtcacccaggctggagtgcagtggcatgatcttggctcactgcagactcgacctgccaggctcaagcaattctcccacttcagcctcctgagtagctgaggttataggcacttgccatcgcacccagctaatttttgtattttttagtagagccgaggtttcgccatgttgcctaggttggtcttgaactccctgcctcaaagcgatctgtcagcctcagtctccctaagtgctggaagtacaggtgtgagccacagtgcccggccatctattttcaatagtgttttttgatgtacacaggtttggaattttgataatgttcaattcatccatttttttttttttttttttggttctttctactggaccaccactcttgagccctctaatccaacctccacgcggcagccagagggagctctctaaatgtaattactctttccctgctccacctgctcaaaacagtgtcacatttgtgatttaaaacagtatttctcaaacctaatttgcaaacaaagcaggtggaactcttcttgtatgcacagcatctgatttggttggtctggcatgggtctgggagtgagcacacctaccaagcggctgctggggtaacttgcgttttccactgatgatttcagcaatgtttccggtcccacatgctcctccagaaccttgtactcccccatgaaaaggtggagtccatttccccttcctttatttatttttttgagacgaagtttcactcttgttgcccaggctggagcgcaatggcgtgatctcagctcaccgcaacctccgcctcctgggttcaagcaatgcttctacctcagcctcccgagtagctgggattacaggtatgtgccaccacgcccagctaattttgtatttttagtagagacggggtttctccatgtcggccaggctggtctcaaactcccgacctcaggtgatccgcccgcctcagcctcccaaagtgctgggattacaggcgggagccaccgcgcccggctatttccccttcctttgaacctgatcaggacttgacgatggcatcaacatggtgagagtgaccctgcatggcttatgaggctgggttacacaaggcgatgttgcttctgactggctccctctcaggatacatgcccttggaacccatcctctaagctccttgggagcccaacttagcccatgtggagacaagacagggagagaaacagaggcacccccagccctcagccagcatcaaccgccagacaggagagcaaatgcgccaacaatgattccagctgaagcctcagacagcgtggagcagagatgagggatccctgcagattgcagatgcgtgagcaaaatgcatgctgtcactgttttgaaacaacaatgtctgggggctgtttgttatgcagcaatagacagctgtaacaatgctgttactgctgtattccatgaatgactgcactttgagtagcagggggctagatcactagataagccccatggcttctgtgtatgctatttttctacttttatatccttttcattcactttttttttttttttttttgagacagagtctcactctgttgcccaggtgggagtgcagtggtgcaatcttggcggactgcaacctccacttcccgggttcaagcaattattgtgcctcagcctcctgagtagctgcgactatagatgcacccccatgcctggctagtttccgtatttttagtagagacggggttttgccatgttggccaggctgatctcagactcctgacctcaggtgatccacccaccttggcctcccaaagtgctgggattacaggcgtgaaccactgcacccagcctcattcactttctttacttggctcatttttccttgttgcctcaattctcctctaagatcactttcctgacatttcagcctgggcctgttgccttctctgggtcccctccgcctcctgtgcctcccccatctcagccttgatccctcagattatacttcctctgtccccaccctgaccatcttggctgtccctggatagggatgggtatcttctcccactggtctgggagatctggaaggacaggcctggaaaagacttggtcactgctggaaggagctcagttagtgtggtgctgaggacagtacgggtgaggctggccccttcacccaaactcccactctcttccatagatttcacctctgtggcccaggccataggattagggcaactccccttaaacatcgagtccatcctccaagctgtccttttttttttttttttttttttttttgagacagagtctcgctctgttgcccaggctggagtgcagtggcgcgatctcggctcactgcaagctccacctccagggttcactccattctcctgcctcagcctcccgagtagctgggactacaggagcctgccaccacacccggctaattttttgtatttttagttgagacggggtttcaccgtgttagtcaggatggtctcgatctcctgacctcgtgatccgcccgcctcggcctcccaaagtgctgggattacaggcgtgagccatcgcgcccggcctcatgctgttcttgaatagtgagcacctgttacaagtcgccccaccagcctctcacttgtacccccctcatctctttctccccaagagacagaggaccctggcacttgtgaagcatgacccagaccctggggccatggcatccaacatcctcattccccatgacccctactgtctagatgtagctgccaagagacccccagactccccgggcctctgtctagagtgccaagacagagagagaatgccctgccgcttgcatgctttgtggggtgtccttcccccttccctggctgctaggcgtgacttcaacgttctccccaacccccaaacagcagcactgacaccagctgcagacctggctcaggttagctaatgaggaccaggctggggatggagcctgaacccctaaaccccagtcctgtaccccaccctaatcctggggtctccactggacaaaacgaagcagcttggtttttcgttgttattgtttttgagatagagtatctctctgtctcccaggttggagtgcagtggcgtgatctcagctcactgcagcctccgcctcccgggttcaagtgattcttgtgccgcagcctccccagtagctgggattacaggcgcgtgccaccacacccagctaatttttgtatttttagtagagacagggtttcaccatgttggccaggctggtctgaaactcctgacctcaagtgatttcccagcctcggcctcccaaagtggaagcggcttatttttaaggagaaaactcccgtggaaaggaatcagcacctcctctgtcaacatttcacttctctgaaaagactctcacttccaacagaaagtgctttgtaacacaacaatgaggctgggcgaggtggctcatgcctgtaatcccagcactttgggaagctgaggcgagtggatcacgaggtcagaagttcgagaccagcctgaccaatatggtgaaaccccgtctctactaaaaatacaaaaattagttccgtgtggtggcgtgagcctgtaatcccagctactcaggaggctgaggcaggagaatggcttgaacccaggagatggaggttgcaatgagccgagatcacgccactgcactccagcctgggcaacagagtgagactccgtctcaaaaaaaaaaaaaaaagaatgagaacatatggacacagggaggggaacaatacacacaaacaaaatttagaaacaggtgaaaataattttagtaatatttttactaatactgatatgctcaaaatattattatttcaataagtaatctaaaaattattgagatgtcttatgttcttttcatcatactaagcctttaatatttggtgtgtattttacactcacagcacatctcaatttgcagtccccatgtttcaagcactaaataaccatgtgtgtccggtggctaccatactggacagcgttgatctgaaatcgcatctgtatgcatcaccagcatatttgcagagatccccatctcagcagcacacctgaggctcatctgcgaaagcacctgcaacttctctacaacctcccacatcacctccaaacacatcctcatgtcatctgcaaacacacccatagctcacaggccaatgcctaaatatcattgcaggcaccttcagagaaagcacttactaaaggggtatacttgattccacatctgctttgacctgcaaatctcccttctcctttacatacatttgcatctcatttgtatgtcaatctaaatccactggcagagcctcagatcatcatctcaaagtcaggtggatgtggggctgggcaggcctccaggtgttcctcctcctgcttcctctggggctcttgatcctcctcctcttccttgctgctctcctcctcctcctccaatatggtgaccagttcctcccgcagcgcccccatctccagccccaggctgcacagctgtcccagcagctggacatccactcggcgcaggttcccctgccagtaggaaggggacgtcacagggatgccaccccagagagcaaggggtctctccaggacctgggtgagagcaggtcccaactcatgtcctggccacagcgcctgggcagggtcctcactgtgcccatggaccctaactgccttcctgcttctcagagtgtctcttgatctctaactcttctctttgtctctccatttcattgtccctgacttctctctctctgtctcctccctctcttatctatatctgtccctgtttccctttgtctctgtccccatttattttttgtctttccatgcccctgtctctctgtctttatgtgttgccatttctctgcccctgcctttggctctctttctctcgcttgccctctctctgccctccccaactttctcaaattcagtctgtctctccatctctgttcctgctctccgtctctgcttcccacctctgtccctctcttttgggatctccctgtccccacctctgttcccgtccctcactctatgtctgtctctcggtgtctgtacatgcctctcatgtctctgcttctatctctcagattctgtttttcgatctctggccttctctatttttgttcatttccattcattctcatttcctctctttctctttcccttccaaacccctcactcaccagctcctccctgatccacagcagactatcgcaggcacctccagtgtctgcccctgcagtcctgagggtctgaccagggatttccactggggagacctccctcagggcctgggggggtgggcccagccccggaggcaccagtccagcctgattcagctgcctccacagttccatcgtctctgagctatggctgcaaggagcaggaagtagcaaggtccagggtggcctggtcccctggggagctgtgtgcgtggtggagagtaaagggcagagggagtgggatgggggttcctgggaaaggtatcccaaagtccactcttcagagagaatcagctggccttgtgcttttctttttccttctgaagtctaacctcaactctgctcacagggttcaaacatagcctcttgcagaggtctaactccacccttccctgcctgtctcaggcctgacccctcaggggcgctcagtgtctgtagatgcctggcaccctctgtccttccacctgccccccaccaccacttctccagcctctcctcagcctccatttgacctctggcttgcccatagcttggtccttgcttgtcctcttggcacgggtcatcctagggctttcccaccagtgtgcctttgggggcaggaatggctcccaggggcaccaagacagcaatcccttagctggagtgcctgtgtccaggctgctggcctagggccaagcagccaattctgctgaccctggacttgcctatgggtatattatccctgttgagggtgagggcttctgctgtggaaaagtctgggaagcactgcaggcctctctcggccttggacccttccttcagacccaaggtgcatatatatacatatatataatggtagatcacgaggtcaggagatcaagaccatcctggccacatggtgaaaccccgtctctagtaaaacacaaaaaattagccgggcatgctgccgcgtgcctgtagtcccagctactcgggaggctgaggcaggagaatggtgtgaacccaggaggtggaggttgcagtaagccaagatcacgccactgcattccagcctggcgacagagcaagactccatcttaaaataaacaaatgaacaatatatatatatatgtattttgttttttgagacagagtctcgctctgtcatccaggctggactgcagtggtgcaatcttggctcactgcaacctccgcctcccgggttcaagcgattcccctgcctcagcctcctgaacagctggggttacaggtgcacgccaccacacctggcgaatttttgtatgtttagtggagacggggtttcaccatgttagccaggctggtctcaaacccctgacctcaggtgatctgcccacctcggcctcccaaagtgctgggattacaggcgtgagccaacgcgcccagccccaagtcccttttaccatagaaagtaacatagtcacagtgcccagggattcacaggtatggggagagggttcgttattcagctgccacacccaccttcctaaacctgctgcccttccagtttcctcacgtgcacagccacgcccgtctgcttttagtttctcaatctgttggcttaaccttcaaaacaggcccaggatttgagcacttctcaccattccctctgccccatccccattcatctcttgcctagactgctacagcagcctcttttactggtcccctgcatccacccttgccctctaaggcaagggtccccagtccctgggccaaggaccagtaccagcccctcgcctgctaggaactgggccgcacagcaagagatgagcagcgggtaagtgagcattaccgcctgagctccgcctcctgtcacatcagcagtggcattagattctcataggaggcaaaccctattgtgaactgtgcgtgcgggggatctaggttgcctgctccttatgagaatctaatgcctgatgatctcaggtggaacagtttcatcccaaaaccatccccaccccacccccgacccccagtctatggaaaaattgtcctccacgaaaccagtccctggtaacaaaacggttagggaccgctgctctaaggtacattctccacctggcagaaataatctttacaaaatgtaaatccgattttgacactcccttcttcccactgtgaatagaataaaaccctaccaggcctgcaccgtcagcccctgcccacctctcaacccagtctcctatctctgtctgcaagctggttcccacctcaaggcctctctgctctagaggctacctctccctgcagcgcttttcccctagatctttgaatggctctttccttatcattcacttctacttcaatgtcacctcttcagagaggcctttgctgatggccctacacccagtcacttttttttatctgcttctcatcaaaattgccttgctgattcctttgtttcttattcatcctctcccacatccatcctctcccagcccagaatgttgacttcctgagagagggactgggtctgtcctgctcaccatggtaacctcggcatctagaacagtgcctgccatcacgtggtaggtgctcagtaaatattcttggaactaatgaatgaataattctatccacaagacttcacaatggctcttcatgctgcgatctagctttcaactccaaactggtcttgagatctcacctcagtctctaaccttgacatctaacctcttcacccactctcttacctgaccctaatttttaaaaatgacgtggtcagcttttcagccccctcattccctgtttttaggaggtagtgagtggaagctggaagaataagaaagcttggggagactgcaattgcagtcaggaaagaaaggtactctgccgggaagaacaccccatcttctcctagggaaagattgtggagtcctggggtttgttttgtttttcaattttttgttttaagagacagcgtctcgctctgtcacccaggctggagtgcagtggcgcaatcacagctcactgcaacttcgacctccccggctcaagtgatccccccgcctcagcctcgtgagtagctgggaccacaggcgtgcaccaccacgcccggctaacattttattttttgtggatataaggttgccctatttctttgtggagataaaggctcccctatgttgcccaggctggtctcgaactcctggcttcaagcgatgctttcgcctcggcctccacaaagtgctgggttcacaggtgcgtgagcccgacctgtgtctcgttttgaagctcagggagagggcgctgtgagcaatccctaaaccctttaagagtaaaaagtgcgtgcacctttaagaggacggttagaaaacgcggggcgtggccacaggagaataagttcgcgctgaaccaggagcgtgggataagaccggccccttccggttacgaaaccttagcaagatggcggctccctgggcgtccctgcgcctggtcgcccccatgtggaatgggcgtatcaggggcatccatcgcctgggtgcggcagtggccccagagggcaatcagaagaagaaaaggacaatactccagttcctgaccaactatttctacgatgtggaggctctgagggattacttgctccaaagggagatgtacaaggtgcatgagaaaaatcggtttcgagacaaggagtggatcaggccagataagtatggccatttctctcaggagttctggaatttctgtgaagtgcctgtcgaagctgtggatgccggtgactgtgacatcaactacgagggcctggataacctcctccgcctgaaggagctccagtccttgtcgctgcagcgctgctgccacgtggacgactggtgtctcagccgcctctacccactggccgactcgttgcaggagctctcgctggccggttgcccccgcatctccgaacggggcctcgcctgcctccaccacctccagtgagacctcagctcaggctgggccacatgcccaggcacctctcccacctaacccagatgcaggagaggaagtggggaggggcaatgttaggcagttctcatatccccctgcatccatcacaaacctagagtatttatggtagatgagcagtcacagtgagtctctggaagaattaaatgactcctggttttcttcctttttgttttagtcaaaactgtgtgatatcgacgctgttgcagaacagcaggagctggagttgcatatttgcaattaacacagtgggcttcatgtgcctggacagctataaagattttattttaggaagctaaggttgaaatttggggccagtacctccctatacacacacacatgcacgcatgcacgcacgcacacacacacacgcacgcacacacactgtcctgtaaggttgaaatttggggccagtacctccctacacacacacacacacacacacacacacacacacgcacgctgtcctgtacctccctacacacacgcacacgctgtctgtacctccctacacacacacacacacacacacacgctgtccttatactggcttatctccctatacacacacacacacacacacacacgctgtcctgtac

SEQ ID NO: 735291 - DNA, 187860 bp, Homo sapiens
ctccaaggctgagggatgaggagacctgctgaggacccagggccttatctttccatcccactccataggtcccagtattgactgatgctgtcttcacctcctagcctcacttttaaccttctggcacccgcccaccactgtccagttcactattgaagccctgccgtccagtgctgcagagggaaaggatgttcttctactggcctgcaatatttcagaaactattcaagcctattattggcacaaggggaaaacggcagaagggagccctctcattgctggttatataacagacattcaagcaaatatcccaggggccgcatacagtggtcgagagacagtataccccaatggatccctgctgttccaaaacatcaccctggaggacgcaggatcctacaccctacgaaccataaatgccagttacgactctgaccaagcaactggccagctccacgtacaccgtgagtgattcccccatacctctgggtgctggcggtcagttctgcttcacacacatgagattgtcaggcctgggctgtgcctgcatccccctctgcattttgtcccgtgttgagatttgggcatttagtgcaggacacacacatggtaggtaaacttcaacagatcagaattcctttcctgcatccaggccctgcagacactgatggcgggggcgggggggcctcagcagggggaggtcagtctcagccaagcaccccatgccctccccatgaacctgaccctgagaaagaccctggagaactgggtcagggcctggcctgagggcgtcctgggaacctcacaaaagcccagcctcaggactcctgactccgtgtgaccccgggaagcctgtgtcagggctggggtgtggtctcctgggcagggcttactgggagcaaggatttaccagatgtctgcgggctgtggttcctgaagcttctcatcagtgagggctcagctcccagagtctcatctagacaaggacagagcctaccactttccctgggactcagcctggagagggcagggggacaggattactagggcattggccccctgaatgaggagcttaagagatgcccttgggcagtcagtggcccaggggtaggaacagaggggagaaaatgttcctggcagcttcttgtccaccggggatcatgcccaggggtgctctcccatggaggcaaataacagatgctgttgatgtgaacacctcctctgtgccaagcttcatgtcagatcctgtgaataatttaaagttcattcacagacaaagtggcaagcctcagaccattttccatttacatattgtatggaggggaaactgaggcacagagagatacagacaccggccacggtgggcagatcgcagctggcagagtcacatgagggctgtctgcagctgctgccacgtcctctccttcatccctggtgccttactaggtgtctgtggaccttagaacagccactggttcggatgttttcttcttaggtgtctacagctcggagggggagattctggtctggagagttatgagtaaatacagaattaatcagttttttcttaactaaatcacctgcctcaacaatcagtcagtgctggggaagttcaggcctcctcgctcaggtccacaccccgcatctctggacatgaaatggcttcgtgtgttttctgatgtgtgggtatcattccaacaggaggataaaggggaggactttgctttctctccccattcacaccctgcaccagccagggcccagtgtgagacacatactccgtagttctctcatgaaggagggagggaatgaatgaaggaatgatctataacctcttcagagacagagacctggatacaagatcctaggaggttctgggcccaacgtgagacacacactctgtagttctcttatgaaggagggagggattgaatgtaggaatgatctataacctcttcagagacagagatgtggatacaagatcctaggaggttctggccacacctgttttctgtccctctagagcctaagacccatgtctcattcatctggcccgtttctcctaaatctgcccctgggagctgagtctcatctgaccctggggctgcagggctgtgggaaggttttcaggggagggatcaggcttgcgggtagtcccacacgtttgccttacaccctggagctctacctggttctcactatgaatatcccataataatcccccctatcctttctggggagtagaaaaaaagtaaatatttaaaaatatgccagagcatctgttcttcttagcaagttcagatagttattagttagcaggaataaatcgttattttaccagagcctcacctgctgggggtttatgggagcctaactgactgaggggggtgggaaatatccaactccagccccctctagccatcatgtcccacctaaaggagagaaaaaactgagaggcacttgtgacattcacagcccagggcacagactctatccaggaccacagaacccctccctccccccactcaccaccgcatcactgaacgcctgctcacccaagttcctgttgcccagtacatcatgtcctggctttcaacaaaaactacaagacagactagaggcaaaaaaaaaaaaaaaaaaaatgcagttcgaaagacagaacaagcatcagaaccagatgcagatgtggcagggatgtggcagggatgttgaaattatcagaccaggaatttaaaacaactctggggccaggagcggtggctcatgcctgtaatcccagcatttgggaggccgaggcaggcagatcacctgaggtcaggagttcgataccagcctggccaacatggcaaaaccccgtctctactaaaaatacaaaaaattaggcaggcatggtggtgggtgcctgtaatcctagatactcggaaggctgaggcaggagaattgcttgaacctgtgaagcggaggttgcggtgagcctagattgtgccactgcactccagcctgggcaacagagcgagattccatctctaaaacaaacaaacaaaaaacaatactggctaatatgctaaaggctgcaatggaaagcatagacaatgtgcagaacagacggatgctgtgagcagagagatggacaggctaagaaagaataacaacagctactatatctatctatctatctatctatctatctatctatctatctatctatctatatatatgtatatatatgctagagatcaaactcactgtaacacctggatctcagagtggttgtgaggatgtttattaggagattaaagagattaaagcagagttatacacagggcgagagctcaactgatgctatcaactagtattcttatttttttgatgttgttattggcaataaaatcaggaacaatgcagtaaaaatttggttttatcatgtacgagttctgtgaccttccttgacttactgaggtactgtaagtctcagattctaactctgcagatggcggtgatgcccctctccctcaaggtgatgtgaggatgagatgagctgtaggtaggttggtgcccactgtgcctggcacatggaaggcccctgaaaatagtcaatgaacatcatccccgctcatcagcatggagttgacagtgagggctcgctctctgtgacaatcatggaatggaaaagaagaaacaagaggaagactgggcgcagtggctcatgcctgtaatcccagcactttgggaggccgaggcgggcagatcatctgaggtcaggagttcaagaccagcctggacaacatggcgaaatttcatctctactaaaaatataaaaattagcctggcatggtggcacaaacctgtaatcccagctacttgggaggctgaggcaagagaatcgcttgaacttgggagatggaggttgcagtgagccgagattgcgtcagtgcactccagtctgggtgacagagcaagactccatccaaaaaaaaaagaaaaagaaaaaagcaacagagggaagaggtgtgacatgagaggaagaagggatttaaaggtacaggagcagggcgaggtgcaagcacctgtgggagaatgtaggagttggtacatcccagtgtgtcaagtctgagacacagaaaatggtgcaaccgtggagagcaagggagtcagctatgaggacagcccaacagaccacactcaggctctggagcatttccttcctccctgactatgcccctgccctgcaatgccccttatggtttcccttggaacaaacttgggccttgtcccctttgccttcccctttctgcagaaaacaacgtcccaggccttcctgtgggggccgtcgctggcatcgtgactggggtcctggttggggtggctctggtggccgccctggtgtgttttctgcttctctccaggactggaaggtaccgcagcttttccccagcctcctcccacccctaggctgaccccagtcagggaggagggagaccccgccctgtattcagggccaggctttccgcatcctcccaaggaatccttccctctcattccatggctcctcccttgccagctgctgatcctaggctgcctcttcctttatgaatgtggcacagttaaggttgcacccctgagtgctgtcctagttccctaacacagcaaagccacagctgcctggagggaggaagggagggagggagggagggagataagacgggagtgctcagaacctggtaccttctgctgttcattgaatttacccacccagtgaggagggatttgcaggcttgagatccatggtgggggtcctgggcatggtcacgcagtggggagtggcaaagcctggacaggctgggtagggtcagcaccccatcgtgattgatgtccctgaggtgtgagatgggagaacctggacctcaggacctgctgtcctttatgtctcttgccaaggggtggagagagagaggacaaggccattgccccatttcagcatctccaggcctgaaaggagggtctggccatggcagggatactgagttctgggagaatatgatacatgctccttgcctccccatgcccccagctcccccagtgtcctgcacacacagccggccctgctttccctctggggccttgacccttcctctcaggcaaacgcaggtggtctgattccctccctgagtcctcagtccctttcctgggtccctgggtcaatgttctcctcacccggcatctgcctgggggggtccttcctctctggccaggacagacgtgactgcttaaggcctatcctcagctccccgtcctcggccgctcctaccacgaaactgatggagacaggaggccttcactccagtccttgaaaatggagtcccttccttgtcctttattctgcccctaaacctgtgatttctccctgcaccctcatgaataatcctgacctttcctagggccagcatccagcgtgacctcagggagcagccgcccccagcctccacccctggtgagtgtcccttcagcccaggtgtgggagcccctaggcctgccctacggtgtccactcctgccagtcaccccctgggggcctctgaccctttctttggggctgcaaggaggatgtcaggaaacatgacacaggggaccccgactgtcttgttcagactgatctgtgggctctgggtcgtgggtcacctcctcgacctcagctgctcaggtctcccctgggaagaggctccctctccctgattctctgggagctgaggacccctacactctcctgcaggaggggcccaggctctcctcccaccctgctgctcactcctgtctctgtccccaggccatggtccctctcacagatccaccttctcggtaagcctgttccctccccagcccttttctactggggtcccaacagtgcaggctcagggcagggggaccatcaaccccacagcacagcactgacccacctttccccagaacagtcaggtcaaagtgagtgcctccagccaggatccgggcctctctacagggccaggaccacccacgccatgtgctgacccctccccgggaccctctacacctgaggagaaccctggagtccagcaggtgcagaatggacactgggaccatcagtcagaggcccacattaacaagggtgcggggtgggcccagccaggacaggggtcagggtgttgtgtccacactgggaggctgagctcaggggcagagctggtcaatcctgaggggaaatgagtggaagtggaggcagggaagtaagtcctggccgatcagagacaggaaccttccaggctgggcttccgtgaccctccctccctgtcccctgacatctcctctctcccctgcccaggcccctctacccagccccagaacagccactcccatctatgaggtgagtgtgggccatggatgttctggtcccgcaggctccaggggacccaggatctgcccccaccagcacctggctgagctcagattcaggaaaatgcagtgaaaatgagaacaggtggtggtgagcagaggagggaggggcctgggaacagggaccccctgagcacagccaggttcagccccagagaagccctgggtgggcccagagcctgggagatgccagacactgttctgagaaggctacaggggttgaggcctcttctctgtttttacaggaattgctatactctgatgcaaacatttactgccagatcgaccacaaagcagatgtggtctcttaggttcctctgggagctgctcttgtgggttgatggagcgtccccaaagctcccagccctggggacggggaaggacatggagcctgagccagagaaccagctctgagtcctgaggagacacaggcctggggacagggagggatgggagtccctgctgaatatctggagaccctgacaggttgccctgggctctgggtgggccgggacaaaggcctctcatcaccacaggaagcgggggcttgcaaggaaagtgaatgggcctgtggcccacccggggtcaccaggaaaggatctgaataaagaggacccttcctctcattggctctttttctgctcacgggaacttagcagaaactcacctgaaactccgtgtccattctctcccgggtcacacagggaaaatatctccaccttgtctcaaccacagtctctcttccctgggaggcagaaataggggttgggagtcaggctggggtgggccctacacaggaaagggcaagattcacatgagccctgcccagccagccgagcgctcagctgtcctcacactaccccagggaccaaggccatgcacagccccagcctgggtccctctgtgaatgcatgtggggtctcaggagcacagaagatggggccatctgatgtccacaaaaggtgagcaatgcgggagcaaccatgggtggtataggttgcggctgtggcccctacgcagcctccagtgtcctgacccctgctgccctcttcacccaggccctggaggcccagtctatcactgtcctccacaaatgaacttacctgtccccaaatccaggatcctgtgtgcttatacctggccactaggttctcctctgtcccagtggctactgctcaggacatctttatccctggtggggcacagagaggggctgtcagagcaaccaagattaatacagacgcataattcagtccttgagcactacccaggactctggcccctcattgctcatcagttcccactttaccccctggcatggatctcactgagcaagccaactctttacacaggagcatccaggtcagaggtgcaggactcccccatctaaagctcatgcaggctcccatggcgatgggacaacctgtctgctcctctccctggcccacagccctatctcgcctgcagctcctccacacacctgggacagcagttctcagcccttccctgagggcccctggaagggtgatgatctcatataggttcacttgaaccaggtgccaccttcccacaagtgagctggtgcctgcactaaagcacagagccacagttcccaagagtgttctgccactgccacaggtcccaagagtgttctgccactgccacaggttgttcgtcctgagatgagaggtaagaaaacaacccgcaatgggttgttttatatcgggatttgcatcaggatttagctctaaatgacccctgatcccacctgcacacagcgtcagatgagacaaggtgaggcctctttagttttctgttgaggctgtgacaaattaccacaagcttagtgacatagaaacctgaaccaaagtgcccacatggctgtgttctttctagaggctccagggaagagtgcatttcctctccttttccacctcctagaggcctcctgcaaccttggctgtgtcctctttctccatcttcaaagccagcagcacagcatcttgaaactattctgtgccctgcttccatccccacatctccacctcctcccacctccctctctcacttaaaaggaaggagccttgtggttattttggacgcacctgggataaaccacaacaacctccccatctcatgatccttcctttaatctgtaaagtgtcctttaccacgtgacatgtccacagatctggggatgaggatgtacacatctttgagaggcccttgttctgtccatcactcctctcaaggccatcttctcatcatcgttcactacaaactacacatgggcacctggatgggttcatcatgactgtggcgtcagttcctgcattaacatccccagcaccctccagatcctgagagagggagacggagggctctccatgcccctagtacctctccaccttcttcttggtgacatgcttagttgctaagaataacagaaagcggaggtgactgaaagatcacaactcaccggcccttcaatagttcgtggacatcagcaccacggacagtgactcagtgaggctaatttccaggtggcagcagggagcatgcagataggagggaactgcaggaaaagctgcccattctattctatatgagaaagagtgtaagaaagaggaagctattacagggataatgctattcttctctaatccataaattgcgaaacctttgcatgtctggatatcatggtttttagcacatctgctgccactccctgcagggctgattgctgcatccaggatgtggtctcttggggggctcacagcctgctttggcctcatggtgagtctccctgcccctgacactcaggccactgtctctgcctacaacatggtgggaaccttccatgattaacgtctgattctctgtgcctgacctttgaagcacatccatcactcagcctggagcatccgctgagctcagcatcctgctcctccatccccagctgagcccttgaggagatgcttgagaggatctcctgggctcctctgtgagctcctccaggctgagccttgtgcttggtgtcagaggcctttgccatctgcttgttctttccataggcaaataatcctcctcagggacaagtggggcctgaagatctgtctgaatatctatctatctatctatctatctatctatctatctatctatctatcatctatctatatgtatgtatatatgagaatgctttattaggcaaaactgcatactatgaacatgctttaaaatgcaacaggatgagatgtgaagacataaagaacaagtgtgtagtgacacatggctatcagaacacactgaagaatccacaccgcggccgagagcagtggctcacgcctgtagtcccagcacttttggaggctgaggcaggcagatcacttgaggacaggtgttcgagaccagcctgaccaacatggtgaaaccccatctctactaaaaatacaaaaaatttagccgggcctggtggctcatgcctgtagtcctggctgttcgggaggctgaggcaggagaattgcctgaacctgggagacacaagttgcagtgagctgagatcgcaccactgcactccagcctgggagatagagtgaggctccatctaaaaacaaaacaaaacaaaaagaatccacactgcttccccgcttcactttacccagaaaaggaatgttctaggccacttcctcttcagcacacatccccagggaactaaaataggttcacagtcacccccatcttcctcattcccatcacctcttacccacagaggcatctctggtcctacagatccagccctgccttcaagaggcacaggtccaacccatccagtgtccctgctagtcacacacagcactcagggtacaatggagggcttctgtgctttggatgggaacaaaccccacctcacattcccacacctgagaagccaccagggtcctctctgtcctgtcctcacactcaatgtctgtcctgggtcacccttgtcatctctcctggaaataggcatggctcctgacaggtaggattgaggctttgtcttttcaggagtccctcccactctgagcacatgaaactgctcagctccatgcaaccctctctcaccaggggccttgttctctgggtccctgaatacctgggtccatgccatgtacattttaagaaaaatgacagtgactctcaccctgacatcctcacccaaggcacgtgtctgacaagaatcaccaggtgagatacctgtggctccacacacctgaggcttcactgcgcaggggtgtcctcatccctctcctcccacccctagggacagtaagcaccacaggctgccttggaccaccagctccccctcccagacacagcctcagatctatactgacatgctacatggagaggctctgatgaacagcaggtattaggaaatcccaccgaaccaggtgccacttgcggccccactcctcctcatatctgtgactgggacagacacacataacacacctctgttcaccgcccagcccccaaggtcaatcacagtctgcttctcccctagatccactgctccccatgtcttccgtcctcagctgcatcctgggtggcctccttgctgttcttgtaccccagaggcaggttccaacctttgtgatgttgcctgcaatgcccaaactttcccttccccttccccttcccttttcccctcccccttcccctccccttcccctccccacccctatcccttcgtcttcccttgtcttcccttcccttccctataaagccaaacatacccatccacctaccttgtggtcaaagtcatcagcctcctgctccactcagtgttctctgaccctgcatatggaggtggtggcccctcctagaacacccaccactcactgtcagccttgcgtggtaatcacagattttgcaggggttacctgtgttcaggtgtgtcacctgtggaaccagaactcttggaaggactggcagagggagctgcttaggatatctcagggctcctggcatctggtctaccacagggctattaacaacagcacttagggacaaggtggaggatggacggttaagagggtaaatatggatgatgtgtgggcaaagaataggacacaggaacacatgcagtactcaaataattatgccaagaaaggtgaggacatggagatggacattcccatatacttctgatgggactgcagtttagtccctacagcaacattgacctcatcatgtttaacgcgcacacgctctgaccactatcctacttctgaaggcctccctgtgctgtgagctctgagaaggccaagcttgcctgttctgtctctgctaaagccagagaccagccaatagcccagcacagggtacttcataaatacatgttgaaggaatgagctccaggaacagtactccacatggtagagatgtgtgtatgaggatgttcactgcagaaggtcatgtcaatgtgacaagtgacgagcagcctcaaatccagcaacaggggtgtgggtaaaagatcatagtgtagccatgcaatggaaccaatgaaaaaaccacaattagagcaaatccacatgtattaataaaggaggtgccctccatacatgctgcacctaacagaatgttgccaaataagaatgaaaaatgatgatatttgggctgtaaaaactagaagtcagctaaataagaatgcatcgaaagtatttgtgaatgcttacaattttataatgccttggcatccgttttggatggaagttggactttctcataccagaagcagggctcagtcacctttgaaatagtttccagttctccacctccttccagttcctcagtgtgattgatcagatatctgatttatacaactgcctcctggtgacctcctccctatgggacttccggatacagcccgtatgactgccccactgaccccacaccctgcctgctgcagtgaccacctctaattacctggatctcatgtctgcttgcattaaatccaccaattaaaactccctgaggacaatctgtttgaataatattctgtaccctaataaaggccttgacccatgggttccccctctgtcctccccatactgcccctgacctctgtgtgtgtgtgtgggtgtgggtgtatgtgtgtgtgtgtgtgtgtgtcctccagacagggcctgtatcccccaggacctgtaagtaataaatctttattttcatcttatgtctctcgcaatcattggcaagagctctgcatcttaaagatcgcaaatttaagaaattggtgtagtcggcacaatagagtacctcttctgtttagcacaagatatctcggagctgctgaggcttttaacatcctcgccggtgtggctgcctcactggtgaggccgttctgttcagtgcaattcagttgctccactgtgtgctgctgtgttgctgctgtagagtgctgccatgttgttctccccaaattgttaccgagtaggaacctgtaatgtgctcccaaggtggtctaccccatgagaagggggattctccatctagggcaagggctaggtgtgtttctggaatcctaatagggaaggcatccacagagggtgaactccactcctccttagagtgaggagtgacatttcccatttattttccccatggaggtgccatgtattgactttttctttcactgtcccaaggttgagccaaggtgagctatggagaccagggcaagataccatttctgttagcaaagcaaatgggtgacaacgtgtggagaagctgtggttctcctgatggatatagcagagtgccatttagtaaaatcttgtcaggaggctgcccctggttagaccggcagtgtctgtagtcactaaggtggatgcgaattttaggccctgggccatggataatccctgcagacacagccgtggcttcatgtgatggggcaatcccgggctagtggctcccttgtttctgcatttcttgctgtggttgcacaatcaacacctcaggggttgattgggtcaccttggaaagagaaacagctgcctaggaggctggtgcacatggaggccaccctcaattttattctgctaacaagttgtaagattaaaacaacagggggctttgggtaccatcaggaacttgtcaagtaaacatccaaagacagaaagaagaaaaagaaaaagacattaaccgtctagaaatacaagccattttaaagattttgcttaaaagatgcgcttgggctgggagcggtggctcacacctgtaatcccagcactttgggaggccaaggtgggtggatcgactgaggtcaggagttcaagaccagcctgaccaacatggtgaaacctcgcctctactaaaaatacaaaaaattagcagggcatggtggcaggtgcctgtaatcccagctacttgggtggagaatcgcttgaacccgggaggcagagacggcagtgagccaagatcgcaccactgtactccagtctgggcgacagagtgagacttcatctcaaaaaaaaaaaaaaaaaaaaaaaaaagacgggcttgtttcgtcgttgtggagtcatcccagagagaggctactccctagagtcactgaccacctttcctcctccatcttttcctcttatcattctagagacagaaaacaagaatctcagctttaggtggctaacctcaccccccaagaaaagaaactaccactttgattgactacaaatccaagaaaaataaaagagaaactttaaaaagtactgagcaaaccacaggtctagcaaacataatgctagccctaggttacttattcatttacaacaaacccctagatataggaggaaaaaataaaaggtaattaaatatatacacatacaatattttaatataaatatataataaatagttaaattatgtatgtataatatgtaactaaatcaaagtaaaatttcatactttgattctattggaaattcaaaattcatttattaacttatatattaaggaatttatgtaaaaaaagatttttaaaagggcaccaatttgcttttgtgtctctacaacataggatctaatttaactttacatttgctaaatacactaattgacaaatattcatggatttaatcaatactggggctcaaattgtagccacacgtgggaatcccataaatttaaacactctgtccctattatcttgagaagaaaactaaatataaaattgaaaaaaacaggtatgtctcaatttacctgtaactttgcctaaatttcccggagtcatatacccattgctgtaaaacattctctattggacataggtgctctgagacaataaataaaatagaagtgtttttggtacttagacattggcttgacaaaatgggatcccatgaaacctcagttaagatagtgaatacggcccaatgtgagttgaaatggggcctttaaggattaaaacttattacatgaaacctagtaagtaatggggtgattatccatactgcttctccatttcatagcccaattttgacagttgtcaaatctggaaaaaacaaacaaacaaacaaaaaaacccctgggaatctgttgcctcacagagacacaaagtagacatcaaaattgtatatctcagttccagttccaaaatggtggcatagaagcaagctggctttactccttcacacagaaaaccaaaaacaaatatacagcaccaaaattattaccagatatattccagaactcaaatatgaaaatgaaacagttttcagagccacagagaagtgaaaaaaactcccgacagatgacaaaagaatcagatttccccatctgtaatgtccctccctgccccattctgcctggtaccaggtgtgtggaaaattttaccccaactcatggtttctacactgggaaatgtaagatcaatgcgggcaaccagtttctgcacaatcctgggttccctgtccctgccttaacccacaagaagcattgtgagtgcccgaagggagaaatttccctgaggacagtcaaagagtggggaggcaggactaccatctccttccctggaaactctgctgtgtaactcagccaagggagacatgaaatcagactggtgtttcagcagctccatgttgtagtaggtttgtttcacaggtatcctgggcatggacatctagccagctttcccacactgccaggatatcccctttgggacctccctcagttaggaagggcacactctgatcatttactagggccaaggtaaaccctaaaggtaacttagagatgaaaaggaggtagtgacctagcagtaaagaactctaagaaaatctatccaataaaaatcaaaacaagccagacaaagactaaaataaataatgaatccttcaatgtaaagacctggacttacatccacaagaaacagtaagcaggtaaccatgatctccccacatggacaaagtgaggaacaagtgactgatcctgatgagatggtgatgtgtgagctctctaatcaagaattcaaaactgcagttttaaggaaactcaatgatcttcaagaaaacatggaaaagcagttcagaaatttatcagagaaatttaacgaagggattgaaataatttaaagaaaacaaacaggaatcttggaattgagaaatatatttgctgaacaggaaaatttattagagtctctcaacagcagaatggatcagaggaaagaatcaacccaaataagactcccccaaggcataaaataatcgaattctcaaaagtcaagggcaaagagaagattttaaaacagaaagagaaaagaagcaaatggcataaagaagctccaattctgtggcaacagattttcagtggaaatcatacagaccaggagggagtgacatgacattctcaaaatgctgaaaaaatattgacatttgagaatactttatccagtgaagttatccttcaatataaaggagagagaaagtttcctagacaaacaaaagctgagataattcacaccatcagactagtcttcctgtaaatactaaagggtaaatactaaatacttcaatgtgaaagtaaaaaaaaaaacactaacatgcaaaacaaccacaacaacaataacaacatttgaaggtataaaatccactggtgaaattaagtacgtagacaaacccagaatactcaaatagtaattgtggaaagtaatccaatcataactctagcatgagtctcaaaatataaatctatcaaaaacaataatacattttaggaggccaaggttggcagattccttgaggtcaagagttcaagaccagcctggtcaaaatggtgaaaccccatctctaccaaaaaatacaaaaatttgcagggtatggtagcacatgcctgtcgtttcagctatttgggaggctgaggcaggagaattgcttgaacccaggaggtggaggttgcagtgagctgagattgcactactgcactccagcctgggtgacagagggagactctgtcttaaaaaaaaatagctacctgtttggagaaaggtaatataaaatatgtaaatagagacaaagtcaaaatttgcaaaggatgaaattaaagagtagagtttttttggggggttttctgtttctattattttatttgtgatctaagataagttgttaccttttcttctcttgaagatactttgttatatctatgtttttggaagtcttatggtaactgcaacgcaaaaaatctatgatagatccactgaaaataaaaaacaatgacttaaaacatactaccagagacaatcaaccacaaggaagacagtaaaaaatgaagaaaggaagaggggagttacaaaacaaccagaaaacaggcaacaaagtggcagtagtaagttcttacttaaaaatattgaacactgaatataaatggactctattctccaattaaaaggcatagagtggctgaatgctgcctatatgctgcctacaagaaaccacttcatgtaaaaagatacaaatagactgaaagtgaagggggtggaaaaagatatttcatgcaagtggaaaccaaaagagagcaggagtagctatactgatatgagataaactacaaatcaaagactataaaaagagacaaagaaagtcactatgtaatgataaagcgctcagttcagcaagaggagatgccaattataaatatctatgcatccaacacttgagctcccaagtctcccaagtatttaaagcaaacaatagtggatctaaaaggagagatagactgaatacaatattaattaggggactttaacaccctgctctcagcaatggccagatctttcagacagaaaatcaacaaggaaacttcaaagttaaactacacactagatcaaataggcctaactggcatttacgggacatttcactaactatctaactgttacagaattcacattattttcatcagcacatagaacattcttcagaacagaccacatcttaagtcccaaaaccagtcagaataaattcaaaaaagtttatatcacatcaagcatttgttctgaccacaatggaataaaactacaataaatgaataactttctggacacatacaacctaccaagatggaagcatgaaaaggcagaaaaacccaacaaaccaacatgaaactgtaacaaaaggaaaacccaggaccgaatgacttcactgctgaattctaccaaacatttaataagaactaaaaccaattctactcaaaatgctttaaaaaattgaagaggatggaacactttcaaactcattctacaaggtcagcattatcctgataccaaaaccagacaaggacaggacaaaaacaaacaaacaaacaaacaaacaaacaaacaaaaaaacactacaggattgcttgaggccaggagtttgagatcagcctgggcaacatagtcagaaccaatctcttaaaaaaaaaaaaaaagaaaaaaattagccaggcatggtggcatgtgcctttagtcctagctactcgggaggctgaggtgagaggaccaattgagcccaggaggttgaggccgcagtgagccatgtttgtgtcactgtactccagcctggggaacagagcaagatgctctctcaaaaacaaaaagcaagctgggtgtggtggctcctgcctgtaatcacagcactttggaaggctgaggtgggagaactgcttaagcccaggagttcaagaccagtctggacaacatagggggactccatctctcaaaaacaaccaaccaaaacaaagccaaaaaagaacataggccaacatcactaacaaacatagatgtaaaagtcctcaataaaatattaacaaaccatgtttagaaacacatcaaaagagatcattcactatgattaagtgagattcatcccagggatgccagtatggctcaacatatgcaaatcaataaatgtgatccatcacattaaagagaaccaagaacaaaaaccatataatcactccagcaagtgcagaaaaggcatttaataaaagaatgggttgagggagtggagcccatagtcagagcagcagtggtctgggattttggaagtagaaagaagggcagcaccactggccaggaccaccagggaacacccccataggccctgggtgttgtgctccagggagggttccctctggagttattaatcttggtgtccactttgcccagctgcccctcacagggtcagggaggatgaagggaaagcttccttctaatgaaagttcagggactcacagttcctagagcctgtagggagaggaagatcttcgaggaagagcacctgggcattggggcgtttgagaggaagatctatgccaggtccaagtggacaacctgtggactctctctccagggacatacgggtatctgggaatctcctgtagcttaaagaggtaaagacctctccctttagcctgaggactggaggatgctggttcaggtgaatgagtcctgcaggggctggtacaggcctggagggtggtggtgtccagggccttgggttcacccttagcatgattcaggccgggcggtgtttcacatgagcaagagggcctgggttcattgcttcaggacaatggtgaaatctcatggtggaagaaatcttgtccttgccagtgcccagctttcatttggtcttggcccagagtgtcctccctagagaagactcttgtcccttcttcacactgcccttcagggatatgccagccttatgggataagatggggtggagactgtagatgtgggtgggaatctctccacagagtgctccttctctcagcggttgcaccttgtctcagggcttcagcttgaaatctgggatctccaagcccttccctccccagtcctggccaggaccacatgggcagatgcattgtgtgaagtgcatttcatttggggtgtcctctctgcatggcaccctcccgttgattctctttgcgcatgtcagagtgcaggcaccatccacacctcctgctggaggagggacggagctgttgactcctgagagctgatcatgtgttcccaccctcacacacaatcatggtccatcctctgagggacatgtgttgccaccactgtggagatggtgcaactgacagtaacaaacagtaaaatctggtactgaatgggaccttaagccaacaatgacaatgtcattccaaggtgtttcatttttattgattcaatgcaagtcacctgatttcattgactattcacaatagctcgataaagtaaatgcatcatcaccaccactttaaagaggaaaaaggtgcttgggcagtttgtgactactgtggtggctgctgcattgctctctggtaaagccaagtaggtggtgggtgcggcctctgggctgggatgatccaccctcctggtggtggcaggggagccaagctggagccatggcctgtgcagtggtagcagctgaactgaccgctgctgcaggatttgcaagctgttacattttgcgaagccatgaagcacataaaacctcaagtagaacaagtgtttcaaagtctaccaaaatctgccttcagagattattactacagaggtggatatgaacccaaaatgacaaaacgggaagcagcattaatactagataatgaatgaacactagtaatagtagggtaagccctactgccaataaagaaaaaaataagagatgctcattaacatgttatgctcttaaatcacgcagacaaaagagggtctccttatatagtagccacaatcaatgaagctaaagatttactgcaagatcaagctaaaaacagtaggtgtataatgaatttttaacttcatattagtttatgtatatgaatatcaagtttttataataaaatgcctccaaacaaagaatatttgatttagggtttaataacttctaagaggggactcagatgtttcctgtttcacagtcagtctgagagggtcatttttcctggagctgacctgggtggaggcctcacactgatactccccagcatcctctctcctgatggggtttatgctgagcatacagtggccctgggacagctccattctctccatgagtcacagacgctggtcatggaagatccactggataaggttccagagtcatctgtggggcaggtcaggatcacaacatccttttcttctgtgactctggtgttgctgactcagatggggtcggagccactgaccctgtggacaatcagtggaggtgctcaactgaaagtgggctgagggcacgtcttctcctccatccctgggtccttaaggtaactgtggaccccagaccaactgacacaggagctagaaagaaattatttaggaagttagtgagggtaagagcgtccttggcaaggtttcccctttaacaaaaagcagcccaagataattccttttctaacaaagagcagcctgaaaaattgagctacagatgtagatgagcaagatggaagcttgcacaggtgaattccagtaggtgtgccaatagaaaagggctgcctggaagccaggtatgttcaacatggagactccatcctcccttttctccattaccacatgtacagtaaaaaaccaggcaacatggcaccggccaggtagacaatccatctgcatgacaaaagatcagagtggggcagccagcaaatggcacagctggtctaaacaatctttcaccccctgtataaatcagacactgcctcctgaagctcatctataaaaccttctgcatttcactatggaagtggcaacccattttccccaggacccctctctctgtgcagagagctcttctctttctttcccctatgaaacttccactcttaacttcactctgggtgcctgcatcctagttttccatggccatgggacaatgaacctcgagtattaccccagatgaatgatgctgtttcacaatcactggttcagctcccttcttcttagggtttcacagctcggtggggagaataccacgcctcagtggtctggggagtgaggaacaaatgaagaattaatcagattttacttagaacgctatcacctgcctcaaccatcagatccatgttgggaatgtccaggcctcctctcttagatctatacccacttcactggacctgaaatcctgtgtttcccgatgtgttggtgtcactcctatgagaggataaaggagagaactttgctttctctccccactcacaccctgcacaagacagggcccaatatgagacacacactcgctcagtagttctctcatgaaggagggagggagtgacctcgagtgattctgccatctgtagtctgtgtaccctggccagtggctgtatcttcatatgcctcagtttcccctcagtaaaataggacacacaatgagaactaaaaataaaattctaattccccagtgaactgaaaggatggcctcttggccaagcggatcccagagttcctgatcatgacaggatgggaggttacacctcattacagcccctccctttggaagtttagaggtgacaactgactagcattaacgctaaaatcgagatcatgagactgacagaacagactctctgtggccataagataccaaattataaactcaacctaaggtcatgcaggcaagggctaagccacactttcctacatttaaagaataagctatgttctaacacagaattttctttctctctagcggctaaagtaacactagccttcgagataagcaatattgaaatgatcgcggctcatccaccaacactggctaactgacccctgttccaacagccacaactacacttcaattggacaggagactgatttcagtaactttctcctaataagagaccactgagcatggcctggttctgctggtatacagacacggtgcactgagtaccataatgcttgtttcatcttttgatgtataagacctaatttaatacatttaaatctgaattctccaccccaaagtgaacatggggtgcatgtagcatgcatgtttgttgatcacgcatgtgcgtgtacttcctttgtgagtatccatagctccacctataacctgttgaatatgtatacctggccaactcattcagcataaatctatcttccacattcccctcccttgaagtgcctgctattggtctctgctggaggctgcatcttctaccctggggaatggccagcctgcaggctgtaaccctgtgtaagaaataacctggttgggtgcagtggctcacacctgtaatcccagtggtttgggaggttgaagtggtagaatagtttgagctcaggagccagagactagcctgggcagcatagcaagatcctgtctcttaaaaaaattttagggaggagagtgaggatcagaaaaaatacctattggctattatgcttagtacttggatcatgaaataatctgtataccaaacccctgattacatatataacaaacctgcatgcgtatctttgaacctaagataaaagtttgttttaaaaactatctgggtgcagtggtgcatgcctatagttccagctactcgagactgaggtgtgaggagtgcttgagctcgggggattgaggctgcagtgaattatggtcccacctgtgagtagccacttcactcaaacctgggagacagagcaagaaccggtctctaaaaaaaaataaaaatagaaaaataaaatgaaaaatatatgaaataaagtctcctttccaaacgtacagatctccgatttttctgccaacaatgataaatggtcagtggcttgccatgttgtctgtgaattacttttaaaatattcacgatcacctgacctaaaggttggtaccaaggaaccgcctgaatacaccgtctctgattatttgcctccaacagagtgttccctgggcctgatctctggtggacaatgagctgctgggaacatcctctcttctctattcctcccctggggatgctgaccttcccttggagtctcctaagttccccagggcagtcggctaatgtcctagggagcttacctgtcttctccataccaagtctcatgtgaaggacgaggctttgcccttgcccagatgaggctctgggggctgagccctggctggctaccagctgcaagagccatggcccttggacagctggtaaatccttgttcccagtcagccctgcccaagatgcctcaacccagccccggcacaggcttcccagggtcacatggagtcaggatcctgggacaggggactggacaggggtttccagggctgagtttctgaacaggggcttcccaggggtcccctcactccaggatctgacatggtcctacaaggaacgtccatggggaggggacccaggagggggaactgacactgacctccccttactgagcctccccccaaccccatcagactgtccttcctctgtagcaagtgcctgcagggtctggatgcaggaaagaaattctgatctgtggaagtttgtctcccctgtgtgtgtcttgcactaaatgtccaaacccccaaatgggatgtaatgtagagggggacacaggcacagcccaggcctgaaaatcctgtgtgtgtgaagcagaactgacccccaacacccagagctcatgagacatcactgtgtacgtgaaactggccagttacttcttcattcacaagatctgtttttatgacttgtagggtgtaggatcctgtgtcattgttggtgacattctgtatcagcagacatgtattggggtatattgtctctcagcctctgtggcaggtcctggggtaattacttgagttcctagtacatatcctgtaattcccctttgtaccagttgtagccaagcctaaggcagattgtgggtgagtggaagaatctccttgccttctgcagcttcaacagtgacttgggcagtggtaggcaagttccagaaagttaaaagtgaggctaggagtggggagagagcatcagttaatactgggccctatgcattgaggtggaaagatggggccctaggtcctggacaggtctcttcatccctcagccttggagtgtgtgtgtgtgtgtgtgtgtgtgtgtgtgtgtgtgtgtgcgcgcgcgcgcgtgcgtgcgtgtcctactgggccaaggtcagcagcatgacctcccttccttcagtgcctctgaccttggcatttccctgtttggagtccttttccccaggggtctgcctggctccctccctactgccttcaggtcctgctcacattagggcatccttgggagaccccttccctgacacctctagagaccctgggtcttccctttctgacctttcgctgctgtgttccctccagggctcttgtcaatacttgacctcacattctagatacccttgcatgtctgtcttcctccctatgagagcatgagctctgtgagaacagggacttgtgtgatcttggttgcaccccagtgcctgggacaggctgcggactcctgtggatgagctcatgagtgttcccagggcccttcacaacgtgggatttattttccaatggctgaggttgttggctaagagctctgttggagttcaatcaggctggtgggaaaaatattagagatagttatagagatagacacaaatcttcttggaagaccaaaaagtttgcataactttggtaatagatctgactgaaggtggtccctttacctttagttaaacaaattaaagtagtaacaaaggaaggcagagtagtttgtctagccagcttgtttactcatgtgatcttaagactaaccattgatgtgccacaggtgcttaattgctttctacttgggaagtccacaatgtcaattaccctctaacggtgttgactcaagcctttgttaattaatcttactgaataaatatgagtctcactagctgatcaaggccatggtcacaactgtttataggactcagcagggagtctgtaagcggccctgacagactcagctggactggcaaagcaaaatatgtgtgtgtcagtgtacactattcacccgtcccccacagctggtgcccctatatgaggagtgctgccacagagctctgtttagtgtcccttgttttttttcttgagtattaccccaacttaaattgtgattattgtcatctgttttcaacattaactgctcagtgatgattcacttggaaaacattaacaatcgagattgtttcttcactaacaacctcagattatttagattttcctgttgtaatcccttcttcctgtttagtgtccaacagaagccctctgtccctctcaggtccccgttctctccaagaaaccccagccagtctctgtgctccctcctcccatccactcccagggagccctcccctcacctgtgagcagaagcgcctgccagggatgtgcactctgtgaggaggggctgagggaggccccatgggctctgctgtctgctttgtcctcctctgtggagaggagcttgggcttcagaaaataaggaggccagaaagtaaggaacaggctgagaaataatggggatgtgtcgaaaggtcacagatgccaacatctttgtcctatgcaatattatccataaaattacaggtttgagatatgcttaaattttcttctaacatgcattaaaataaacatataacttttaatagttatattaaattgtatttaatataaattaaatgctcttgtcagagctactgtgactgtcagctctgctgtccttcctctctctgtgctaagcctcctcccagggcagaagcacttcccagggccaggggtgggggcggggaaaggtaagtggcaatgaggatctgcacaggtagcctttccgcctcctcccctctcagtcctgcctccttgtcttcttttcctctttttctccaatctacatttcagttccttagaccacgctgtgagaagcaaggcttattgggacccccatcccttaacaggatgacctgtgctccccataagtgacctctgctgtgtctagggattggctctgtcagcacctcacagagagtccctggggcccccaaactcagtgttattttctctatgacacagaaacccctctgggtatgcaaggttttcctcatgttttctaatgtctgggaaggttggatttactcccagcagggaggtcacagagatgtccagggagtggggtcctagaaatggacaaatctagagctaaagcccaggtctacgattttcagttgtttttttctgcagtgctatgtgaccctaatttcctaggagtaactaaaatgcaaacctcagacatttgtagacattttatgatttttctctacagcttgtaccactgttattattatttgctttatgctttttcctaaataaatttactttacaaaacatccttgtcctagtagggtgcaggggctcacgtctgtgatctcagctgcttgagaggttgaggtgggtggattgcttgaggacgggaatttgagacaaaacatctttgtcctatgcaatattatccataaaattacaggtttgagatatgcttaaattttcttctaacatgtattaaaataaacatataacttttaatcatcatattaaattgtatttaatataaatttatatacaatacatttttatataataaattatatatataaatgtatatataatagtttttcttttttgagatggagtctggctctgtctcccaggctggagtgcagtggcacgatctcagctcactgcagcctccgccttctgggttcaaacgattctcctacctcagcctcccgagtagctgggattacaggcgcctgccgccacgcccagctaatttttgtacttttttagtagagatggggtttcgccatgttggccaggctggtctcaaacacctgacttcaggtgatatgccgcctcggcctcccaaagtgctgggattacaggcatgagccaccatgcctggcctatatattttatataattatataaagttttctataataaattttatataataatatataaaatggatatttatttaagataaagttattagttttatatatttacatatatttaggaataaatgtgttactgtgggagcccagtgcccaggcaggtagtcagtacatgatggttgtcattagggttaatactttggaattctggattttttcccaagagagtgtctacgctggaatattgggcttgtggctttctgctgatgtgcatgtgtgaagaagctacttccacttattaggacttgtgtatctgtctcgcagtttcactacctattttctcgtgatgttggtcaagtcgcctaacttttctgtgcctcatttacctaatttgtagaatatgggtaacagtacacaagtgtgagtgtgtatttcccaggactgaccactagagggcgtgaaggcaccggcacttactattacagcaatgggtgtagtagtgctcatggtcgtaaacatcattctcccatgaaaggaaccagggcttcctgggagaaataactgattccagggctggggccggaaagcacaagcggagcctggagcatctcgtgaggccagaaagtaaggagccggctgaaaaataatggagatctgtcgaaaggtcacagatgccaaccagaaggagctttgaatgaccaattttgagacaaaatgagcactataagaaataatgatagtaataaattccaacccataaatacccatgagttcctactaatataaataaataattgaatacataaatatataaggatgaagaaacagctttttcttacagcagaattccaattaatgaatgtagaaggaatgatcaaatagaaaatcactatttggctaacagcacagtcaattgtttgtaggcaagaattatcaatggactttaaatatgaatgggtaaaagtatgatgatgctacaactagtgagtaccaagggggaaaaaaaagtacgttgagaagaaacaggctacttccatattcccaaagtatcacttcaggagctacttattgattataatgggacaaatagtaacttacagtagagaaacctggcaacagagtctctccgaggtacaaaggctctcttcaggaaggaggtaaggggaaggaagaagaaaacactgtcctgcctcaattatttgctttccccattctcaagtgtacttcatagacattcaaagatatgtgttgatagtgtccacgatccacatggctctattatagtcatttattcacacatacattcagtgaggctttgagtgcctaatgtgtgcctgatatttgctagatggtggatgctgagaagatcaggtgtgctgctgtctctagggtgactgaatccacctgccccactttacagatgtggaaattaaagtgaaaaggatttataggattagttcactgtcacaaggtcactagccttaaagttacaggagtaaagcaagtttcctgacttgctagattttctgctgcaggtgctgacaatggtgagctccaataggagagaggacactcagagtgaagtgggagccctgaacaccctggattagccaagaggacatgccgggtccagctgtgaccgcacaaaggaccattggggatatttgtattctctttttcacttagagcttgaaatgaggaaaactaagtgcagaaaaccaagagtggaagatttttcacaaagcactggtaacatgcatcagaaaaccctgtgctgatgtctgtcacggtgtttctcactgaacggtaatagtctggctttgagtgtgttccctctacagcctggagttctgcgaggcagggaccaggtgtgattcatctttgtctctccagtgacagtacacagcaggctctgataaatatttcttacaaaataaaatggaataaaaagtagacatctgcacaggtgtgggatgactgagcagcagcagaagcaggaaaagtcagcgtccccagatcagctgatgtggtgttcggattctagataggggtgaggtgccaggatggggatgggggtcctgtggctctgctgccctgggggacacccctaggtttcacagtgcctgctgtggttgctgcactttgcttccccatgggaaagtgatcagagggtgtggggcttcaggtgaccccatgtgggaaatggccaagggaaggtggggtgggcggcacatggttttttttaaccaatatttgaaggtaggttgtatgaaaaggtgttaggcttatttcagcttatggggagtaggacagggattggtgagtgtgtatcaggtatattttggctcaggatggaaaagaactgtcacagtaacataaggtcttttgggaaattacatgtttactggcagagttcaggccagggctgggtgtctgaaaatacctgtcagggtcacttttatggttacaagggcagagcttggcttggaaccaggtttcttactaataccacatattaagtattataaaaactgtcctttgcaataggacattgctctatgatgcaggttgaggtccctctgtttaagtaattgtgggtggctgtgattctctcatctagtctgcgacttggacttcacctccatctgcagtccctctcctttgctgttgacactggtcagagttaagcgcatttactgacgatggtcacagggtggcagcactgcctctctggtattttctaaaacctcttcctggaactgagccagtctaagaggatgtcatgactaagaaaagggcactaatgaggtgaacagataattttttttttcttgtttctcctgtgaagtaacagagtggaggtgagcatggaataattgccttttagaaatggaagacaatggagagaagtgtttcgcaaaccttaatgtgttcacagatcccacacagatctttttattcaatacagattctgatttttctggtgaggcctgagattgtgcatgtctaaggagcttttggatgatgccattgctgctggttggcggaccacactttgagtagcaaggctcgaagatcatttagaggttaattctcactgcatctaatttatggatgaaaacaaaccaaggtccagagagagcatatacagcttgcctaacaaagccattccctaagtgcctgacttcttgcatttaaacccagggcttcagcctttgtccagttctcactccacacatcacacggtttgttcactgttgtgaacgacagttgtggcagcatctctttagtttaggaatccagagccccaatttcactaccctctttggtcttggctcatgctgtgacttcgaatagttttgcccttacttaaaatcttcagtggctcttttgtaatcacaagatcaagttcgaatatctctgtctagtgttcatggctttataacatatggtatctctttagtaaccttacctaacttccctgttttaaaattgtctcttgctgccatagccctccttgctccttcctgctccctaacaaactgtgttcacttctctctcagtggtagtgatgatggcatggcctctgatgttagactcatgtaacttctaatcccagatccaccaccaacattggcaagttgattcatctttctgaggataagcatcctcctctgaaataaacttagatggcggttgagaggggtaaataaaataacacacaaacccactctcatccctgagaccctcttcaaaactagcatataaaaatagctatttgaagaggttcagtgaaattcaaggtaacacagagaaggaattcagaatcctatcagataaatttaatagactgaaataatttttaaaaatcaggcagaaattctgtagctgaaaaattcaattgacaaaccgaagaatgcactaaatctttcaacagcagaattgatcaagcagaagaaagaatttgtgagcttgaagagataatatatgaaaactcagagtcagagagacaaaagaaaaaagaattaaaagaataatgcatgcctacaaggtttgattattaagctactcaaagagatacaagagaagggtgaaaaccaacataaagaaatgtaaaaaacaatcagaatataaatgaaaaattttctaaaatgctagctagtttttttttgagacaggctcttactctcatcacccatgctggagtgaagtggcacagtcatggctcactgcaggctcaacttcctgggctcagatgattctcccacattagccttccaagtagctaggactaaaggcgtgtgccaccaggccaggctaattttttgtatttttagtagagatggggttttgccatcttacccagggctggtcttgaactcctgggctcaagtgatccaggagattcactgccaaaaaggatataaccaagtcatatagtcataggttatctaaagtcaatgtgaaggcaagaattctaagagcagtgagacaaaagcatcaattaacttataaaggaaaacctatcagtctaacaccagatttctcatcagaaaccttacaaaccagaaggtattggggtcctaatcttttggcttcttaaacagaatagctctcagccaagaatcttgtgtagagtgaaattatatttcaaaatgaaagagagaaatacagtctttttcaggcaagcaaatgcttcaggatttgtcacggctagaccatcctacatggaatgttaaagggacttctaaatcacaaaacaaaagatttaaatagaacagaatagaacctcttgaaaccaaaaaattcaaatggcctataaaacaataacacaataagaaaacaaagtagataacgatcaacatgatgactggaacaaatattaacattgaatgtaaatgacctaacactccacttaaaagacacagattggcaagataaataaaaaatcacaaaccaaatatcagctgtcttcaagagactcacttaacatgtaaggattcttatagactcaaggtaaagagatgataaaagatattccatgcaaatggaaaccataagtgagaaggaatagctatccttatatcatataaaacagactttaagcaacaacagtaagaaaaagacaaataaggcaactatataatgataaaaggatcaatcaaacaagaagatattacaatcctaaatatatatgcacctaactttggagctcccacattcataaaacggttatgatgagacctaagaaaaaagatcaacacaaaacagtgagggtgtcctgggttttctttttattggacagcagtgtactagcctatcactttcccagtcaggggatttttggtctccccattcccctaccatgggttcatgccaaagtccatattttttattagtgtttggaattggattttttttttttgaggtggagtctcgctctgttgcctaggctggagtgtagtggcacgatctcggctcactaacctctgcctcctgggttcaagcaattcttctgcctcagcctcctgagtacctgggactacaggtgcatgccaccacacccagctaatttttgtatttttagtagaaacgagatttcaccatattgtccaggcttgtatagaactcctgacctcatgtgacagggaaacaggcactcagtgaacttcatgcgattgaggagttaatgataatgagagaagggctgtgaggggacagcactggggacaccagagcctgtgacgggctgagttgctgtgccttgggagatgcccttttgactgagccctgggaaggagggggtgtgggggcaggagctgcctgcagagggagtggcctcaggtgggcggccacctggctgcagggaagaggtgacagagttcgtgtgcagagcttggagggtgaggaggaggtgggttgaggtgaccttggtgagggtgaaccatggggggctgtgggccctgctgagggaggccagccagccctggacctacagggtggtttggtcttttttgtcccattcccagcatccactgagtggtgaaactctgcaggccagggaccatcccactggccagaaggagcgcacagtaggtgcccactcagtgcatgttgggctggacagaacctcactctgccccctgcccccagctttgggagctgcagcaaggtccctccccctagggatctccatgcctctgtctctgaggggtgagatggggagacttcaaagggccatctcagagtgtgggggatagagacgcagaagtgtgggggatagagggaggcctgggctctagacccaaaggaccttacacacctcctgagtcttttcaaatggtttcttctgttactttaaaaatgatgtaagtcatcatatttattgtaaatcccaggaatctaatcatgcgtaaaataaggtgtcttatccttgaccccaccccttccccaattaaatttccaggatgttaccactgtttgcagttggtgtgaatctctctttaataatactctgtttatctcacttgtcgttttacgccaaaatacccattgaattatattattgctgaagaccattcttttttttttttttttttttgagatggattcttgctctgttgcccaggctggagtgcaatggtgtgatctcggctcactgcaacctctgcctcctgggttcaagtgattctcctgcctcagcctcctgagtttctgggattacaggtgcacaccaccacacctggctaatttttgtatttttagtaaagacagggtttcaccatgttggtcaggctggtctcgaactcctgacctcatgatccaccctccttggcctcccaaaatgctgggattacaggcatgagccaccacacctgcccagaccattctgttctactgaatcatgtgtggtgggcacctcttatatcaatacatatggattttatcttgtgtttgttattggctcccctttttctcattgcatggctacactcaatgctttgtccacacccctgttcctgggttggaatcttgtgacagaaaatgaagtaacaaaggctaaagctttctaaagtggagtcaggagattgcaagacaattgcactttcaccagcaagagctcaaaccacagaatgttccaatagatttggataaacagctgaagtcagtattcaccagccttcaacatctcaactaggagaaccctaaaattaactaagcacatagaatggaatggacttgtgatttaggattccttctcagccaatgagctgcttctgaaaacaactttttgtggaaattacctgtaaagaaaaccctctcctgtgcttgtcttacagaacactagtcagggctgccctgattcagtggacccgaattgctattatttgtttcctaaacatatggtattttctgtgaccttcatctcaatcttttttttaagttactgggctgtttcccagttttcataatgacgagacattctgcagtgtttcatacacatgtcttttccccatgtggagtattgatccaggagctcattcagtcaacgcatgtttatgaagcatcctgtgccaggctgtgggctggtcactgtcttcagcagagagaggacaggcacagtcttgccttcacagagctcacagctcagggaggctcttagaagtgggatactggtcggagcatgtgcacattaaacatgatgaggtcaaggttgctatagggactaaaccacagtcccaccaagatcgcattgagttcctgtggtagaccagaggtcagggcccctaagatgtcctgagcagctccctctgctcagaagttttggttccacaggtgacacacctgagcacaggtgacccctgcagaacctgtgattaccacccaaagccaagagtgagtggtgggtgttctaggaggaaccgtcacctccatgggcagggttggggaagactgaggggagcaggtggctgatgactttggccagaaggtagggggatgggcaggtgtgcgctcatagggaagggaagagaagggagggcattgcaggcaacaacacaaaggttggaacctgccttcatggactgagaaaagcagggagtccacccaggctgcagctggggagggaagacatggggagcagtgggtctaggggagaagcagactgcgattgaccttggggactgggcagtgagcagaggtgtgttatgtgtgtctgtccccatcatagatatgaggaggggtgaggccgcgggtggcacctgggtcggtgggatttcatagtgcctgctgttccctagagcctctctgtatagagggtcagaatagatctgaggctgtggtctgggggaaggggctggtggtgcttaccatctctaggggtgggaggagagggatgaggatgcccctgagcagtgaagcctcaaggtgtgtggagccacagttgtctctcattagacatgtgttttgcgtgaggatgccagggcctggtggttattactgttgtcaagtttgcatgacaaggacccaggtatccagggatccagagcacagggcccctggtgaggggatgaggctcagatggggctgaccaggttcatgtggtcagagtgggagggactgatggagagacagagcctcaacccctcctgtcaggagctgtggctatgtccaggagagatgacaaggatgacccaggacattgagtgagtcattgagacattgaaggtgaggacagggcagagaggaccctggtgactgctgaaatgtaggatgtgaggagggctctgacccatgcaagttacaggacctccccacccccgagcccacagatgacccttaaattgggcatcctgagtgctgtgtgtgcccagcagggacactggataggctggacctgagtctctgtaagggcagcgctggtctgtaggaccagagtcttctctgtgggtgtgacgtgggcaggaattagcaagatgggggtgacaaggcttggcttggaggatctggtacagaagcccatgggcttggtcagctcagcttctcaggggctcagctggggctggaggagcaggatgctgtgctcagggcatgctccaggcagcgtgatgtgtgtggttccagggtcaggcacgggggtcaaaaattaaccatgaaaagttcccaccttctgtaggcagagaaaatggcctgattgtcagggtcagggagacttaccatgtggccaaagcaggctctcagcctcccagagaccacaccctgggtgcagcactcagctctgcagggtatggcaatagatgtgccaagaaccccaacatccagatgcatgcaaaaattttgcgatatataaaatagagcagatcaagtttccctgcaataacgttgttcctggttgtgtctttttcttgtaaactagacatggacatctttccagcagtctgttctcatctgccaccttcctgctgcagcacctcagaatgaacattcctgagacactgtccgtggtgctgacgaccaagagctatggaacagagtgtgatgtagaatcttctagttacctctgctctcctttcacttttaacaacagagcatcattaacaatgagaaggtggagaggtgttcaggatcttgaagtgacttctgtcttgctctcccataaccctgaagctgctgtagacattattgcagaaactgacaccacagtcaggatggccttgtccaggagcccatgtgcagtttgtagtgagcaaggatgagaaaatggtcttgaaaggggtgatggacagaacaggggcttttcaaaaatgtcacatcatcacccccagcatccgtgaatctgtcacatggtaagagaccttacagattaaatgaaggattatgagtttggaagattattgtagtttatccagatgggtccaacataatcacagaatcccttccttacaaatgagagagggaggtgggagagtcagagaaggaggaggagatgtggggatagatgcagaagacagagcggtgtcaagatgctgcactgctggctttgaagatggagaaagaggacacagccaaggatgcaggaggcctctaggaggtggaaaaggagaggaaacgcactctgccctggagcctccagaaagaacgcagccatgtgggcaccttggttcaagtttctgtgtcacttagcttgtgggaatttgtcacagcctcaacaggaacctacagaggagtcaccttgtgtgcaggtgggatccagggtcatttacagctaaatcctgatgtaaatattgcaggttgcttttcctacttcctatctcatggccaacaaccctggacaatggcagaacacccttggaaaccacggctctgtgctttagtggagggaccagcttgtttgtgggaaggtagcacctggtccaagtgaacctacatgagatcgttactctccccagggccctcagggaagggctgagaacagctggcccaggtgtgtggaggagctgcaggtgaggcagggctggaggggcctgtgggtccaggtagaggggcagacaggttgtcccatcgccatgggagcctgcacgagctttaggttggggaaccctgctcctctgacctggacgctcctgtgtggagaggaggcttgctcagtgagatccacgccagggggtaaattgggaactgatgggaaatgaggggctagagtcctgggtagtgcctgggaggaccttgctcaaggactgaattcttggtctgttcccaccttggttactctgacaacccctctctgtgtcccacggggataaagatctcctgagcagtggccattgggacagaggagaacctggtggccagagctaagcatccaggatcctggatttggggacaggcaagctcattgctgggggacagtgatagatacggcctccagggcctgggtgaagagagcaggagggctcaggacactggaggctgtgtggaggtcacacccacgatctgtaccacccatggatgctcctgcattgctcacctttgtgtggacatcagatggccccaacttttgcactcctgagacatctcatgcattcacagagggacccaggctggggctgtgcatggccttggtctctagggtagtgtgaggacagctgagcactcagctggctgggcaggactcctgcgaatcctgccctttcctgtgtagggtccaccccagcctgactcctaaccccctactcctgtctttccagggaagagagactggggttgagataaggtggagatatttttcctgtgtgacccaggagagaatggacatggagtttcaggtgagtttctgctaagttcccatgagcagaaaaagagccaatgagaggaagtttcccctttattcagatcctttccaggtgaccccgggtgggccataggcccattcactttccctgcaagcccccgcttcctgtggtgatgggaagccttcgccttggcccacccagagcccggggcagtctgttgaggtctctatatattcagcagggacccccatcccttcctgtccccaggcctgtgtctcctcaggactcagagctggttctctggctcaggctccatgtccttccccatccccagggctgggggcttcagggacgctccatcaacccacaggagcagctcccagaggaacctaagaagccacatctgctttgtggtcgatccagcagtaaatgtttgtgtcagagtgtagcaattccagtaaaaacagagaagaggtcttgacccctgaggccttctcagaacagggtctggcatctctctctgggcccacccagggctactctgggactgaacctggctgtgctcagggggttcctgctcccaggcccctccctcctctgctcaccacctcctgttattttcactgcagtttcctgaacttcagctcagccagatgccagtggggacagatcctgggtctccctggggcccaagggaccagaatatctgtggcccccactcacctcatagatgagagcagctgccctggtgctgggtaggggaatctgggcaggggagagaggggtgtcaggggacagggaaggattcctgctgtgtaggaattccagggctctcctcaggtgatggagggtcccagggtggggttagcacagggagtggatgatcctggccctgaacagaggcccagctcatggccagggcaggtctaaccttatccaagtcattctgggtagggtgggtttgtgctggggattgacagtccccctgccctgagcctgcacagctggggccccagtggaaatgggattgggaacggacagtcttacctaggagatggagctgtcagagggtccatggcctggggacagagacaaaagtgagcacgagagtgttaggatagctgggcccctcctgcaagagtgtgtgggggtcctcagttcttagagaattggggagagggagcctttctcaggttattttaggggtcaagtaagcaagtgaggttgaggaagtgacccatgacccagagcccggaggttagggctgacccggccagttggggtttcctgtgtgatgttttatgggatcctctttgcagccccagggatagggtcagaggcccctgggtgtaactggcaggagtggacaacttggggctggcttagtagttcccagccacacccagactgaagggacactcaccgggggtggaggctgggggctgctgctccctgaagtcactctgatcgctggccctaggaaaggtcagggttatttgtgaaggtgcaaggttaaaagtcacaaattggagttaaaataggggaccaggaaaggagcctatttccaagaggggtatggagacctcctttctttatggagttctgtggtaggaggggcccaggtgaggggagttgaggaaaggccttacaaagccacatctgtcctggccagaggggaaggactctcaggcagatgctgggccaggagaacattgatccagtgacacaggaaagggactgaggacccagggaaggaatcagaccaccaggggttgcctgagaggaagggtcaaggcaccagggggaaagcagggccaggcacatgtgcaggacactgaggggactgcatgcatcttggattctcctggaactcagtgtccctgctgtgaccagacactccactcagggctggagatgctgaaatgggacaatgatcttgtcttctgtctctgccctttggcaagagacataaacgacattccaggatatgccatattggggccccggttctcccttctcacagctcagtgtctgcagttaccatgtcagtcaaaggggtgctgaccccacccagcccgtccaggctgttccagtctccactatgtgataatgcccaggatcccccctcagatgccctctcactgggtggatggattcagtgaacagggggaggtaccaggtattgagcaccgctcccccctgctccaggcagctgtggctttgctgtgctaggaaactaggaccatgctcaggggcatggccttaattggactgaattcactgaggacaaagctgttgaggaagcagcccagggtcagcagctggtgaggaaggtgccatggaatgagagggaaggatccctggggagtcgggaggctggggagagcctggcactgaatacaagacagggtctccttccttctcgcctggggtcagcgtgaaggatgggagcagaatggggaaaagctgtggtacctgccagtttttcggaggagcaggaaacacacaagtgcagccaccagaagactcccaaccaggaccccgatcaggatgcctagagtgttgtcatctgctgaaagaagaaggcaaaggggatgaggtccaaatctgttccagggggaaccatgaggggccttgcagggcaggggcatggtcagggaggaaggaaatgccatggagcctgagtgtggtctgttgtgctgtcctcatagctggctcccttgctctccgtggttgcaccattttctgtgtcttaggcttgaattactgggatgcatcaactcctacattctcccacaggaagcctgcacctcatcctgctcctgtgttttttagtccctccttcctctcacatcactcctcttccccctgtttctttttttccatcccatggcagtcgtaaagggcaggcccttgctgccaactcaatgctgatgagcagggatgatgttcattgactgttttcaggggccttccacatggaaggcacagtgggaatcaatctacctgcagcttttctcaccctcccattgccttgagggagaagggtatgtgatattgtgaaatacgtatttggtgttcatcaccattgatatggttaggctctgtatccccacccaaatctcaccttgaattgtaataatccccatgtgttatgggagggaccttgtgggaggtaattgaatcatgagggtgggttttttccatcctgttcttgtgatagtgaataagtctcaggagatcagatggtttcataaagggaagcttccctacacatgtcctcttgcctgctgccatgtaagacatgcctttcaccttccatcatgattgtgagacctctccagccatgtggaattgtgaatcaattaaacctctttcttcatacattaccaagtctcaggtatgtcttcattagcagtgtgagaatggactaatacagtaaattggtaccagctagtggagtgctgctataaagatacctgaaaatgtggaagtgactttggaactgggtaacaggcagaggttggaacagtttggagggctcagaagaagacacaggaaaaaagtttgaaacttcctagagacttgttgaatggttttgattaaaacgctgatagtgatatggacaataaagtccaagctgaggtggtctcagacagagatgaggaacttcttgggaactggaacaaaggtgactcttgttatactctagaaaagagattggtggtattttgcccctgccctagagatctgcagaactttgaacttgagggaaatgatttagggcaactggtggaaaaaaaattctaagcagcaaagtgttcaagatgtgacttgggtactgttaaaaacactcagttttatgtatttacaaaggtatggtttggaattggaacttatgtttaaaagggaagcagagcataaaagtttggaaaatttgcagcctgatgatgcaatagaaaagaaaaatccattttctgaggagaaattcaagccagctgcagaaatgtgcataaacaatgaagagcaaaatgttaatccccaagacaatggcaaaaatgtctccagggcatgtcagagaccttcctggaagccccttccatcacaggactggaggcctaggaggaaaaaatgtttcctgggccaggcccagggctcccctgctgtgtgcggcctagagacttggtgccctgcatcccagccactccagccatggctaaagagggccaaggtacagctggggccatggcttcagagggtgcaagccccaaaccttggcagcttccatgtggtgttgagcctgcaggtgcacagaagtcaaggattgaggtttgggaaccttcgcctagatttcagaggatgtatgaaaatgcttggatgtccaggtgaaagtttgctgcagaagcagagccctcatggagaacctctgctagggaagtgttgaagggaaatgtggggttggaaccccgacacagagtccctactggggcactgcctaatggagctgtgagaagaagaccacaatcctccagaccccagaatggtagatccactaacagcttgcaccatgcacctagaaaagctgcagacactcaacgccagcctatgaaagcagccaggagtggggctgtaccctgcaaagccacaggggtggagcccaaggctatgggagttcagctcttgcatcagtgtgacctggatgtgagacatggatacaaaggagatcatttcagagcattaagatttggctgccctgctggattttgggcttgcatggggcctgtagcccctttgttttggccagtttctcccatttggaatgggtgtatttacccagtgcctgtacacccattatatctaggaagtaactaagcttgcttttgattttacaggcttataggtggaagggacttgccttgtctcagatgaaactttggacttggacttttgggttaatgctggaatgagttaagactttggggaactgttggaaggcatgattagttttgaaatgtgaggacatgagatttgggaggggtcgggtggaatgacatggtttggctcttcttcacccaaatatcaccttgaattttaataatccccacgtgttgggggaaggacccagtgggaggtaactgaatcatgggggtggattcttcccatgctgttctcatgatagtgaataagtctcacaagatctgatggttttagaaaggggagttcctctacacatgccctcttgcctgccgccatgtaagacatgccttttgccttctgccatgatttcaaggcctccccagctatgtggaactgtaagtcaattaaacctcatttttaaaaaaattacccagtctcaggtatgtctttatcagcagccaagaccagctcggtcgcggagatcctaacccagcagtgctagaggaattaaagacacacatagaaatatagaggtgtgaagtgggaaatcagggttctcacaggcttcagagctgagagccccaaacagagatttacccacatatttaataacagcaaaccagtcattagcattgtttctatagatattaaattaactaaaagtatcccttatgggaaaccaagggatgggccgaattaaaggaataggttgggctagttaactgcaacaggaacacgcccttaagatgcagattgctcatgctattgtttgtggcttaagaacgcctttaagcggttttccaccctgggtgggacaggtattccttgccctcattcctgtaaacccataaccttccagcttgggcattagggccattatgaacatgttacagtgctgcagagattttgtttatgaccagttttggggccagtttatggccagattttggggggcttgctcccaacagactaatacacccattttctggtatgtgactctaaagtccttagaatcttcaaagtgatgtctttttcaagctaataattgactgatgactggcagcccctaggcaacttcagaatgaggctggtcactgacccaggtaggattagagggttgggactttcagcctcacccctaatccctggggagggacctggagtttgaattaatcaccaatgaccaatgaatcaattaatggccaatgattgaatcaattaatggccaatgattaaatcaatcatatctatgtcatgaaccccaaaaggactgggtttgaagagctgaacccatggaagtttctggagtgtggtgcatctggggagggcatggaagctccacaccccttcccacatgccatgctctgtgcatctcttcatctgcatcctttgtaaagtcctttattacaaaccggtaagcctaagtatgtgtttccctgagtcctgagagctgtttgagcaaactaatccaacccaaacagggagtcatggaaacctcaatgtgaagccagtcataagaagctctggaggcccagacttgtgactggtgggaaggtggtggcaattttgtgggactgagccctctgctgatatgtccaggtagatagtgtcaggatggaattggaggacacctagctgatgtacggtgcagaactgattggctgctgggtgtgtgggagaaacccccccgcatcacatttggtcacagaagtgtgtctgtgttgatgattgttattgtggagtgagagcagaggaaaaacacagtttgagtttttccaaacagggtggaatcccatctgccaatttagaatctgaaacttatagtttcagtacttcaattaagattgaagtacttcaattcagtacttcaattaagattcagtacttcaattaagattcagtacttcaattaagattacagaactggtaagtgaaagtgatacaacaaaaatgtaaccaaagtctgctcaacttaacagctaataacaacaaagttcataaaaataataccagtcgatattgatagcactgattgagccctggctctgtgcatgaccttgttaagggctttaatcgcattaatctctgaataaatatcctcacaaccaccctgagatccaggtgtttgtaacaattctacagatgaggaaactgaggcccaggaggttgagtgtcttgcccaaggtcaaatacctggtacctattgtaaccaggatgataactggatgagtctaatccctgagttcttacccacattgctccccaggctctgaaggaatctcatccttctcattccgtgtatcattttacaccccccctccctcctaggaaaatatacaaggaaaggagtgagaggggccgagggtcactcacattttacagtcagcttgagggggtcgctcctgttggagctgactgggttggagacctcacactgatactccccagcgtcctcctgcctgatggggtctatggtgagcatatggttaaaccaggacagcttcatcctcttcgtgacctgcagacgctggttgttgaaaatccactggaaagaggttccagtgttatttgtgtggcaggtcaggaccacggagcccttctctgtgactgtggtgctgctggcttggatggagggctgagccactgactctgtggatagagtgaccaacagaaagtgtcttggggccatgctgcatcctcagagatctcagagtcaaatttagaacattctcctgtgaataaaggagaaagatgaaggacagggaggagcagagagaaccagagacacccatagcagcgagcagtagggactacagtgacctcagagaccccagggaccaggaggacccagctgcctcagaccaggaccagggagccctgaaaaccctcccacagatgagcggccccagagtcacatgagatgcaatacctggggtggctttaggagcaggcagtcagagaaatggaacatgggtctcagcccctaagggacaaggaagaggtgtggccagctcctcctaggatcctacatccaggacccagtctgtaaagaggttatgattattcctttcttttttcattaattccctccctccttcatcagagaactactgagtgtgtgtctcagttgggccttgtgcaggtacagggtgtagtgggaagagaaagctgagtcctttccttcatcctcccatgggagtgacatcaacaaatcaagaaattcatgatttcacgtccagtgagggaagaaatgtggatctgatgggagaggcttggacaatcctggcattgagtctgatagttgagacaggtgatttcgttctaagtaaaaactgactaattctccatttgcccgtcattcctcagaccagaatctccctctctgagctgaggatgcccaagaagaaaggagctgaaccaacatctggtcctggggtccacagatgccccacggtggtggccacgaccagattctgggctgcagacacacggtggtgtgacgttgagcactgacagcctgtgtgatgctgatgcaatttctctttaataaaatggggtaaatgtcaatggtccctggcttgccatcctctctgtaaattaacattaaaatatttacaattacctgacctaaagcttggcacagaatagctccaaataaacatcatctattattattttactccaaaaaaaaaaaaaaaagagttctctgggcctgattcctggtggagaaggagcggtccagagtgtcttttctctgctttccctcctcctgaggacagtgcacttcccgggacatcttttaagtttcccatccagtttaatggcctgggaagtttgtttgtctgtcctctccactctgactctcaggtgaaagatgaggctctgcccttgcccagatggggctctgggggctgagccctgcctggtgaccagctctaggaaccacggccctgggacagctggtaaatcgttgctcacaatcagccctgcccaggaagccacaacccagccctggcacaggctccccagggtcatctggagtcaggatcttgggacaggggcctggggcaggggcttgaagggctgagcttctctcagaggatcctcaggccaggccctgactgagtcctataagatctttctcaggtcatgtctatgaggaggaggccaagcggggttggactgagactgattttcccccgctgcatctcccgcatcagactatccttcttgctgtagggaatttccacggagtccggataagggaaaggaattctgatctgttatagtttgtctcccctgggtgtgtcctgcactaaatgcccaaaccccaacatgggacgtaatgcagagggggatgcaggcacagcccaggcctgacaatcctgcgtatgtgaagcagaactgacccccaacacccagaggcacggaggaatcactcaccgtatacacggagatggtgagatgcctgttcaatctgagaatttctgtatgtgacttgtagggtgtagtatcccgtgtcctctagggtgacgttctggaaatgcagatctccactgggtgatattgtctctcgaccgctgtatgcaggccctggagtcctaacgtgagtgtctattacatatgctgcgattagctggttgggctccaccgttttccctttgtaccagccatagctgtaaagattctcgggcagataaaccacagagagatgaacattctccccttcagcaacttcaaagggcgctgatgcaataaagagccaggcagtggtgggtgcgttccagaaagttaaaagtgaggctaggaaagggagagaatatcagtcaatatttgacctatgcattggcatggaaagacggggtcctgggtgcaggtctcttcacccctcagccttagagggtgtgtgtgtgtgtgtgtgtcctactgggtcaaagtcagcagcatgaccctcattccttcagtacctctgaccttggcatttccttgtgtgaaccctctttcccaggggtctgcatggttccctccccactgccttcagttcctactcacacaagggaatccctgggagacttctttcgtgaagcctcctctagagaccctgggtcttccctttctgacctttcccagctctgttccctccagggctcttgtcagcacctgacctcacattctagatctctttgggtgtctgtcttcccccccatgagattgtgagctctgtgagggcatggacttgagtgatgttagttgcaccccagtgcctgggacaggctgcagactcctgtggatgagttcatgagcgttcccagggccttccatatcctggggtttatttgctaatgtctgaggttggcagatgaagacagagtttcatgccctggtggtgtttttatttaaattgtcactgtgatatagttttactatcattttcaaaatgtagtggccactgacaatgaacttgaaaacatggaccaactgagattgttttgccccttggcaattccagttcacttagattttttggttctccttagacgctctctcccctgagtctctaacaaaagccctctgtctcctctcagagccccatcctccccaggagaccccagccagtctctgtgctccctcctcccacccactcccagggagtcctcccctcacctgtgagcaagagcccctgccaggggatgcattctctgtggggacaagctgaggggggccccatggtctctgctgcctgctctgtcctcctctgtggagaggagcttgggctccaggaacgctctagacagggttactgtgactgttgtctctgctgtccttccttcctctatgctgagcttcctctcaggcaggagcacttcccgtttatgggcaagggcggggctctgcctacaatgtctctctgtcccctcccctctcagtcctgcctcccttgtccctcctttctccttcctttttgcctatatttggttccctaggcaaaactttgagaagcaacgctgatggggtcctcataacaggacgacccactctccccagtactgacctctgctgtgttctggccttggttctgtcacagccggtagattatttccctttgtgacacacaaaaccagctgggccctgggtctcctcatgctctccagtgctccaggaaggcagaatgatgcccagcaggaaagtgacagaggtggctctgggggctagaaaggggctcactgggtgatggctgggaaggacccacccgctatcttcagtgtcaccagcctggcctctgacccagggacagagacccaggcctggaggtctcgggaggatccccagctcctaggtgtggagggaggtgtcctgtgtgtcctgggaagagaggactttgatggaaggaggtgggaggctctgggttctgctgtccttggtgaaggtttcagggggaccctctccatgtctggggtctgtgcccccagcttaactctcattctctttgcaaatacatatattttgtggatctgcagttgcctgaactgtctcatgtccctaaatctttgtatccctttttacagaaggtcaggaagggtgtgtacatgagtatgaggactatctgatcagggcgagtgtttgtttcccaaagatctctttagatatggtataatacataagataaatgtactgaattagcaattttaagtgtagaattaaatgatactaattctattcacaatgttgtacaaccatcaccataattttttaccagaaaatcttcattataccaaatggaaacttcatacttttaatcaataactccccacttccccctgccccacccactggtagcctctgatactatcaatctctgtgaatttgcctagtttacatgtctcatataataaggaattatatacgtgtattatttttttctggattatttctcttagggtaacacttttaagattcatccacgtcgtagcatatattacagcttctttcctatttatggctgagtaatatcccaatatatgtttatacctcaattttaattcattcatctcttaatggacatgtgggtggtttccacatttttgctattgtgaaaaccgctgcaatgaacttacacttggaagtatctgtttgggtttctgtgttcatttctttgggggtacatataggagtataaatatggggtcatgtggtagttctatgtttaagtttttgagaaacagccaaactgttttccagtttgctgtgctattttatattcccatcagcaatatacgagggttccattttctctacattcttgtaaacacttactatttaatattttttaaaacttatagccattctagtaggtgtgaagtgatagctcattgcagttttgattttcatttccctggtggctgatgaagttgagcattttttcatgtatttactgacaattttaatattttttagagaactatttattcaaatcatttgctgtttaaaaaaaatgggttatctttttattattcagttgtaatagttctttatatattttagatacaagtcccttatggggtacatgatttgcaaaatttttctcatattctgtgtcttctcactttcttcatggtgttctttgaagcacaaacatttttaactttgatgaagttcacttatctatttttaattttgttacttatgctcttgatgtcatattgaagaaaccattgcccaatccaagatcattaagttttactcctatatgttcttctaatggtttgataagttttgctattccatttaggtttttgaaacattttgagttaacttttgtatgggctgtgaggtaggggtctaactacactatctcgcatgtggttatccagttgttccagcacaatatgaagaggctaccattctttccccattgaggaatcttggcacccatgtcaaaaaccaatgggctgtaatggtgagggtttatttctggactcttgattctattccattgatctctatgtgcattcttgtgccagaagcacactgttttaatgattgtagtgttttagtaagttttcaaattaggaagtgagtcctccaatttttttttccagattgttttggccattctggggtgacttttaaaaaagatgtagttcaatggttctcaaagcaggagtggttcagctctccttttttggcagtctggagacctttttaggaccttaatctaagtagataaattattcccactttcttttctgagttgctatgttacagtgtatattgacacccatgaaataattgagagaccctggaagtgcttgcctacatagtgagggacaattagttccatgatcatgggcacagaagattttgttttgggaaacaattttgttggtggagttatattcatgcttactcttttatttgtcttcatagcctgcatctccttcagacttcatatctgtttattttcttgtttgtcctctggggtttgggtgttgggtgaccagtcagctggagctggaggaggtgcttagcaaggcagtgaccctggttgggaggagcagggctcagcagggtgaaagtagctgggccttgagtcaggagtggcatctggaaggcctgactgtaagggtcagaagggccagcaggtgggtgtcctaggcacaaacggtggctgctgctgtggactggaggaaggtaagaggccccgagtattccatgttcttactggctccccaactgaggattcctctcctgggctggtgctgtcctgcagcagggaggggttagacagggacggctgcacatcaggccggagtccatgtcatcctcttaggcactgtcactacagattgaggattctgttcataagccaagcctttgcacaaggaagggacccgggctctcaaggaagagcagctcctggtcagacctccatctccttctctctcattgcctgaggcctcaagcttggtctacctggcacaggggtctggatcctcctcccagggttggggtcttactgagctgggcacctgcaggtgggagaagatctggaggggccccatctgccttcaccagattgatgttgagggtccctgagtcctgcaccactatcaggtgctgagcaacttccagtgtcagtgacaaccaccccatggtggaagcagaaccacctcgtgagaaagcacctccaagcctcagtgcttgccatgtgtgggaatttgctggtttcagttgggggcatgttggtgggtggtcatgaattcagggccggattctatgctcacagtgcacatgctggatgtggtacagaccccaggcagggctcagtggggtggttttgggtgtgcacaggtatcttttctggaggagctggtggtgatttggctcccagaagttcctgagctctgcagactcaccaagcactcaatatttgagtgaacattgggcgagagagcagaaggtaagtgtcagggcatcggggttggtgcctctgggaagaggaggaacattctgggaacaaagctctcccccggcttacagggagcttcccatcgctcctgccttgaggatcagggaaactagggcctctgctcttccaggggctgcttgcaggcagtttgctctgggagggggtgacccaggagttgcctctcattttgcatttgagatttaaaaggagaagggacagtatatcttgccaggtcacaaaaattacaggcatcatattgactgaagggcactcctgtcatcactgcaatataccagaatggtcttttaaaaaaataagtgatttaggtttaccagcaactgtaatgcttgttttattcttctagttcaccgttaatgtcacttttgtagttttagcactggcaatgttgattttatgttgactctgatgattttaagctttcatttgttcacatagagatcatcttctttctgaatattaatgcattttttctctatttctactggttattcctgtacatagagtagagaatcacttttcccaaggaggtggaaagcttctgactaccaaaaaaaaaaaaaagtgtcaaaatgctttaaagtcagtaacttaaagatcaaatccaagagtgggcaacagattctgcccagggtctgaaaggtggagaggtgactggtgaggatgtttaaaagacctctcctctctactccctaaatgggggccatccagtgttcttgaggttcagagaaggcccagggctggggcagcagggcactgtcagctcccagctcccaggggccaggagtaagaccccaacactgtccagacactgattgcattcattttgggggagagtagattcttatttaaagaataatacaaaagtctacaaatatgaacataaacagaaattcctttgctacaattttccccttaataagacattccttcctaatgacatatgtgactgcattcatggctgagatgttttctaggatggtgagagcatcagagtggactatctggtgccttggggtcatgcattttcttcttccaatgtctacaggatcccccatgtcccactttgtagtgtaactcagtgtgtgtcattctggtttttgttgtatagatccttggaaagcccatgtcattcctgctgtgaggtacaggcagccaaatggcatcatctctaaacatgccttctcctggtacatcaaattatggaataaatgaaagccattttgacagatattgaagatataagtttctactcttcccacacatgcttctcccaagtgaaggattttactggtgaattgttattagagattagtgtggatcagtgactctgccaggggaaattttgccctctaggggacatttggcaaagtctggaaacattgttggttgtcagagctgggggagggagtcctgctggcattgagtgggtggatggtgctgaacaccctgcagttcacagagccccaccagtttgaccacccaaatgtcaatgctgaggagtggagagccctgctgtgccctcccgcagcttccctgaagcttcccctcacctgctcctcccatgtctccccaccacttccccacttcacccgcctccttacacctcagtcccctccacctgaactcaccccttagtccaaggccagccctgatctccgctctcctggtctccttgctccttagcaggaggcgcccactagatggcgcccttgcccttactggagctcaccgtctccctttccaccctgagacaaatgtggctgcttttactgccacaaccccagccctccacactctagatttgctcagggagcagctcctggacagacctcagggaccccagggaggagcctcactctggagattttgatggcatggtctttgaacttcactgttacccccagtcaggatccaggatgttgggagtgcatgattctgcccggtcccacttcagcaggaccccactgctgagttgtctgtggggacccgggcctctcatctccttcttgcattgcaggagagggatcttagcactgctttcacataaagtcagataatggaggagtgcaggtgagtttgggaaggtggacatgaagagaggttgtgtccctagaggtggcagcagtgagaggatgggcaggtgggaggaacacagcccatccagggttgccagccatattaggagcgacagcctttcctctaagcctccagcctttttcctgaaacattccagaactttccacttcagcacttcccactgaggctcctcaggtctgtccctgagctcccagctgagcctacctacccatctgaaatcctgagtcctgtgtcaccctcgttccccattattctgtgcagttctgtgggacgcccagctctcctgacacccccagtcttcagaatggccatcagcgctgtcgctgtggcaccagggtgactgccgcctggaggctgagtcctggcttcctgacagctgtggggcccgctctaggctcccttgtcctgatcattcatcacctccaggatgcacagcagctgggccagggggaggagcagggacaggtgtcagccaccctgtgtgtctgcaagtcaggctgggggtgtgggaggacgccaggaatgactgaactttctgatttagagggtgagagcttgcactgatggaatttgggatttaataggaaaagcatagcgttttcctattttgtaggcagggtggctggagtttggaatcatagattcccctgggatgtcactgtggacctcagtcccacccgttaggggcacagatttcagaatccacaccctggggcaaagcaggcatgggaggctccatcagcctggccagggctctctatttgtgcagctgctgcaaggagatgtgcactctgatgggaacagtgctccctcctccttggggggcagtatctagctccctgcagcccctctccctgcaggccctgccctctctgaacctcaccttccccaacccgccccccgcaatcccatctcagctgtaatcccaacactttctcatccattatgggtggactgcttgagcccaggggttcaagactatgctggctggacaatatagcgagttgttgtctctacaaaaagacaaaaattagctgtgcatggtggcatacacctgtagtcccagtcactcaggaggctgaggtgggaggattgcttgagctggggaggctgagttggcagtgagttgagattgtgccactgtatacttcagtgtaggtaacagagcgagaccctgtctcaaaaaataaaagtaaaaaaaaaaaaagaaatatggaatacattattgttaactctaatcaaccatgctatgcaatagtccaccagtaataccagtaatagccaataatgaattatctgaaaaagaatacaatttattcttagctatctactgctaaaatttttaagctatcttttatgatagctgaaacaaaagaagtaaatttaaccaaggaagtaaaagacctttataatgaaaactgtaaaacattgatgaaataaattgaaaaagacacacgcacaaatagaagatattccatgttcatgaattggaagaactgatattgctaaaatgtccttaccacccaaagtggtctacagattcaatgcaatttctgtcaaaacaccaatgatattcttcgaagaagtagaagatcctaaaattagaaaccacaaaaattcctaaaacctgcacaaaacaccctgagttgccaaagcaatcttaaacaaatagaacaaagctagtggcattacacttcctgacaatcaaagcatactgcaaagctatagtaaccaaatcagcatggtcctggcataaaaacaagcacatagatcaatgaaacagaataaaaatcccagaaataaacccatgcatctctagctaactgattttcagccaaggagccacatgcacacaatggggaaaggacagcctcttcaataagtggtgctggggaattggatattcatatgcagaagaatgaacctagaccctatccctcaccatgcacaaaaaattaactcaaaatgtattaaataaagacttaaatgtaagaactgaaactatgaaactactagaagaaaatatagggggaaaatccatgacattggtctaggcaaagagtttttggataaaatctcaacagcataagcaacaaaaccaaatataaacaaacgggatttcatcaaactaaaaagcttttatacagcaaagaaaaaaaaggccagcagagcaaagagacaacctacaaatgggaggagaatatatttgtaaatatatacatatatatttgtaaatatatacatctgataagaagataatatccaaaatatataagaaaattatgtttctgtatagttttatctgactgggatacagaggccacatccacagtcccatcctcaaaggccacttgttcccaaaatgtcaagcacatccctcaatgatccatcatcaacacctatgtctgtaggatgaagggtgaatcatgaagcactaaaaaggaagaaggaagccaatcccaaaacaaaatgatgcagggtctggaaagtccaaagcattttttttttttttttactgcatcttcctcctttcttctccacattcccaatcctcactattgattaacaaaacaaaaaaaactgggacccaccatcttccctactgtcaggagatctagcgagattgtttgagtcttagaccaaactttgccataagccaaatttctggctgactttacaatgatatgagctagcacagtctctttttctgccagtcaacttgtgctcggttttatttgcaaccaaatagaggtggtaaccaaatataggtgaccctaaaattagtcatcaggatgaaatcctaaaatgtgcaacaaactgggttgaattcaggattagtagcaacatctctgttgtgggcttgaaaagggggcacccttttatgcagtagcaaaattgctaaattgttgtttgctgagtctttggactctcatcccggattttctatgaccattcaaacagggctgcaatgaacatctatggttgtttagcttggcacacttctacatttctatatagtaatatctagaagtgcatttgctcaatcacaagatatgcacattttataattgactgctatcgaactaccttaaatagccttaatttgttctcaacattgtttaacagggtctgtttaatgtcctacgtccagcaaggacagtatcacttttcttaatatttttcaaattattggaccttaacaaatacttaatgtgcaattaattgattcctttgtattcccatgccttcttttatatgtttccttatagtacacaaaaccacattattgtttctttacttgtgtcattccaccctggaccattcctatctaaactataacattatgagagagagagagagagaaaacaatatgaaaatataaattgattaatcaaaaaaatttaaataggacaaatcaggaagacacaagagagattttaaaattattcagagaataccacaatagctgtaccaatatattttaaaacttagatgaaacggacaactatctcgataaatgtaaattaccaaaactgactcatgaaaaaatggatattatgaatagagcaataatcagtaaagcaattaaaaagacagttgataatttttatttactgacaacaataacaaaatttcaggtcctgatatttttatggtgaattttaacaaattttcaagctcctcctcaaccaattctcagaaggtttaaaactttaacaagaaaacactttctaacacattttcagaagctgttatagcatgataccaaaaccacacaagaaaattatagaccaatctcacttacaaatatacatgcaaaatcaaacaaaatcttagtgaaccaaattcagaattaataatagcaaacaagcaaaatatgttatcatacgtatggcttatatcaggaatgcaagtatgtttcaacatcagaaaatacttctccacattaacagactaaaggagaaaaacgcttgtttaattatctcaataggtttttagagaattttgaaaattttataaagttatgcgtattctgtaaaattgatgaaatccaaccttgatttatttttaaaaattgcctttcctatagaattataggtaaaggaaacacatgcatcctcacagagctacttcaaggctaagttacttcccataagtaacgtatcctgtaatgtgtgcttggcacatattcaatactaaacaaatatttgcaaatcctcaaaccacttctcgctcaaataacccacctttgtcttttgcctttatgttagggttgattttctcaattgtatcttggagatcctttggtgggtctttcagcaattaccctgaatttgcttttctgtttacaattttaattcctgggaactctttcttgttctctgactgcacccttttcatgagagttcagccatcaatcctccagaaccccaccccccccgcccccccaaaaagcaataaagatgtctaaaagcttccttctgggctttcgaatgatgtttaccccaggcatttgttctattcgttcatcacccattttccctacaacttgcctacacttgatatcagatttttatttattagtcacctatcttcttcattggcccattttcctattttgccactggttgttctcaaatgtgttatgattcctggttgtacagtcaagtggttgataatcttggatatacgataaagatttgctctgtagctgtgtgtaagcctatataaaagcttttgtatttttcttcttaaaaaagacaaaagatggttgggaagatccctccagttcaccagttcgaggctgcagtgagctatgatagcgccgctgctctagcctgtctgtctgtgaaaaacaaggggggcggggggcgggggggaagactggagatgtaaatctcccgcagggccctacccgtatccgcaacaggtctctaacaggaacagcctcaggcctgtgttggaacaaggtaggttacagaaatctggaagccagatctgtaacttcagggtaaggactggctctcagggctgatcccccgggctgggtgtcccagaggcacccgcccccgccccttccccaaggcaggccaggacaccttcactcctctccttaggctccccacccccttctcctccccactgtgcctcctggagtagcggtggcggtgccacaggggagcggggcggggcgggctctgagggcaagggggatgggccccgccggggtcactggcggccaccctggaaactcgacgcaggccggcccttctagtgaatcgtcccagccacagctggcctcccagccgcgcttggggcgcctcggggcgcgaatggtgcaggttggggagactcaccacgcaccgtcgggggtcggtccggttattcctcaccgctcggctccagtgggcgcgcgggcctctcctcctcagttcctgcgctgcagtccctccctcacccttcgcagcttgggaatccaactgtgtcattccgacggagcgccgtgaggacctccgagggtgttagcgccaagtgatctctgtccagcgctctgaatatccaagtaaaggagttcaatgaagggcgggtcaacggaggagaaaccgtgactctctcaagggagcccaaggcctccttgtctaattagtgacgcgccaatggatggaggctcttcccaccatctcttcccagcatccagtgacaccaccgccaagggacgggctcggcggaacctgcaggaaagaagcatcggctgagcctgactgcagcgctgtgaagagacaggggaggggatcagtagttggtcccgcgcccaccccctgtttccgcgaggggcggagttgactggccatgcaggcagagggcgaaatgtgaaattccactactcctaccgtttttccctgacccgatggggcggagtgtcgtcaggctaagttccctggcggtaaggtggggagattgaggcgcacacctgccgaacggtaacgcaggattagctaaggcgagctcaggacagaagcctcccgaggagcaggagggcaaaataataaataaataaataaataataaataactcactccttggtctttatttgcggcaggaattcagaaggtgaaagcggggccttaggatctttctgaccttttgggttttaagcaggaggtgtcagaaatgttaccacagggctagctggcttgtggccagcaagcgttcacaatgccctcgatttttcatccctctctgtgggttctttttttcattgtaaggcagaatttctacgattgctcacccactcagagaacctgagctggtttagaccaggtgagacaggctaggtttaccctggtgatgatgtgttgttgccatggcgatcctgcccagtaccagaggccctgcagattcagatgcttggtgcctgtgcttggctgaggggccaatgggtgaagctgccatctgcgggatgatgactgaagcctctaagtcagaatccgcccaggctgagccttagggcagctccatggagcctcggctggcctgggatagagagtccaccactgtgccagcccccagccactgcctaggtcctgtgctgagagccccttgtccagggaaatggcgtccagtggaaaagggaccacccccttgcccttcactcaaggcaggttggtgacaaccctgaagctaatccgttcctagaggagctgcttctgggtccgagttttctctgcagcagagcagctccctggatgggatctgttcaaagtccgcctttcacgcggaattttccgtccttgcaattttccacctccaccactaggggatcctctctgaccgcctcatgccggctctggcctctgagcaggggtttctcttctgcatgtgcgaccttgcgcatgcctagtggccttttgggacctagagctgctccacaccccgatggggttacagagtgcctcgcctccactccaccccaccagggttccttccctggctgggatgggatttcagaagcgccgaggaacagcccagacaggtgtgggagagtagccaaggcccctgtcccggggtggccaggacagcggtggcctcgcataggacctggctgggctgctgcaatcagtgtcctgccccttggagagcaacagtgaaaacaacaagactatcttcacccaccttaagaaagaacagaaccagtatccccaactctgctgtgtatcccaacccaattccattccccaccccactctcagtagccaatatgcaaaatattagaatactcttactgttattattttcaaccacactctgcatcctgaaaaaccatatatttcgttatgtgcttttaaacttcttgaaaatgaaatactgaggctgggcgcagtggctgacacctgtaatcccagcacttcgggaggcggaggcaggcggatcacgaggtcaggagatcgagaccatcctggctaacacagtgaaaccccatctctactaaaaatacaaaaaattagccgggcgtggtggcgggcgcctgtagtcccagctacttgggaggctgaggcaggagaacggcgtgaacccgggaggtggagcttgcactgagccgagatcgcgccactgcactccagcctgggcgacagcgccagactctgtctccaaaaaaaaaaagaaaaaagaaatactgaattttcaaatacttgctttttttttcggtcaaaattatgttctcaaatttcactcctgtagatgtgcgtggctggctgtagtttttgcatttttattattaggtattctcctgttgcattaatatgccacattttatttctctcatgtttttggtgaccacttggggtgttttttggttttgtatttttgctgtatacatgctgccatggtggacatacctctttatacatatttcctgttgtatgcagacacaattttaggatgtgacatcttcagcttttctattgtgtcgtgtgtcttttccttcgtgctttgtgttatttacatattctggacacagattctttgtcaactgtatgtgctgcacatctctttcccagtttgtgtcttcttcttcttttttttttcttaaaaaaaactttctttatagtgttttttttttctttctttctttgttttgttttgtttttttgagatggagtcttgctctgtcacctaggctgaagtgcactggccgatctcggctcactgcaacctccgtctcctgggttcaagtgattctcctgcctcagcttcccaagtagctgggattacaggtgcctgtcaccacacccagctaatttttgtatttttagtacagatggggtttcaccatgtttgtcaggctggtctcgaactcctgacctcaggtgatccaccctctttggcctcccaaagtgttgggattacaggcgtgagccacagcacctggcctgtgttctttcttaagtagatgttacttttaatataatagaatgtatcatattttgcttttatattagtactttttctatctaattcaaacacatccccaagggtctttgtgtgtagactgaccaatttctcaagaatcatgaatgaatactgcttctctttccccaatttatctgtaatgctacctttattataaagtttctatgcatgtgtagaaatagttcctgatttttcactctgtgccaccagcataccaatagcacgctgtcttaaatattaaatagcagagctttatgagacaacttgatgtgcagtaggcaattgcccccttgttactcttcttcagggttctttgttgtaccacatgaattttagaattggcttgtccagctaaaagacaactgcaaggattttatttggaagttcataattctatacataatttggggaaagtattttcataataccaagtcttcctattaatgaacacagactctctctctctctcccccacccccacctgtttagttatttatatctttatggtctgttagttattgtttattgtctttcaaccaggtttcatgtttttctacatagaggccttgcatgtgaaagtctttcttcctagcttgctattacaaattttttttaattgcactttttgggtacagtggcttgtactgtaatccccgatacctgggaggctgaggcagatggattgcttgagtccagaagttcaagaccagcctgggcaacataatgaggtccctgtctcaaaaagtttgttttaaaaattgcatttgctgttattcaacaaatgtcattgtgtctcatatatggatttttatatctgataaccttgttcaacaatcttttgattctaacaatatatcagattcttttgagttttccatatagacaataatgtcatctgtaaattataattgtttcttctttgttatttcttggaccttttattttatatttttgtcttgctgcaaggcaatatccctctatatattgtggggtcttttttctcataaagtggggatggtgaacacccttgtcttgctctctgattgtataaagcatgctttctgtagcattttgtagacgctcttttttagattgaggtaattcacttttatttctggtttactgagtttttagcataaattcaggctgaatttgagctaaagctttttctggagacatcatttgaaaaattcatatgatttactttctttaagtcaccaaagttatgatttacattgaactgagtttctactgtttaactgtattcttgggagaaaacccacttgtcactgaacaatatctgttttatttactgctgtcttgtgtctaaattttcttttaggattttttgtatatgctcagattagcctgttattctcctttctgtatttttttctggtttgggggtcaaagttataatagcctcacaataagagctaagaaaccagccctaatggaggccggggcaggaggtttggagttcaagaccagtctgggcaaaatagtgagacccccatctctatgaaaaatagaaattagccaggcatggcagtgagtacctgtagtcctaggtacttgggagggtgaggcaggaggattgcttgagcctaggaatttgaggctgcagcgaactatgattgtgccactgtactccagcctggatgacagagcgagaccctgtctcaaaagaaaaaaaaagaagaaataaaaaggaaaagataaaagagctaagcatctgtttccttttttccattttctgggagagtatgtgtaagactgtaattaactgtttcttgaataatgggagaactctgtaaaataatctggctttggtgttacctgtattggaaggatgaaaaataccaattcagtttcattattggttgatagggctactcatgctttttgttttgttttgttttgttttgtttttgagaggaagtctctctgtattgccctgttgtccaggctgagatgcaacgttgttcacaggcctgatcctggctcactacagcttctaacttccgatctcaatagatcctcccgcctcagccttcccagtagctaggactacaagcatgcagcatcacatccagcctcttttcctgcctgacccagttctggtttcctttagttttctaggtgttcatccattttatctaatgtttaatgcatttggcataagggtgctcagtgtcctttcattgtctgttgtctgtaactgttgccattttcattcctatttatgagtactggcgtcttctctcactttttcttaataatcctgctggaactttgctttttaaagaacatcttttgacttgttgattcttttttcatacatattaactattttcttattttttgcctttatatttatttcttttcctgtttgaaacattgctcttttcttactataaaaatgggtaagtagctcatgaattaccacctcttttaaaaatcttttctactgtaagcattttagcagtttacatttgcccacaagtaccacttcagctacaccctatgtgcttttacataaagtcttcatttttggtaagacatattctcaaattttaattatcacttgtttttaaatccatgatgttttatttgaaatgttgtttctaaagatacattttctggttatacttttattcttctaatttagcacagtggccacaaaacatggtctgtgcagtgcatacaatcgatgagtaatttctgagctgtagtatttggcataatatatggcaaaatttcctaagttttccatgtgtgctttaaaaaacttccagtaaaatacataaatctgttagatcaagcttctcacattgttcaaatagtctatatgtttactgattcatttgactgcttgatttatcaattacaggtaggaatgtattcaaatctcctattaaagtgtgacactcaagtggctttttaaagacagagatgccaaaccaatgaatacatgattttccccaaagcctgcacaaattctctaatgaaattttaccatgaaagtttgtttaattaaggcttactaaagcagtatgttgtcttttactttttaaacagagaatatatattttaatacatcgtttaagtttatgattaattatctattactgaggataagaatctttgcctgtgctcattcagcatttgcacttcatttatgatctgccttctcatagcttctgttaatttttatactagagacatttatttgtttgtataaatgttgaaggtttttttttgttgttgttgtttttgagtcagagcctcgctctgtcacccaggctggagtgcagtggcatgatctcggctcactgcagcctccatctcctgggttaaagtgattctcctgcctcagcctccagagtagctgggactacaggcatgtgccaccaagcaaggctaatattttgtatttttagtagagatggggtttcgtcctgttagccagggtggtctcgatctcctgacctcatgatctacctgcctcggcctcccaaagtgctaggattacaggtgtgagccaccgtgcccagctgggttttttatattataaggagatgtaatagatagatagatgtttcaaagatagtcaaatgtttttaaaatttaaaacacttttttacaggttgactttcaccatttaatttcatctatgtgttttgccttagagaaattttaaatgctatgtagatctcatgacttataattatgaagcattttgttttctgttttccacgaaacttagcttaactttgagcatataatagttgtaaaggtaggagagtaacactgaaaaaaggaattgcataaaaatggcacattttctgtagagttgtttatcgcctgaaaataggccccatttcatggaagtaagatgatcaggctcaggtccccagacgaaactcttggcatggtttttggagatagtccagggctcagtactggctctatcatttgctacttctcccaaagtaaccaatatctcatccaccctgagcccatttccatatctctaacatgaggataatagcatctaccttacacaccaagtagagggatcaaatgtaggaactaaatcaaagtaccagcactgaataacctacatcctcccacttcccaaaaggaagagagatgtatcccctgttgacaaacgagaccattttgcaggagagaaaggaaatgccagttcacttgcaatgtaaacatgctctctctttttagggatgtccagggacctgagagagaacccatgcttaccaaagagtttctagttccagacacacaggactcgaagggtgacaagtatggttttcagggtccctgaatccacccagtcctcacagaaactcctaaaagctgtcgattgacagcgttgagttcacagctctggtcctcacatgctgatactgcttgtgatatcgaacccgacaggaccccacatcacaattgatttaccaactacaatataatacctcctgaatctccaaattggctcacccaggaacaaaggcttggggtaaaactggattaggagatataagctctgaattttctgagggtgagacacacaaggattctaagtgacacgccacagagtaacgggtctgtgactggaggacccacagatttgtcttactggagacaccacatgcacacaaactccatccttagctgtggaaacaagggtcttttgctatcttagccgaattctgggagtaatttttggaggggaggagatctttgggattgcctctttcaggccctttacaaaaatacctacttcttaaatggtaaagcttacactaaactgaaaaaattacatccttggctttttatgaagtaggtgttggattgaatcactactggaagaagtatggcatcgcaaattctaagcagtggtcaaaggatggatctgttaaattagaaaaatctctaaatttataaaaagattttagattcctttattctaaacaattgacctatttgtactcatgggacaatcaaatttcaaaggagatatgtaacgatttcatggcttgcattaaaaatccttctgataaaattaaagataaaaaatctgaccccctgccaaaaaaatcttttgaagttcatactgcctgctttcaatattctgtgggattcacaatgaaaggtgccttatattgtggcctagcttcaagtttatgccttcgccaccatggcctgggttcaattcccagtcagggccccagcgcctttggtttaatgtttgcgtggcatttgacttttttacctatttagtattggtgagattacctttggtaaaaaaaagtttaaagagtggaaatcgcaattctttgtgttggctaaaatctgattataagagatctggaaggttttatttttctttttcaaagagctctatggtcagaagtcggcttcatgaaaagctaatatttaattatatgtacatacagtctttctggattttctcttttgcctcctgttttgaaaaatatttggatttgagtgaaactccgttttagaaattaattgcttggtacaatatacccatgtaactaccctgcacatgtaccccctgaatctataataagagttgaaattttgacaaaataaaattagattttgaattaaaacaaataggtgcttggttcctctgctcacttctttttaaaaggaattcctctcccatgtacttcttcttttcccttctttaccttccttttggcatctttggtatcacatgaagggatctagagggaattttaagtgactctgaaattccttgagaaatacacaaaaagatcccactcaccccttttgggggtctcctgttctccttgtggagtccagagtcagggacaggctcctccaggtctgcagctctgctctcttttatttcatcttggctgattgctttggttttgtgagtaccaggcattactttgtactgtgagagacacgtcctttgtgagtgcaacggctgctgggtcactggtgagggctgcagtttggagatggctgagagccgttgcaataaatggttgtgattgcagggggctccttgtttctttgcaagtttagatgagaaaggtgcagtttggacacagtttaaaggctgtgaaaacaccaccaatgaatatgatttcctttggggatggtctgattaaaagtgggctgattgttgctgtgctactagccttgaagacatgtttctacagcattgtgcagtgtggaaaaattgtgtggcttggtcttgtggcatgtcccttcttttagagacctcagattcaatgtgaaattcgggatttttgattttcaaagatctagatgccctgccttccagatgtgcctactcttcacatattttaaaattagatcctataaactgcaaatactttgttggcttctgtgagatcagaggtccagttagaaaaggaagacagtttgttaaaattaaaaactatttatctaatctaactagattggcctccaaatatgactttctgacattcagctggttactctgaaaagatttctaaatctcttgaggctcatctatatgtttccttgcaaagaaaaaaaaaaaaaaaaaaaagcaagcccaagcactagtaagaaaaagatttgcaatgtttcatgaaaggagtagatgagtgaagcatttatttgtagatactgggttggatacctgtgcaaagaagaagaggtcaataataaaaattgccaggggatttcttggaacttaacaagctgaattaaatatagaaatgtcaggaaatcaaggcaggaaatactcacttgtggttaggcagacagggcagggttctgagcttgagatggagcaaacagttgtggtgggtgaagttcacatgctttagagctcagctgtcctagtaaagaagcctaagagtctctaaagctcttatgagaagatggattttttttgcctagattaaaaggttaaagaattgctttaagttggataaaataaagctaaatgtttaagcaagttgtgaaaggtttatgaaaaaattaattaaaatatttttgtgtgtaaacatattgactaaagttgaaggggtataattcagcatttctgtaaattgagcattgaaataaaaacacaatgggtttctcttagagcactaacctgctctttaacaaaaattgtaaagggttatagaaagtctataaaaatgttaccttatggtcaaacattaaaattgggtaaatatgtctatcaggttttattaagaattaggtttaacattaatagtacactaatgtaaaggtgaaatttggcttatttggtacaaaaatcatacaggaagcattgtgaaatataaaatgatttttagctttctttgggctatatttctataaatatgttattgatgagggttccaaagttatgggagactcctataattctgctatatctcagtgtacattatcagtcataattataattgtcatgttaaattattgtgggccacagaggtaacagatttccttgtcaattgtgtctttgactatgactaccctaaaacgttcagtcacccatatacacatgttaccttgttttggccctctttagaaggtaattttataatcagctataaagccctaacaggtgctcttaaatgcaaattttgataactttggagattgtgacatcagaagagaggaaaaatgttcgggacacttggagagctaaaatgttcattgatatcaagcaggacaggaattaactgcatgaagtgaactaataggaggctgaagtgatctttttgactttttgcttaaaacgttgctgatcctttgttttgcttttcagagtcaaggcaaattttcttttgagctattgacagcttttaacgattaatcaaaatatactcctatgaacaccatttggagcattatttgtttctctctacccgatttccccagaatttggaaactatttgtgggtattcttaatttatggcaatatagttatttgcataagtgcaataagaatgtgttttctttggtaacaggacacaatttgaaaaactggttattttaccaaggttttgaccagaatgctgtgctttcctttaaggaatcaaacttgacttgtggagctaataaagcctttggaaaactgaccttatatcctgtgaacacagtccctgtacagggttactgatctgtgggaagaaaagaatgtcacattctgacaggtcaggaatcccaagttatcttgaaacttcaagaggacaggaattcacccaaccatatgtatttgatggtagaaatccatggcaggggctcagctttaaaaagtcttatctcagattccttctataaaacaaagtcccattaaaaccaattttaaaagcctatgtgaaaaataattattcttgctgcacctcgtacaaataaagtggcaaagcataataaagcaaattggtcctgtcgtaatttgtctttagtaaaaacgggaaactggggtcgggtgcagtggctcactcctgtaatcccagcactttgggaggctgaggtgggcagatcatctgaggtcaggagttcaagaccagcctggccaacatggtgaaaccccatctctacaaaaatacaaaaatgagccgggcatgatggcgggtgcctgtaatcccagctactcaaggggctgaggcagggaagcggaggttacagtgagtcaagatcgtgccacttcacgacagcctgggtgacagagcaagactccatctcaacaacaacaacaaaaaagggtaactggagagagggaagttatgtttcaaaaacttttggaaactatagtacacctgtttttaaattctagtctggcattcagtttttattattttctacagtttgggttaaattcgtatttctctggctacaagtctcctaaataatcttttcatttgtttcctttttctttccctttttccccatttttcttaattggaaatcactgaaacctaagctgtgctttcttaaagccctgtgaactgaagactagacaaccgaaacttctgaaggaagtagcagcaacctatttatatgtgttgctgttgcctactattatgttttagcaggtgctgcctctacacccccgaaacagagagtgctactgggaacaaatcgactttttccactccagtgctgcattcggtgccccataacgatgaccccctctcagcaggaagtagccagaaagattacaatgctccatctccctatgattcttgtgataaataaatatacaagcatgatagaaatcatgcgcaaattgacagtggggattgtggcaggccagatttcactaatggaggtccccatcacaactacttcagtactgactgagtggttaagttcagtatcaaaagctgaaagtgccagcgcctttctacaaaggctagaatgtaacaaaagcccaccaagggttttacctaggcctttcctgggccttacagcatgacaaaacaaagaaggaattcttaaccagacctgtttaggattaaacaaatttaattgggggtctgaagaaactcgccaggcctccacaaacaagttcattgggggtctaaaggaaccccccccaaacctctgtgattgagcaggagacaaggtcagggtaattgccccagcacctggactcatttagatttaagtaaatgtactgaggctccagagaaaggtctccaagacttagactagagttacagattaaaagaagttaatcacttatatctttagataaatgcacactgacacgtagacatacatcttagaaaatatataagctctggaaaaccttgtaatttacagttggtctggagatattttctgggccttctctctgtaaccggttccagaaataaaaaactctcttcctccccagtttatctgcatctcgttattgggccgtgagaaatagcagccagaccctgagtttggtctgggaacacactggctgggcttcctgcctggcggtagagcttcactgtcctccttcccagccaaaatgtggcccttgaaggcttcctccccaactgaccggttttgggttctaggtactcagggaacaccgtcttcaaggaggccattttcatactgttcctggtttgatttttctgaaattaggaaatgccccttgaggcatccaggattgtctttatttcccctgaagcttcccctcctgaagaaaaaagttctcaaacaccctcaggactcaaaccccaagttcaccctgtgaaacattcccatttcctaaacccaggcaggctcatggccctcagcctctcagaccccatggaaacctcctcccccacttcacgggttctctccatattgagagcctcccctcctcggcacacaacccagagactcaccccaacatgtgtagcaaatcaccctggaaacaatcatggctgaacgtggtagcccatgcctgtaatcccagcactttgggaggcccaggaggtggatcacctgaggtcgggagttcgagaccagcgaggccaacatggtgaaacctcgactctactaaaaatacaaagttcactgggcattgtggtgtgtacctgtaatctcaactactcaggaggctgaggcaggagaatcacttaaacctgggagacagagattgcagagagccaagatcgcaccattacactccagcctgggcaagaagagtgaaactacatctaaaaaaaaaaaaaaaaaaaggaaaaggaaaagaaaaaaaaaatcatgaggcaacattgcatttaacaatattttatttatcaaaagacacttgtctttctcaggtaagtgaaggtctagagatgaaacgagtcccgatgtaaattgccccatgggcattgctgagatcacaagatcatcactgcagcatgcagcacaatagtaaatttctcaggatggaagttcaacaatccaaaaggtagtattttttttcatgatgctcagtccatcatacgaaataaaaataaattccttttcatgatcatccattcagtagaaaaaatgatagtaaatttgttctcatgaagatttttaccgtaacatataggatttatcgttattattattattctttgttttttgtttttttgaagcggagtctcactctgttacccagtctggagtgcagtcgtgcgatctgggcacactattaacctccacctccagggttcaagcatttctcctgcctcagcttcccgagtagctgggattacaggcatgcgccaccacacccggctaattttcgtatttttactagagatggggtttcaccgcattggtcgagctggatttgagctccggacctcgggtcatccgcccatctcagcctcccaaagtgctgggattacaggcgtgagccaccgcgcccggcctcaatttatcattattcacgcatccacaaactgggttcttatattttgtacgtgattttttccattgaggagagatatctgtgcatattcatgctgctcatatttcatccacaaactcggttcatatttcatccacaaacataattttttccgttgagaagagatacttgtacatatttatgctgttcaaattcacatttcatcattcttttacaagaaatagataatgtattttaaggttttccagtggtattacagatattttactgggtgtatagatagaaattaaaccaaacttctttgttctggccgccagtcatgcatcctgttttcaacatagttcacatacaactggttgtgtaaaaatgaaattattttgtttagtacaatcatcaacagttggttgattagatttttaattatcaagttaatcattgtcattatgcttctcatcgcactcgtcattaattgctgtgggaggaaatttgttatgttccctatgagagggtgtatcacaaattcaaataagaattcaacgacaatggactgtataaaggaaataagcaagtccatggaaaacatatttttttccggaaaggattaaaatatttttaaaaaggaattaaaaaaaaattgggcacggtggcaaatgcctagagtcccagctgctcaggagatggagacagaaggattgcttgagcccaggaataagttggaggctgtagtgaacagtgattccaccactgtactccagccagggcaatagagggaaaccctctttctaaaaagacaaaaagaaacaaaacaaaacaaaaaaacaccacatcaaaaaacccaacaacaaaatgaaaaaccaaataacagcaatacaattggagctattcgatccaaagaagtaaatgaaacataaagcaaataaaagagaaaagctaatacctgtgtcctgcaggactcagtccaagttctgctctgactccctcctggtgagccaccccttaaaaagtcacttggggcggggttactttgacagacagtcttctgtcaaagagggaggcggtaaatagcacttttttttttttaatttaacgcctttccaacaaattagcggctatgttgtctaagagtgcaaatgtcagaggtgggtacaggcagcaagaccctccccacaggggcagcagaaggaggaatgactaagggaacaagactttagtgtgctcaactacacaggacaggaaacagatgctttttacaaaagctggtggacttgaaggcagaatattttcaagttcctgtaactgcgaactatgacctgtagcctgtgagagtgactttctgtggcaaaggagcttttgtgaatgtgaggaagttaattatcttaacagtgggaggttctcccggcttatctagctagaccctcgtgaaatcccaagtgtccttaggaaggggaagcagagagagatttgagtccagaagaggaagaaggtgatgtgaggcccagtaggggaacaaagggcgatggcatgtaaacacttagcccccagaagtgggagagggctggggttcatcacaccagaatccctaacaatcagccttattttaattacccttgaaatggaaggaggccttagagagccagaggcttggaggggcaccctctgctgcatacacagatcccaactgctgtgggctccaaataattgcaccagggaaatcacaaattatcaaaaataaaggatgtaaagcttttaaaaaatattaaaagcccaacaaataaaaaaagttctaaatctataaaattgacctcagtctgtatatttagatgagtcatgtgtatatagcgtttcacttcaaaatatatgataaatctctcattcattggcttaaaaataaacacttcaatcaagtctttatcagaaaaattgaaacgttaactcaattgccttttagttcatgtgactttacaaaacttaaaacaataaagtcagttttaaaaattattagtaaagtaaaagaaaaatatcttcacaatgtagacattttgtccacatgagacatgtgaaatattgccattactaaatatttgcaggtcaaaaactgtttccaaaacattttaaataatcatctggcctgtctgttttagagcattcaattctagctgaggtctggggacatgtgaaaggagccacggcccgactccgtgctgggaagagtcagacattttccacagctctgtcctttgctgtgggctctgcaactcctaccaattaaaattgcttacgtttttgttttatttttactaaagaggggttcctaaaagctaacattatactgagtatatgtaactaaaactactaagaaaacaatttcacaattatacaaatgtgccaagtaaatgaaaaaataaactgtattttaataaaggttataaaaagaaaaacatatagtggtgtgaggactgtctcaggtcttcactgagcaagggatcatgacattctatggcggacagctgaccttggctttctgctcctcttgattatgtctactaagtgacatacttactctttttccacctgtcttgcctctaagggtaacaggttttatgagatccctcctagtgctttgcaggtcagcctccctttgctgcattccaattttactgcctataccctccagctggcttttgatgacaaaagtcctggtcccagccattctcagattctgtcatccccgtgggcactatggagctcagcactatgggaggttccccaaaaatctcgttttctatgaggaatggccaccacctgcatctcagtgatgctagtgacccctttcctactcctgtgctcactggtcctcatgaagatcctggttggtctgtagccccctatttttcctattaaagagaaattacagtaagacccatttgtgtgcaaaatcaattttaggcttattacacttggcctgataatttgcataaaatgcagcaagaattcatcggccatataggctacttttgagttaattttcctgggtttttacctaaaaatatactattttggttagagtcttgtgaaaataaccaatgtgttcaattgttttattttaaaaggctcttactgaacactataaatatgtataagttgaatatacaaactatattgtcataaaatcacaacccaaaatgtggagaacgcagagggaaaggtaaatttgctcgcaaaaacatacttcacccaaataactggaaaaaaaaaaagactttcatgacccttctttaaccagagcagcagctttcaaacaaggtgtttgccttggaaatgccattcacaagccaaacggcccttgagagctgtctgtcaggcactgtagaatctagcagctcctcacagagttagaaatagtttcaggaaagagattccctgcttttagtaactgcactttatattcccagatagcgagattgtatgtaaaccatttttatcttattctggaactcttttgggtactttttttttttttttttaaatgatggagtctggctctgttgctcaggctggggtgtagtggtgcgatttcagggtatgagaaaatgcagctggacctggctctttccaggaagaccctcacagccaaggagtccaaagcctggggttttcatctaattccagtgtgactggggtaggagcagctttggtgctgggtgtgtgtgtgtgtgtgtgtgtgtgtgtgtgtgtctatgcctgtgtctgtttagggtgttaggctcgtggttgtctagatacaaatgtcccagggctcaggagccccagggttatgtcaggggcaccagatgaaggtgtcaacagaagttagggcacaagggacaaaggtgagagcaaggttagattcatttaggtgcaagaaatcatagagggaggagggagaggaagccctcctgctaccaccgaggaagaagcgcagcttaaggcagaaagcctgtccggagaggaagtgagtttgagggcagggctctctgggtaaagtacggtctgggacaccagcctgggggaagggtacagaatgcagagtggcctggcgtggggactaagaacagaggagagcagctttcactgggagggtcagtgttttcagtgtccagcactgagcaaggtgagatttgggcagcttgctgtgaaataaggtcaggctctggcattgtccccattgcgtgtgtgtgtgaggggcactttgggagagtgaactctccacctccatcctctcatacgtccttcaaccgagcttgccagttaccctgattccaaggagatctatttattgttgacaatactggatcctagcagaggctgggtaggagcctgggcacaagcaagtggaggagggggcctgggcctgaaagacctgggaggtttgagagaggacacagcccacagaatggagcagatggggtagagtcggcaagcattcagggctcctagtaagttggacaatggagaccctgaaagatccagtaaaacggggagaacaaacaggtccccaactcacatccttgcagtgcctggagcttcagactccagacaggtggggaaggaaaattgagggatgtgaacatgttggagaatgtcgtgccctgaagaatgaagaaaaggggggtgaggaatgagagcaggaacggcttccagtgcctggtgcccaggagaactcagaaaatgggtgtggtggagaggaatcgaggaaccggaagtggtggaagtgtgcagggcccctccgagatcactgtgactgccaggcgtcctccctggctggagagcttcactgtcctccttcccagccaaaatgtgtcccttgaaagcttcctccccaatggactggttctgggtcctatatatttgaaggggtggcctgcctctccacacctgtgggtatttctagttgggtgggaggagagacagagaaaagaaataagacacagagacaaagtataaagaaacaacagtgggtccaggggaccagcactcagcacaccaagggcctgcaccggcaccggcctctgagtttcctcagtttttattgattattattttcattatttcagcaaaaaggaatgtagtaggagagcagggtgataataaggagaaggtcaatgaaaaacatgtgagcaaaagaatctatatcataattaagttcaagggaaagtactatgcctggacgtgcactcaggccagatttatgtttctctccacccaaacatctcagtggagtaaagaataacaaggcagtattactgcaaacatgtctcacctcccgccacagggcagcttttctcctatctcagagttgaacaaatgtacaattgggttttacaccgagacattcagttctgaggggcaagcaggagacagtggccttcctccatctcgactgcaagaggctttcctcttttactaatccacctcagcacagaccctttatgggtgttgggctgggggacagtcaggtccttctcatcccatgaggccatatttcagactatcacatggggagaaaccttggacaataccccgctttcaagggcagaggtccctgcggctttccacagtgtattgtgcccctggtttattgagactagagaatggcaatgacctttaccaagtatactgcttgtaaatattttgttaacaaggcacatcctgcacagccctaggtcccttaaaccttgatttcatacaacacatgtttttgtgagctccaagttgggtcaaagtggctgggtcaaagtggctggggcaaagctacaaattaacaacatctcagcaaagccattgttcaaagtacaggtctttttcaaaatggagtctcttatgtctttcctttctacatggacacagtgacagtctgatctctctttcctttccctacatatattcatggaccacagtcttcaaggagtccatttcctcactgtttttggtttgatttctctgaaattaggaaatgccccattgaggcacccaggattgtctttacttcccccagagcttccactcctgaggcaggagcttctcaaacaccccccaagactcaacacctaatttcaccctctgaaaccttcccatttcttaaatccaggcagggtcatggtccttagcccctcagatgctgtggagaccttctttccctttcatacattctctcaagattaaaagccacccctcctcagcacacaccccagagactcaccccaacatgcattgcaaatcaccctggaaacagtcataagaccacactcatttaataatattttatttatcaaaagacactctttctcaggtaagtgaagttctggagaggaaaagaggagtcctgatgtaaattgccctgcaggccttgctgagatcacaaggagattgttactgcagcttgtagcacaatagtaaatttcttctctggatggaagttcaacaatccagatcgtagtatattccttttcattatgctcagtccagcaaatgtgatgataacaaattccttttcatgatcatccattcagcagagaaaatgtttgtaaatgtgttttcatgaagatgtttaccataacatacaggatttaccattatcaatgcatccacaaactctgctgttgttttttatacataattttttccatcgagaagtgatagttgtacatattcatgctgttcatatttcaaccacaaactctgctggtttttttatacgtaattttttccattgagaagtgatacttgtacatatttgtgctgttcatatttcatgtttcatcatccttttacaataaataggttatattgtattttaagtttttctaactgtagtgcagaaattgtactgggtgtatacatagatatcaaaccaaatttacttgttctggctgataatgcatcatttatttcatagattatgtatttctttgacacatttcacgtacaactaattgcataaaaatgaattttcttttagtatagacatcagcatgtgcttaattcggaatttaattgttgagttaaacatcgtcattgccttttccgttgttattaattgctctggtgggaattttgttatctcatacataagacagtgtgccacaatatctcttaaaatttcaatggcaataaactttatatttaaaaacagggaatctatggaaaacacatttttttctaaaggattaaaatatttttttaaaataattttctaaaaagttaggcacggtagcaaacgtctagagtcccagctactcaggaggctgagacaggaggattgcttaagcctacgagttgggggctgcagtgaactgtgattgcaccactacattccagccagggcaatagaagttaaccctttttctaaaaaaaaaaaaaaaagaaagaaagaaagaaaaaaagcaacaacaccaaaacctcaccaacaaaatggtaaagaaaaaaaaaacagcaatacaatgtaagctatttgatccaaagaagtcaatgaaatttaaaacaaatgaaagggaaaaagtaatacttgagtcctgcaggactcagtccaagttctgctgtgcctccctcacggtgagccacccctttagaagtcacttgggtcataagttaacccgataggaagtgtcctggccaatgaactagggaggtggtaaatggcaccattttaaatttaaattcacggccttttcaacggatcagtagccatgttgggtaagagtgcaaatgtcagaggtgaaaagaggcagcaggaccctcccctagtgcttgggcaacagaaggtggaatcactaaggggacaagactttagcatgctcaagtacacaggacagaaaacatgctttttacaaaagctggtaaatatgaagagggaacattttcaagttcctgtaaccaagaactaccgcctgtaaccggtgaaagtgactttctatggcaaaagcgtttttgaaaaggtgaggaagttaaatatcttaatgttgggaggttcttctggtttatctggctagaccctaatggaatcccaagtgtccttatggagcggggagcagagagagagatttgagtccagacgaggaagaaggtgatgtgagtctgggtgcgggacagggggagaatgatgctatgtggggatctgggctggggaatgacttagctgcatgagcggagtgacttagactcctgaactagaagaaatctagggctcatcacctcagcagccctaaccatcaaccttatttttattacaggtcttccatcgacggactccctaaaaagccagcggcgtggaggggcgccctctattggacaaatagatcttgactactttcggccctcaaatagcctgactaggcaaataacaaataataataatttttttttaaatcatggaaaatattttaaaaaacaattaaaaagttataaatctataaaatctgcttctgtctgtgtgtctgtatatttagatgtctcatgtgtacataatgtttcactaccaaaatatatgatgaaaccctcattaatcggcttagaaaactaaacacctaaatattttctcagaaaatacaaaaactttaactcaaatcccttttaattcacctgactttaaaaatctttaaaaaataaagcatgctttaaaattattagtaaagtaaaattagaacatcttcagaatttagacatttggtttaaattatacaggtcaaatactgcccttagtaaatattttcaggtcataaacaactcctgtaatcttttaaataattgaattacatgtctgttttagagctttaagttctagctaaagcctggggacaaatgaagggcaccatgccccctctctgtgctggaaagagacattttctacagctctgacccttgcagtaggctttgcaactgctacctatcaaaattgcctacatcctaagtttattattaaaaggagttgcttggagttaacattataatgaatatatgtaactaaaactatttctcatacaaagtatatgaaaaagtagaatgtatttttaataaaaagttataaaaagacatgaacatgtagtttttataaaaaacagtaattttgtctagttttgcagttctaaaaagttatgttaaattcaaaaataaaaaataacaagacaagactcaaggtttaaataagttgtaaaagatttgtaaaaattagttctataaaaattttacaaaaaaaagcattggttaaaatttaaggaattattttgtttttacagaaattaaacattcattaaaaacactctgatacaaggccttaatttgggttcatgtatcagaatagcagggttttcttagaatattaatctattctttaaaagaactatgaatgttatgcaaactttataaaaatcttaccttagagtcaaactgattaaaattccatagattttacgtaaaattttattaaaaattaacttcaacaaaaataaaatttgattttctcctttaaacaaaagttttgcgtaatattaaataataaagcatttttgtttaccttttaaactataaacacacacacacatacacatacaccaacactaaagtcagctgacctcatactgtctttattggatattcttgtttaaaaaactatcttctttggaaaataaagttttttattttaaaccatattttaaattatcattttgactaaatccataacatacagtgatctgtaataattctattttataatatcaagtgttttgaagaactccaggaacagccatgagagaacactgtggtttagtaacactttatttcctcagtttgaaaatagttgtctttcttggggaggccggtttcagcagatgaaaacaagagtcatgatgaaaattacccagcagtggttagtgtgaccataggaacattgtcatcaggtcagcagaaaacatatcagcaaatttttctcatactggcagtgtgtaggggtggatgtttacagttcctgaagccccagtggtcgtgtggtcttttagttttgccatttataggcaacttgtggtaactagctcaattagacacattccttatcacaaggacagagggctttctgtatcctagggttcttgccttggcattccagaagaatcaggtcacacgtggacgtggagaatgagtgcaaggttttattgagtggaagtagctctcagcagatgggggagccagaaaggagattggtttctccctggattggggccgttcagcagccctggctctcctctgactgccccaggcaaaatccacatcgttctataagtcggtgccctgctggtgtgctggtgcctgttgtcatgttcctcttcatgtccagccgcctgtgtgttcctccgctgatgtgctcctctcgacgtcaagcctcctgtgtgtctgactgctagggtcttggggtttttataagcacaggatgggtcttagcaggccaggatgatcttgggaaagacaacattcggtcaggaaaacaaaaatgcctgttgtcatctaggtccgtggggacaagcccaggtgtggagcttttagccagggaccacagcctcctgtatccaacacttcccttcaccttttctatatcattcaaagggatcatgcccttcccatcccagcacttcactttcatgtcatttgccccctctgaagaggtacatctaactgccattagaatatggatgatgaccagtcttagctgcttcctgctgaaagggggcattgttttgggggaaaacggcagtcagattcctcccaggggtctctataataaaagatcgaggtggctactttcaggaggtcctctaatgtactatctggtcccaagtcccatttctgcaacctcctcctgatgtcaggagctgcctgagtaataattttatcctttaggattatctgtccctcgattgaattaggagatagagaggtgtgatttaccaaggcctctcttagcctctccaggaaggcagtgggattttcatcaaatccctggttaattatggacaacttagtataattgagaggcttggtcttagacctacgtaagccctctattatgcacacctgaaagtgtctcctcttccagtcttccatctcattattgggatcccatttagggtccttcactggtgctacttctcttccagttggataatattcgctcccttccctgatgctataggtgatgcaaagctcatccccaaatctctctgctgctggcagagcagcctgcttctcagtgtctatcaggttctgactcaaaagtaacataacgtctctccaggagagttcaaatgttagggtgaaattctggaaagcttctatatatctatcagggtcatctgaacacttgcccagatctcccttaatttgctttaagtcttgtagggaaaagaggacttggaccttactgggcccaaattcactgggcatctgtaggaggggcaagagtgagactgggcttgtttgggatgaagatttctaggaggggccaggtgagaggctgaagctggatacggaggttggggtggacccagaggagcagggcttgagggagctggcacgtcagctgggggtgcgtctgggactcgtgtctttaattccctgggcttgaccctggcagccttccccgagacagcaaacaggagggctggaacaatcctacatgtcagcaaaggtctggattgctttgcaaggtatagaaagcctgcacatttggggcctcagaccatgtgtcctcacatccagagaaaagttctaattgcaggatggtattgaaatgaatggtcccttcctgaagccaagccagtccttcctgtaaaccataatttggccaaacctatgtgcggagggctatgagatgcttttcctctggattctgagggtcaaaacagtcccaatggttcaggatacactcaaggggagtacaagctgggggtggtgaggagaactggctgcccattctgaaagacagggaatagaggtgttcctcatttcccttccttcttttggcaaaaagctcagggtgtgatggggagggaaagcaagcatcttcacttcactttccacctcttacccctgcgccctggcaaccttggcaggtgccggccacaggtacaaatgcggtatgtacccatgaagcagggagaacctggagattaggaattaactgccctcacctatgtttccttttctccctgctgttgaaaaactttgagttccctgggcctttttatcccatgaggcatggcctccttctgtgggatggggttcagtcagcaggaattggtcctgtccatttacattgtgcctgttgcctggctttgaattcctcagacctgctttctctttctagggcctcagcctgaagcttggaattgagtttgggactgaaaaagcatttcagaggctgtttatatccatttagtgcctcaaataagccctgctgaatttgcaattatcagccagcaggggtcactcctctgttaacttccctattagaaacagagcggtggggattctcacttagaaaagaaaaaaagagaaaaacagttaaagaggcaaaaagtggggaatgctgggggaagaaccccttgcttagtgcaagtgggcccctctaatccttataactttcccatccttcccccagttcagaccaggttgaattccttggccatggaaggaaaggttccattgatgcagtgggtgagaagcactctgtagggtcctggctaccatcggttttctcacacccccctcatcccaggcagtggagggagacacttctgcgacattgctccccctgccccttcatggctattgggtgtggcctttgcctgctgcaggcatgcctaggtgctggagctgggagggaaaagggtaaggagaggtgccctggaagccgctcatgcctggggctgtcaaggtggaggcatacatggcacctctaggaaaaattggtctgatttgcacctttggcggctgagccaaatgctcattttacttagtaacattgcctcagcctgtagcaaaactcttaacattataaaggaagagataagatccatttcaaataatgtgtgagagagaaaagagatgaaaggaaaacagagtcttttacctgcaggaaagggagagaagtggcagagttttggaagaaaggcaggcccaacagtttcccattcactcacactcaccttccgagatcccagacgagccaccagttgaaatgggaaaagtttccttgtccccctcacaggaggtggagtgggggtgtggcttgcttctttagtactccgctgctcaaacctctagggaagcatacagactggcaagttgtggggctacaaccccatggcagcatctaggggtagatgtttacagctgctgaagccccagtggacatgtggtaccatgtgctcttttagttttgccatctataggtggctttgtggtaaccagctcaattagacccattccttaacccaaagacagagggctttctgtatcccgcggttgttacctaggtgtaccagaaaaatcaaatcacacgtggtcttggagaatgagtgcaaggttttattgagtggaagtagctctcagcagatgggggagccaaaagggagaatagttttcccctgaagtcgggttattcagcggcccaggctctcctctggctgccccagccaaactctatgtcaatccattggtcggtggcctgccagagtgctggtgcctgttggtggattcctctcagcgtcgagagtttttccctctcaggaaagggagagaagtggcagccacccatgtgttcttgcactgatgtgctcctctcgacgtccaacctcctgtgtgtctgcctgctagggtcccagagtttttttaggcacaggatagggcatggtgggccagggtgatcttgggaaatgcaacatttggtcaggaaaacaaaaatgcctgtcctcatctaggtccaggggcacaagcccaggtttggagccctagccagggaccccggcctcctctacccatcactttccttcaccttttctgtatcattcaaagggaccatgcccttcccttcccagcacttctcttctgtatcaataggtgatgtttttaaaatttcccaactctagtgcaggcatggtactagacatatacatagaaataaaaccacacttattcttctggctggcaagacatagtatttttgccaaattatgtgttgttttgaagcattttatgtacccctggtcatataaaaataaagctattttgttcagtacaaacagcagcattttctggattagaaagttaatcatcttaaaagatcatcacggatttttccattgcactcatcactaattgctttggcaaaaaatttcttatctcacgcatgacaaaatcagccgcagtatctcctagtaatttaatggtgatgatctttataaaggaaataagcacatcaagggaaaacataattttttttaaaaaaagagtaataaaactttttaaaagtcttttttaaaagactgcttttctaaaatagtaaaataaaactccaccaataaaaccaccaacaaaacagaaaagaaaaaataatgatatgatcggagctatttgatgaaagatggtaaattaaatttaaaatgattagaagagaaaaagcaatacctgtctcccgtaggtctcagtccaggttctgctatgcctttctcctggtgagccacctatttaagagtcgcttaaagcatatgttaatccaacaacagcagattaaaaaccaatgcaatctgaactatttgatctaaaaacataaataaaatttaaaacaaataaaagagaaaaagcagtacctgtgtcctgtaggtctcagtccaagatctgctctgactcccttgtggtgagttagccctttagaagtcacttggggtggggcatatgttaattccactaacattggttctggccaatgagtcaggaaggtggtaaatggcaccttttcttcttgctgatttctttcagttcctttggagtctggacattagtcctttgtcagatgcctagtttgtgactactgtttcctatactgtgggttgtgtgtttaccctgctgatatttcttctgccttgcagaagattttcggtttcattaggtcctattgatcttattctatttttatatttttgcgtttgcttttggggcattagtcatgactacttggcctaagccaatgtctagaaaagctttttggatgctatcttgtagcatttttagactttcaggtcttagatggaagtttttatatgctttgttaaagatcaggtgactgaaagtaccgggctttgtttctcggttctctattctgttccattgctctatgtgcctatttttatacttcctgcaccatttattgaataaagtgtcctttccccaattagtgtttttgcatactttgttgaagattagttgtctgtaagcatttggctttatttctgggttctctattctgttccattgctctatgtgcctatttttatacttcctgcaccatttattgaataaagtatcctttccccaattaatgtttttgtgtactttgttgaagattagttgtctgtaagcatttggctttatttctgggttctctattctgttctattgctctatgtgcatattttataccagtatcatgctattttggtgattgtagccttgtagtataatttaaagcctgccttcagatttgttctttttgcaaagtattgctttggatatgcggtcacgtttttggttttgtataaattttaggattcttttttctagttctgggaaggagaatgatgatattttgatgagaattctactgctctgtagatggctttggagagtatggtcactttcacaatattgattctacctattcataagcttataatgtgttcccatttgtttgtgtcaactgtgatttctttcagcactattttgtagttttccttgtaggaaacttacattaacctacttggttaagtatatttctaagtattttacttattaaaaattctcagggaaatgcaaagtaaaactgaggtgggaaattaaagaaaaataaaattaaaaagaaagggaaataagctttcttgtattaagctaacttgtcccagaggcagcaacaggcacagcccagacccaggaaaagtcttgataatattatttattgtattctggagactcttccagcactccttcaatgtagggagaagaaaaacaaattttcctttgttttatggtatgagtttatagattcttgttctctttaactagtaacttcaagtattctgttttatctaagaagtatggcaaaggtcatgagaagcctgagcaggcctgaactacagctctctaggcaccatagtgaagataaaccaatgcaagcctctttagagcaaaacctagataatagacatctgggttgcatagcaacagttatgtgcaatcctgagttatgaacctgttacaatttgattaactgtctttttcctgcctctgtatccctgctttcacaccactgtaagcttgcttcaagctggcccacccccttttgtgaagtgtgtataaaagtcaagtgctgtctttgttccaggccctgtctttggacgtgagtctgctgggcctgagagcactcaataaaagattctcctgttttaacccaaagcctctctctcatcctcctaaatcccacaacaaaaccacaatgagatgctatcttaatcttgctagaagcccataatttaaaagtcagaaaacaatagatgttggcatagatgtggtcaaaagggagcactttgacactgctagtgggaatttaaactagtccgaccactatggtaaacagtatggggattccttaaagaactaaaagtagaccattcattccagcaatcccattactggctatctacccaaaggaaaagaagttattccataaaaaagacacaagaatatggatgtttatagcagccgattcgcaattgcagtgatatgggaccaacttaagtgcccatcaacgaacgagtggataaagcaaatgtggtacaccatggaataatacttgataataaaaaggaacaaaataatgtcctttgcaacaagttggatggaactggaagccattattctaagtgaagtaactgaggaatggcaaatcaaatattgaatgttttcacttttaaatgagagttaagctatgagaatgcaaaggcataagaatgatataatggacttggggactcagggggaaaggttgggagggggatgaggaataaatgatgacatattgggtatattatacactgctcaggagacagatgcctcaaaatctcagaaattaccactaaggaacttttatccacataaccaaaaaccacatatattccacacactattgaaagaaacataaacattattttaaaaaataaagccacttttaaaattagcaaaataaaataaatatgtcttcagagtttagatattggatccaaattagacagatcaaatactgcctttactaaatattttcatgtcattaacaacttctaaaacctttcaaacagttttttgacatgtcttggaaccatccatttctagctaaggcctgggcacctgtgaaatagggccatgcccccccttatactgggaagagtaagatatttcaagactaagatgttttctacagctccatctttttctttaagctctacatcaaggacataattaaaattggttgtctcctaagtggtttactaaaaatgcatacttaagagttaccattataattaatatttgtatctaaagctacttaaaaattttcacacacaaatctgactgaacaagtaaaatatattttaagtcaaagtttataaaaggacatgagaacatagcttttatgaaaaaattagttttgtcaagtttagaggttttcaaatattttaaattcaggaaataaaataacaaaaagacaaaagaaaatggttgaacaacttagaaaaggtttgttaaaattcatcttataaaacaatctacatgtaaaaagtgggctaaaatttgaaagagattatttaggttttccataaattaatccagaaggggtaggaagtcttaagaatgaggaaggacaggaggaaggggaggtcatcctgacactgcagaggcagaagtgcagctgaaggtatgaaggctaagaggggaggggagtttgagtgctgctgcctggctgtcagagcagaggagggtcctgggcaccagacttgaggaagggatgaaaatgctgggcagacctgtagtgggcccttgagatggcagatagtggtttccagagagagggccattgttttccagtgcccagcactgagcagagagagttttgggcagtgtaaaaaaaaaaagagaacttacctctttctcgttttagaaaaagaacagtctaagaatatcagcagggaaactctcagtgcttcaaggggttaaacgcccttttggctttcttgtgttggtttcatcatagaggaggagaaacttcttggaagtgttcctaaaaacacaacacgtctgcttctcctttcaaaaaaggaagtgctaaaacacgaacactctagatccaaatattaatacggatgtctaaatgcttccgttttccaaggggcagaaagctaaaggttgtaacctattcatttcagtcaaagttggtgaaagggaagcaaaggaactgggtggggcttggaaggatgacgaagctcaagctcattggccagcaacctctctcctgggggcgggaggggtgagcatacgtcattgctttggcttctataaaatgaggaggactcaccgagtgtgaagagtccttctggtgattgcagctgagagcacactcacgacgttctgcaaggattctctgattatgattctgaagggaaaagcgatggaatggacagcagagattgtaattttctttatcttgaattacggaagaaagtatctaggacagaaatccacgacaagtccttggaaccagcagatctcttcgttcacggagacgttgacgtattctctattgaagaagattcttaccttcttactggacaaggttttgtcagttctgcgtgactggattgtccgggagactctgaggaaactgatgtcacatgtttttccaaagaagatgtttctggaaccaacaactgtgattgtggtttgaggacttctgagagttccagtacaggaaataagcagaacatcagctggaggctaaacggatccagacttcactcttcacttcccttcctattcagtctattgtgcctgctgactgagaagcttggctggtatgtgagcaaataaacggaactattcagaaggagatgttgacatattctgtattgaagaagatccttatcttctcacctgacaaggttttgtcagttctgtgtgactggattgtccggaagactctgaggaaactgatgtcacatgtttttccaaagaagatgtttctggaaccaacaactgtgattgtggtttgaggacgcctgggagttccggtatgcgaaataagcagaacatcagctggcggctgaagggatgcagcctccactcttcacttcccttgccattccatctattgtgtctgcctgactgagaagcttggctggtatgtgaggaaataaacggaattataaacaaggagattgtttctcatctacttcattctgttgtggcttttctattttggggttcagggtgtgtgacaaggaccaaggagatgaaaggtttcatgatggagaaagcccaggcaatcagattgaagagctatccacagggaatcttggctgctgaggggctgcaccctgcaacggactgaccatatgacagaaaagggttttaaaggctcaacttctggactgagaacccagagtaatttgggaacctcctctgtgaggagatatgaaagctgggaatcatgacatccctaggaatggaaggcacatttcctgatggaaggggtgctttggaaaacaggagcagagtagacacagcagccttgtggatacgggtgggcagcatgcatgggtgatgtgaacgtggagtgtttgtgatcgaaactcaaaatgtctgacaaagtgaaaacctagaaaccacaatgaggaggaagagtttgtgagggcaatcactctccccatgtgtgaaaatcgggggctcttaaaatctcatctggagaggtgcagtctaccaaactctgggactttagcctccccttttaaaaaaccgtgcatcaataccaacgtccgaaaccacagaaataacacctggcttgcatggagacaaggacaaaaagccgtcatgatgagttgttctgctcacttgctgcctctgttcagtgcacaggatattgtccacccactagcaggctactgcaagagaagtgtgcaatatgttccctatgtgccatatatgtgccatatggcccatatgacaactgagtcagaaaatatctgatgccctcagagttacactccacctggagcttgcccccagccatccaggacctaggctccctaccctgtccaattttctggtgttttgggggcttcattctctaaggtgtgcccactctttactcaaaccaaaacacccacatattcctgcccatgaacaaccaatcaaccacttctcagttccacatcctgctgttgggtctctagtggtgacactgtaactcccaggtcatagtggtgacactataacacctagctaaattgatgccttgtctctaggaggccatgggctcctgcaggtctcatctgactctctgtagccttccctgacaatgctcacaatacccaagccagagccacattgacagcaagctgctctcatcttacctttgccagacctggccactggaaaaggctgaccctcatcctgcaatgcctatacctccaacctttgtctcaagctggtgtcctggagggacttctaagcagaaaacagattcagactcccatcctctcctgaatggcctcatatccaattctcagaccctcagccttcattgtaaggacacttcatccatgcccttgagtattctgtctgcactgtgtattctgcaatagattctcctccctctgcgaccctcaactccttccgcagactttttgttttcttgatcatctaccatagtcttccactgggacactgccaagcccattctggagagtgagttgtgcaagtacactgccccccatctacctttcgggaggtgtatacacccttctttctcccaggtctggaggctttctattttcatcctgaggcatctccacctgctcttggattcttcaaattgacaaccaccagttaacaagaactatgtgtcaccaaatagccaaacaatggcaattacaaaaataaaattaatagctgtaacccccattagcaaggatacacaaatcaaatcagggatagtgggtgaggaagtctgcctaacattcaaggaaggattctgaagtgatacaaaatcattgcctttgctatctttagaatggacactttcagccaggcacagttgctcagcctgtaatcccagcactctgagagccccagttgggtggatcacttgaggccagcagcttgagaccaccctgggcaatgtgcagaaaccccaactctactaaaaatacaaaaatagccagttattgtggcacatgcctgtaatcccaactccttgggaggctgaggcacaagaatcacttgaatctgggagccagagtttgtaatgagcgaagatcatgccactgcactctagcctaggcattagagtgataatctgtctgtggaaaataaaaacattcctcttcaaagttttcttctttaaatcataaatgttggaattaatatatcctctttgaaactcactttcttcaagcttctttatttgatggtagtaaatctttgttaagctttatgaggcaagagtaatggaagaagcatattatatatatttatactctaacctcagtgcttgttctagcaagctcaggcatgcgtgaatgtgcccaggcatgttccagcccataccttatatcctttccttattgggaaatgctgttactcctataagcattcttgtaagcaacttcctctttttctttgtctccactatctttacctattgaggacagttttaggttcttagccagttggatgtagcatagactgtgaggtccaaccccagccaatggagatagcacacagcagtagcgacctcatgcttaacagataaatattcctgtctccctttgtttggggtgctctcagctgatgagcaacaccctttctaaagaaattaaagttgtcttgctgagaaaacttttggtctaaatgctgattcttccttgcagcactgaagaagaagcaattatttccaacactttctcatacacaaaaaaagaagaaggtggaagaaaactttcttgtgcaccctatccctcactcagaaagacaacagaaggctcctagtggcaagccctagaggattcatttcttttgggaaccctcttggctgggatactaggactcaggtcaaactcagcattttcagtgtgtgggaagtgtgcttgggtttcactgttacttccaataatgtgatttggtccttggggttcaccaaattttggtatggagtggtgaaccctgttaagtttaagtgtctataaaattaacaaagcaaaataaccattctgccccatggttcagagaccaaatattgtgtaggaaatgctttagcgagagaaacagagaagaataaaaaatgtcctcaagcgctgcattatttcttgttatcgtccagatcttagaggaaaggctttcattttccctcattcagtatgatattagctgtgcatctgtcatttatggcttttattatgttggggtatgttccctgtgtatgtagttttttcagggtttttgttatgaagtgatgttgaactttatcaaacgtttttcagtttcagttgaaacgatcatatgctttttgtccttcattctcttgatatgatgcatcatgttgatgatttccatatggtgcactgtccttgcatcctgggcatgaattccacttgatcatgacaaatgaatttttaatgcattcttgaattccgtttgctggtattttgttgaggatttttgcatcaatattcatcagagatattggcctgcagtttctttttttttcttttttctttgttttgttgtttgtttgtttgtttgttttgatgtgtctatgtctggttttggtatctgggtagtagtgttccatccccttttattttttagaataatttgaataagactggtgttggttctttaaatatttggtagaattccgaagtgaagtcattgggccccgggcttttctttagtggaaggctgtttattatggcttcaatctcgttacttattattggtctattcatgttttgaatttgttccttatttaatcttggtaggctgtgtgtatctaggaatttgtccatttcttttagattttcaaatttattggcacataattgcccattgtagcctctaatcgtcatttgagttcctgcagtaccaattataatgtctccttcttcatttttgattgtatttatttggatcctgcccctttttttcttacttaggctgcctaataatttcttaattttgttgaactttttcttttgtttgtctcgctctgccaccaggctggagtgtagtggtgtgatcttggctcactggaacctccgtctcccaggttcaagcaattctcctgcctcaccctcccaaatagctgggactacaggcaagtgccaccactcccagctaatttttgtatttttagtagacacgggttttcaccatgttggccaggatggtctcgatctcttgacttcataatccacctgcctcagcctcccaaagtgctgggattacaggcatgagccactgcgcccagcctaattttgtttaaattttcaagaaatcaacttcttctttcattgatttctgtattttttatttccattttatttatttaaactctaagctttattctatcttcttctcattttagctttggtatgcttattgcctctctagctctttaatgtgcattgttagattgtttatttgaagttcttcctctctacaccataagacgtaagcatgtcctcattatgtcataagatgtaaccacttacagctataaacttccttcttagttctgcttttgctgtatctcataggctttgttatgttgtgtttccattatcaattgtgtcagaaatttttcaatatttttcttaatttcttcattgagcaactgatcatttgggagcatatttttaaacttccatgtacttacatagtttccaaaatacctcttgtgatcaatttctagttttattccactatggttcaagaagatgcttgatattatttcaattttttttcacattttaagatgtgttttgtgacctaacatatggtctactttttttttttattaaactttaagttgtggggtacatgtgtagaccgtgcagttttgttacataggtatacacgtgccatggtggtttgctgctcccattaacctgtcatctacattaggtacttctcataatgctatccctcccctaacctccaccctctgacaggacctggtgtgtgatgttcccctccctgtgtccatgtgatctatttttgagaatgatccatgtggattagaatgctgtggaaaagactttggattcctaatatccagggagggagacgatgatattactttcaatatcacacgggtgtacacactctctgtgacattgttcctaatatccagtggaagagaggatgatataacacccagggagggagaggatgatattactcttaatattgcagggtgtgtacccatgcctatgatattgttcctaatatcaggagggggagaggatgatattactcagaatatggcagggggtgtacacacactctgtgacatggttcttaatatacaggggagaatgggacaatattactctcaatatcgcagggggcgtacaaccctgtgatttgttcctaatatacaaaaggggacagtatgatattgttcctaaaatcgcagaaggtgtacaacgccctgtgatattgttcctaatatccagggcgggagaggatgatattacccccaatatcacagggggtgtgcactttccctgttacattgttcctatgatccgagtggggggaaatgacattagtcccaatatcgcaggatgtgtacactactcccccatgatattgttcctaatatcaagggggagagaggaggatattactcccaatatcgcaagggaggtacatcctccatgcaatattgttcgtaatattcaggaggagagaggaagatattactctcaatatcgcagaaagtggacacccaccctgtgatgttcttcataatatccagggaagcagacgattatatgactttcaatatcgctgggagtgtacatcccttttgggatattgtttctaatatccaggaagggagaggattatattacttccagtattgcagccagtgtacacatttcttgtgatattgttcctaatatccagaaagggaaaggatgatattactcccaatattgcaggtggtgtacacccccctctgatattgttccttacatcaaggaaaagaaagaagaatattactcccaatatcgaagagagtgtacacccctcctgtgatattgtatttaatatccatggggaaagaggatgttgttactcccaatatcgcagggggtttacacccacactgtgatattgttcctaaaatccagtgaaggagaaaataatattgctcccaatattgcagggtgtatacaggccctcccccgttatattgctcctaatatccagcggtggagaggatattactttcaatttttgcagggagtgtgtaccccctctctgatatttttctaatatcaaggatgggaaaggatgccattactcccaatatcgcaggaggtgtacatgccctgtgatattgttcctaatatccagggaggtagaggatgatattactttcaatattgcaggggctgtacaccctctatgatgttgttattaatatttaggttgggagaaaatgatatttttcctaatatcctgggaaggaaaggatgatattactgtaaatattccagggagtgtacaccttcctaatattctaatattgttcctaatatccaggggtgggagaggattatattactcccaatatcgcagtgggtgtacacccctcctgtgatgttgtttctaatatccaagcgaggagaaaatgatatcactctcaataccgcagggggtgtacaccttccccatcatatcgttcctaatattcagagggaaagaagatgatgttactttcaatatcgcaggggttgtacacaacccctgtgatatttctcctaatatccaggaagaaagaggatgatattgctcccattatagcagacggtatacgcctccctgtaacattgtttctaatatcaagactgggagaggatgatatcacttccagtatcgcaaggggtgtacacctcccccgtgatattgttactaatatccagggggaagaggataatattactttcaatattgcaggggctgtacacccccgtgatattgttgttaatatttaggttgggagaaaatgatattagtccaaatatcgcagagagtgtacacacttccgataatattgttcttaatatccatgggggagacgatgatattacacccaatatcgcagggggtgtagtctccccttgtgatattgtccctaatattcagggaagtaaacgatgatgttagtgtgaatattccagggagtgtacaccccctttgtgatattgtcctaatatccgcaggagagaagataatattactcccaatatcgcagggggtgaacacaccccctgtgatattgtttctaatatccaagcgaggagaaaataatattactcccaatgtctcaggggatatacaccttccctatgatattgtttctaatattcaggtggaaaacgggtgatattactcctaatatccaggaagaaaggggattatgttactccccttatagcagggggtatacacctcccctgtaatattgttcctaatatcaaggctgggatatacgtggggggaaggatgatattactcccaatatcacaggggttataaaaccttctgtgatattgctcctaataaccatggcggaagaagatgatattactcctaatattgcaggaggtgtacactcccccattatgttgttcctagtatgcagaaaaggagaggatgacattattgccaatatcgcagggtgtgtacaccacccatgatattgttcctaatatttagagggacagaggatgatattactcccaatatcgcagggggtgtacacgcatcccctgtgatattgttcttgaaatcgaggggaaagagaattatatttctctaaatattgcagagggtgtacaccgccccctgtgatattgttcctaatagccgggggcggggggagataattaaattactttcaatatctcagagagtgtacatcccccttgtgacattgttcctaatatccagagcaaaagagaatgatattcctcccagtatcgcaggaagtgtacatttaacctgtaatattgtttctaatatccagggggaagagaatagtaatactcccaatatcgtaggggttgtacaccttttctgtgatattgttgcaaatatttagaagagagagagaatattactcgcaatatcacagggaatgtatacttcccctgtgatattgttctaatatctagaaaaagagaggataatattactcctaatattgcagggggtgtacacccccacttgtgatattgttcctaatataaaggaaggtcgaaaaacaaacggggagcccagggggaaggaaggcaggcgaggaagaggcagcgccggggcgccggagggagcagccgggccgcggaagcgcgagcacgagaccggtcgcggtcgcagtcgcatttttgccgttgtcgcggccgccgccgccgaggcttacccggggatgtctgagcccgcgcctcgcggcccccaagctccacgctgcgcccgctgtcccggcctctaagggccgccacgtccctgcggcgcgcgcaggcagaaagcggcttcgtgccggcggagggggcccgggcgggccgggaaaggctgccccaggccccgcgcctaccccatcaccgcggccggcgccgggccgggaggatgagcggtgtggggctctgaagcatggagggggttttgtacaagtggaccaactatctcacaggttggcagcctcgttggtttgttttagataatggaatcttatcctattatgattcacaagatgatgtttgcaaagggagcaaaggaagcataaagatggcagtttgtgaaattaaaggtgacagctttggaggggaccacccttgattggatacataaattctgttcattcagcagacaacacaagaatggaattaatcattcctggagagcagcatttctacatgaaggcagtgaacgcagctgaaagacagaggtggctggtcgctctggggagctccaaagcatgtttgactgatacaaggactaaaaacgaaaaagaaagaagtgaaaccagtgaatcgctgaaaaccaaaatgtctgaacttcgcctctactgtgacctcttaatgcagcaagttcatacgatacaggaatttgttcaccacgatgagaatcattcatctcctagtgcagagaacatcaatgaagcctcttctctgcttagtgccacgtgtaacacgttcatcacaacgcttgaggaatgtgtgaagatagccaatgccaggtttaaacctgagatgtttcaacggcaccatccggatcccttagtttctcctgtgtcaccttctcctgttcaaatgaggaagcgttctgtcagccaccctggttcttgcaccagggaggagtagccactgtataaaagaaccagtatctgcacttcaccgactctcccagcgacgccgaagaacctactcagatacagattcttgtagtgatattcctcttgaagacccagatagacctgttcactgttcaaaaaatacacttaatggagatttggcatcagcaaccattcctgaagaaagcagacttatggccaaaaaacaatctgaatcagaagatactcttccatccttctcttcctgaagaaactgtagtgtccaactttctctaagtattgctatgcaaaagctgctgtaattgaactattgttatagggagtagttttttcccttaggactctgcactttatagaatattgtaaaacagacaaacaagaaaacaaaccacatacttttgaagcgtgttttatctttatatagtttgtttgcaagagtattttcctaataacttcacagtatgaatgtgcatcttttttttctttttttaacaaatgatggtgtaacattttgacatccataaggacaaatgtagatatttttctaaaaaaccgtgaggggactgacagcttggtcagggtgtattgtagcttataaacatgaaatcttacaaggtttcagtttgacagaagtgtgatatatgtaacttgtgccatggaccaaatggtcactttaccacagctaaaaatgagttatgatagcagcttgatggtgattgcattgtattcctttaatcaaaaaggaaacgcaatattctaagtatctttagcccaaataccatgacatattgagcatctttaaataaccagactgtattgtccttcatatgtgaagttgacactactgatttgtcaataccaaattttgggttaaagtgtttaatttttatttatttattttcttgttgcctcaaaagatgattgcattctaacttttgtgacctaccaaatttaagatgtgtatacattgttctttacgttgttctagaaaagagattttaatgctgtagtgacttagctcacttacatcagagaaataaacaactttcaatggaaaaaaatatatataaaggaaggaagaggatgatattacttctcatatagaaggggttgtacaccccccttgtgatattgttcctaatattcagggagggagaggattatattactcccaatatagcagggagtgtacacccccccccccgtgataatgttcctaatattcagggaagcagaggatgatattactttcaatatcacagggggtgtgctgtccccctgttatattgttcttaatattcaggggggagaggatattattatgcccgatatcacaggagaagtacaccccacaagtgatattgttcctaatatccaggggtaaagaggatgatatcgcaggtggtgtacacccctccccgtgatattgtttctaatataaagaaggagagagcatgatattactcccaatatcgctggaggtctacaccccccttgtgatactgttcctaatatccaggaagggaaacaatgatattgctgtgaatattccagggggtgtacacccctttgtaatattgttcctcatatccagggggtagagaggatgatattactcccaatatcgcagggggtgcacggccccactgtgatattgtttttcatatccaggaggggagaggatgacattactctcaatatggcagggggcgaacaccccctgtgatattgtgctagttaggttgggagaaaatgatattactcccaatatcgcagggggtgtacaccgctcctgtgatattgttcctaatatccatgacgggagaggatattactcccaatatcgcagggggtgtacctctcccctgtgggattgttcacagtatccaaaagggaagaggatgatgttactcccaatatcacagggagtgtacaccaccattgtgatattgttcctaatagccagggaagaaaacgatgatattattgtgaatattacagggggtgtacacaccccctgtgatatggtttttaatatacaggttggaaaaggatgatattactcccaatatcacaaaaggtgtacacacccccccatgatattgttcttaatacttcggtggggagaaaatgatattagtctccatatcacaggggtgtgaactcctccggtgatattgtttttaatatcaagaggggaggagatgatattgctttcaatatcgctgggggtgtacatccctcctgtgatattgttccttatatccaggcgaggggaaaataatattactcccaatagtacacaccccatgtggtattgttcctaatactcagggggaaagaagataatattactttcaatatcacagggtttgtacacctttcctgtggtatagttttcaatatccagggggaaggtacatgatattactcccattgcagcaaggggtgtacacacctcctgtgatattgttcctaatatccagaagtggtgaggatgatattactcccagggggtgtacaccccacctatgatattgtttctaatatccaggggaaaagagtgtgatattatgcccaatatcgcagagggtgtacacttatcctgggatattgtttctagtatttggggagggaggagaggatgctattattctcaatatcgcagaaattgtacacccccgctgtgatattcttcataataatcagggaaaaagaggatgatattactaccaatattgcagggggttacacttcccctttggtagtgttcctaatatccaggaagaaagaggatgatattaatcccattttccaggaagtgtacacccaccgtgtcatgttgttcctaatatccagcagggaagaggatgatattactcccaatatcggagagggtgtacacttcccctgttatattgtttctaatacccagggggaagaaggatgacattactgccaatatcacagggtgtgtaccccaccctgctattgttcctaatattcaaaaggaaagatgaaaatattactcccaatatctcagggtgtgtacacctctcctgtgatatcgttcctaatatccacaggaagagagaatattactctcaatattgcaggggggtgtacacccccctgtgatattgttccaaatattcgggcggggagaggatgatattagtcccaatatcgcagggggtgtgcaccaacctgtgatattgttcctaatatccatgcgggggaggacgatatcactctcaatgtcgcaggaagtgtacacctctcttgttatatttttcttaatatccaggagggaaaagatgatattactgccaatatcgcagggtgtgtccaccccccttttatattgttcctaatatccaatggaaaagaggatgacattgctctccatatcccagaaggtgtacaacgcccctgtaatattgttcctaatattttgggggaagagaggatgatataacttataatatcacaggaggtgtacaccacccctatgtattgttcctaatatcctttaagggagaggatgatattactcccaatatctcaggtggtgcctattccccctgtgatattgtttttaatatccaggggaagagagtatgatattacgcccaatatcgcagggggcatacaccctctctgagatattgttcataatatatagagggagagaggatgatattacttccaatatcagaggtggggtacaccccccggttatattattcttgatatccaggaggggagaggttgatattactggatatatagcagggagtgttcacatcttctgtgatactgttcctaatatccagaaaagtagaggatgatattactcccaatatcgcagaacgtgtacacctccctgtgatattgatcctaacattcaaaggggagaggatgatattactcaaaacatcacagggcatgtacactcccctgtgatattgttcctagtatccagaagggagcaagataatattactttcaatatcgcagggggtgtacacccctctttggtatgtttcctaatatccagaaggaaagagggtgctattactttccatattgcaaggggtgtacacccccctgtggtatggttcataatatccagggagggaaagggtgctattattccccatatcgcgaggcatgtacaccctgctgcggtacggttcctaatatccagggggaaagaggatgctattacttcccatatcgcggggtgtgtacacccccgtgtggtatgttttgtaatctccgggaacgaagagggtgttattacccctcatatcgctggaaatgtacactcccctgtggtacggttcacaatatccaggggattgagggtgctattactccccatatcgcggggggagtgcacctccctgtggtatggttcgaaatatccagggtaagagagggtgctattattccccattttgcaggaggcgtacacccctctatggtatgttttgtaatatcccaggtaaggggtgctattgagagaagagagcaaaagaccccccccatattgttctgtattattttatactcagtacctgttttaagaagaaacaaggaagcgaaaccaaaggcaggcagcccggcgccaggcaccagatccaaaaccagacccgaaaccaggcctgggccttcctgaccttagcctgaaagttaaaattcaacccatgacctagcaactgatgttatccatagattccagacattgtatggaaggacattgtgaaatttcttgttctgttctgtttcactctgagtactggtgcatgcagcccttgtcacatacccactagattgctcaatcaatcatggccctttcatgtaaaaaccttagtgttgtgagcccttaaaaaggacagaaattgtgcactcaacaagcttggattttgatactctagtctgctgatgcttccagctgattaaaagccacttccttcactacctcggtgtctgtgggattttgtccgcggctcctcctgctacactgtgactccccttatagagaggggtgtacacccccctttggttcctaatatccagcgggggagtaggtgctattactccccatattgcggggagtgtacacccccttgtagtacggatcgtaaaatcaaggagggagagaaggtgtaattatccccatatcacagggagtgtacacccctttgtggtatagtttgtaatatccacgacgggagagaatgctattactccccatatcgtggagggtgtacaccgccctgtagtatggttcgtaatatccggaaggggagaggttgctattactccccatatggtgggaagtgtacacccccatgtgatatggttcataatatccaggggggtagaggatgatattacccacaatatcatagaaggtgcacacccttttgtgatattgtccataaaatccagaaggggagaggatgatattacttccaatatcacagggggtgtgtagccccatatgatattgtttgtaatatcaaggtagggagaggatgctattccttacaatagctcaaggggtgtaaccttcttgtgatattgtttgtaatatccagaaggggagaagataatttttttattttaaaagtaaactttaatgtcaaaaatgcaaacttgagaagggcagaaagatcaaacagaaggctgccacttcacaattggagggttgcacagtggccgggcagaggcgctcctcactccccagacggtgaggcagccgggcagaggtgctcctcacttccgagatgttgcaggagccgggcagaggtgctcctcacttcccagaacagggggctgccgggcagaggtgctcctcactgcccagacggtttgcaggcctggcagaggcactcctcacttcccaaacggagcagcggcaagccagaggcgctccacacttcccagatggtggggcagccgggcagaggcgatcctcacttctcagagggtagggcggcccagcagaggcgctcctcacttcccacatggtggggcggcaggctagaggcgatcctcacttcccagacggtggtgtggccatgcagaggtgctcctcacttcccagatggtgtggccgccgagctgaggcactcctcacttccctgacagtggggcggctgggcagaggcgctcctcacttcccagacacttggactccgggcagagactctcctcatttcccagatggtggggctgccgggcagaggcgctcctcacttcccagacggttcagaggccgggcagaggcgctctggggagaggataatgttactcccaatatcgcagggggtgcacactccctgtgatattgttccgaatatccagagggggaaaggatgatatagctcccaaaatcgtggggagtgtacacccccctgtgatcttgtttgtaataccaagaagaaaagagaatgctattatttccaatatagcagggggagtacaaccccctgtgatattgttcgtaatatctagggggagagaaaattatattagtcttaatatctcaggggacgttcatccccctgtaatattgttggtaatattcagaatggagaagatgatattgttcttaaaatacaggaaaaaatatgataatattacttccaatatcgaagggggtgtacactctcctgtgatattgttcccaatatccagaatgaaagaggatgctattactcccaatatcccagggagtgtacacccctttgccatattgttcataatatccaggggaagacaggataacattactcccaatatcaccgggggtgtccacccactagtgatatttattgttcatcatatccagaaaaggagaggatgatattactcccaatattgcaggtggtgtacggtccctgtgatattctttgaaatatctagaaaaggagaggatgatatcactccgagtatcacagggggtgtacacccccctgtgatattgttcgtaatatccaggggagaaaaggatgatataattgccaatatttcaggggatgtgcacctccctgtgatattgtttgtaatatccaggggtggagaggatgatattactcaaaataacgtaaacatcctgtgtgtacatcccctgtgatattgtttataatatccaggggggtagaagatgacattacccccaatatcacagagtgtacacacccctgggatactgttcataatatccaggcgggaaagaatgaactacttccaatatcgcaggatatgtacacccccctgtgatatatttcctaatatttatgtgggtaaggatattacccccaatatcacagaaggtgtacatcctctttgtgatattattcctaacatccaggaaaggagagaatgatattactcccagtatcgcagggggtgtacaccacccctgtgatattgttgctaatatccagggggagaggataatattactcccaaaatcacaggggacgtacactcctcctgagatattgttcctaatattcatggggaaaagaatgctactactccaaatacagcagagggtgtacaccatccccgtgatattgttttttatatccaaagggtgaaaggctgatattactcccaatatcgcagggggtgtacaggccccccatgatatcattcttaatatccagggaggcaaagaatgatgttactcccaatattgcaggctgtatacaccccccgtgatattgttcctaatatccagagtaagagaggatgacattgctcccaatattgcaggggttgcacgcacgccctgtgataatattactcccaatatcaacagtgggtgtacactcctcctgtgatattgtttgttatatctaagaaagaagaggatgatattactgtcaatatcacagaaggtgtacagccccttgtgatgttgtttctaatatccagcggtgagaggatggtattactcgcaatattgtagggggtgtccaacggccctgtgatattgtttctcatattcaaaaaggaaaagaataatataactccaaatatcgcagggtgtgtacacttccctgtgatattgatcctaatatccaggaagagagaggatgatattaatcccaatatcacagggggtgtacatcgcttctgtgatattcttcctaatatccagggggggaggggatgctattactcttaaaatcgcagggaacttacactcccactatgatatttttcctaatatccaggaagggagaaaatgatattactcctaatatcacatatcacaatgggtgtacatctccccgtgatattgtttctaatatcaaggatgggagaaaattatattactctcaatatcgcagggggtgtgcacacctcctgtgatattgttcctagtatccagcggaggagatgatattactttaaatattgtagaaggtgtacaacccccctttgatattgttcctaatatccagggggaaaggagatgatattactcctaatatcgcaggggctgtacaaccctatgtgatattgtttcttctaatatccaggggtggagaagataatattactcctaaaatcgaaggggacatacactccccctgtgatatttttcctaatatccagaaggaaagaggatgatattactcctaatattacaagaaatgtatacctgtcctgtgatattgttcctaatatccagaggggtaaatgattatattactcccaatatcgcaggggtgtacaccttccctgagatattgtttctaatatgcagtggaggagaggatggtattactcccaacatcacaggagatgtaaactccccttgtgatattcttcctaatgttcaggacgaaggagggtaatattactcactgtattgcagcagggggtgtagagccccctgtgatattgtttttaatattcaaggttggagaaaataatattccttccaatatcgcatggggtgtacacccttctttttatatagtttctaatatctggggggagaggatgatattactcccaatatcgcagggggattacacccccactgtgatattgtttttaatatccagggtgggagaggataatattactccaaatatcccagggctatacaccctccgtgtgatattgtttctaatatccagaggaagagaagatgatattactcccaatgtcacagggtgtgtacaggccttctttgatattgttcttaatatccatgagggagaggatgatattactcccaatatcgcaaagactgtacaccctttctgtgatattgcttccaatatccagggagggagaggatattacactcaggatcacagggggtgtacaccccaacctgtgatattgtttctaatatctagggaaaatgagggtgatattactatcaatatcacaggaggtgtacactcccttatgatattgttcctaatatccaggagaatgacaggataatattactcccaatatcgcgggtggtgtctccccccactccgtgatattgttcctaatacccagagggggagagaatcatattactcccaatatcgcaggggatgtacacctacatccggcggagtagaagataatattactcacaatatcgcaagaagtgttcaccttccctgttatattgttgctaatatccagggagtgagaagatgatattactttcaatactgagcgtgtacactacccctgtgatattgtttctcatatccagtagaggagaaaatcatgttactcccaatattgcaggggtgaacacctcctttgtgatatttttcctaatatcaggaaagggagagtatgatattacccttaatattgacaggggtgtacacccccctttgatattgttccaatatccaggggggcagaggataatattattcccaatatcgcagagggtgtacaccccccgtgatattgttcctaatatccagagaaataaaaaatagtattatttccaatatcacagggcgtacattttccctgtaattttgttcctaatatctggggggtggggtggcaggataatattactctcaatattggagagggtgtacacccccctgtgatattgttcctaatattcagggtgggagagaatgatgttactcccaatatctcaggagtcgtatacacccccttgtgatattttttctaatatccaggaggcagaggatgatattgctcccaatatcgcagggggtatacacccgagctgtgatattgtttctaatatgcaatatgggggaaggatgattttactttcaatatcgcagggaatgtacactttccttgtgattttgttcctaatatccaggggtggagaagatgctattactatattactcctcatatcgcaggcggtgtacaactccctgtgatatggttcagaatatccagagtgaaaaaggagggtgacattactcccaatatcgggggggtgtacacccctttgtgatgtggttggtaatatccaggggggcagatgagggtgatatcactccccatatcgtggaaggcgtccacttttttgtgatgtggttctttatatcccgaggggagaaggtgatattactccccatatcgcgaagggcatacacccccctgtgatatagctcataatattccggagagtggaggaagatactatgccctatatcgcgggtggcctacaaccccctatggtttggcttataatatccaggggggagagggtaatattgctccccatattgtggagacgtacagccccctgtgatatggtttgtaatatctttggggggcgagggtgatattactccccatatcgcggggagcatacacccccgtgatctggttcatagtatctcaaaggaagaagttgatgtgtacaacttaagggaaaaagttgaagtgaagtgtacacacgccctgtgacgtggttcataatatccaggcgggggagaggagagtgatatttactccccatatcgcgggtgttgtaaactcccctgtgatatagttcataatatccaggggagagaggagggtgatattgctcctcatatcgcgaagggtgtacaaccccctgtgatatggttcataatatccagaagggtagaggacgatgatattactccacatatcttgggaggtgtgatatggttcgtaatatccagcgatgagagaatgatattactccccatatcgcaaaaggtgtgatagggtttgtaatatcctgagggggagagggtgatattaatccctatattgcagaaggactacaccctcccatgacatggtttgtaatatcccagggggtagagtgtgatattactttccatatcacagggggtgtgatatgattcgtaatattcgaagggggagagggtgacactactctccatatcacggggtgtgtgatatggttcttaatatcccaggggttagaggttgatattaccccctttttggggggtgtgtacaccccctgtgatatggttcgtaatatcccgggggagacagggtgacattattccccatatcgaggggatcgtacaccccctgtggtgtggttcataatatccctagggggagatggtgatattactccccatatcagggggcgtgcactcttctgtggtataattagtaatatccagggggcagaggtcgatattcgtttccatatcatgaagggagtacacttccctgtgatatggttcctaatatccaggggggagagggtgatattattccccatattgcggggggacatacaacccctgtgatatggttcataataaccagaaaagaagagggtgatattaatccccgtattgcagagggcatacaccccccctgtgatatggtttgtaatatctaggggaggaaaaggtgatattactttccatattgctgggtgcagacacccctttatgatatggttcataatatccaagttggagagggtgatattacttcccatatcatgggaggtatacccttccctgtgatatggttcgtaatatccagaaggggagagattgatattactccccatattgtggggggcgtacaccttcctgtgatacggtttgtaatatctaggggatatagtgggtgatattactcaccatatcacgggggttgtaacatggtttgtaatatccaggggaggagagggtaatgttactccccatatctcggggcatgtacaccctcctgtgacatggttcgtaatatccaggtcgggagagggtgatattactcctcatattgccgggggtgtgttatggttcataatatcctggggaaggaggctgctatcactctccacatcttgggggatgtacactctcctgtgatatggttcataatatccagggtgggtgagggtaatattactccccatatcgcgggaagtgtacatacccctgtaatattgtttgtaatagaagagagggtgatattactccccacatcgcgggtggtgcccacccccctgtgatatggtttggaatatccagggggatgaggagggtgatattactccccatatctcggtgggagtacatccctctttgatcaagttcataatatccaaaaggaaacaggagagtgatattactccccatatcgccgggggtgtacacgggagggggagtacacccccggcgatatggtctgtaatatccagggaaggagaggagggtgatattactcaccatatcgcaggtggtctacatttacctgtgaaacagtttgtaatatccagggggggaaatgagaatgattttttttttttgagtctcactgtgtcacccaggttggagtgcagtggcacgatcttggctcactgcaacccccgcctcctggactcaagcaattctcctctcccagcctcctgaatagctgggactacaggcgcaccccacaacgtctggctaatttttgtatttttattagagacggggtttcaccatattggccaggctgatctcgaactcctgaccctgtgatccatccgcctcggcctccaaaagtgctgagattacagatgtgagccaccacgcatggcccaaggagaacgatattactccccatatcccagggggtgtatatccccctgtgatatggttcagaatatccggaaggaaagacagggatattacttcccatatcgcaaggggtgtgacatggttcgtaatatcccatgggggagagggtaatattactcttcgtattgtgaagggcatacactcccctgtgatacagttcataatattccggggagtagaggaagatattatgctccatatcgcgggtggcataagccccctgtggtttggttcataatatccagggaggagagggtaatattactccccatattgtggggacgtacaccctcctgtgatatggtttgtaatatcccagaggggagagagtgatattactccccatattgcagggacatacacccccctgtgatatggttcaaaatgtcttttttttttgaaggactggttctttatttcaaaaagacacttgtcaatattcattatcaaaacagttgcactattgatttctctttctcccaatcggccccaagtagaccacatcaaaggagagtacatattaagccaataagctgtaggatgtacacctaacagacctcctagaaaccttaccagaaaatggggacagggtagggaaagaaactttaaaagatcaacaaactgccagcccacggactgcaggggctgtcacagccagatggggtggccagggtgccacaaacccaaagaagcaaagtttcaaaataatataaaatttaaaaagttttgtacataagctattcaagatttctccagcactgactgatacaaagcacaatgagatggcacttgtagagacagcagcttcaaactcagaaaagggtaatgagatgagtttcacatggctaaatcagtggcaaaaacacaatcttctttctttctttctttctttcaaggaggcaagaaaagcaattaagtgctcacctcaacataaggggaacatgatccattctgtaagcagttgggagggggtagagatggaacaaaattttggtctcagaggtcttgccatcttaatttggtcacttctaatgaaaaaaataaaaaatagaaataacattatccaaaggtatcttaaagctgaaaacttgaacagcacattttttgttgttgttgtttggctaactcctcctggaaccacctttctggcttagctagtactttgtacagagcaatgaggcttcccatagtggagtctccctgggctctgtttggctctcagcaaggcaggcctataccttttcctctcctccatggagagaggaatatgcattaaggtgaaaaatcaccttccaaaagtgagaaagggattcgatcgctgcttcagggctgtggtattatatggaatgttttacaaaaggttgctacaaaacaacaaaagaggtaattacaaaatgtgtacatcacaacatactttttaaagacattatgcattgtgctcacattcccttaaatgttgtttccaaaggtgctcagcctctagcccagctggaatctccgggaagaggcggacagtttggtgaaaaagacacagggaaggagcgggcggcggaaggagggggcggcgaaaggagaaagcagccttccagttaaagatcagccctcaattaaaggtcagcttcgggcaggctggcctcaggcggagtctggttcagagggaggagcagcagcagggtgagactgaggcgttctacatctcattcaggtcaagcagagtctggtccagcatcctttgtgtacagaggtgctcccctttggtgcatttcagtttatcttccaagtcatcaattgtcttttccagcttggctaccgatctctcagcaaactcagcatgggtctccgcctcctttattttatcagtaagaatcttgatctcttcctcatatttgtcttctttttgagagtacttttcttcagcagcactcagacacttcaggttctggtccatcagtctaatctgctcatccatctctcggcaaagggattctgccagctcagctcgttcctctgtgcgttccaagtctccttcaatgatcaccaacttacgagccacctcttcatacttcctatctgcctcttctgcaatgtgcttagcttctctgagttggatttcctggagttccatcttttcttcatcttttaaggcccggttttcaataaccttcttacctctctcactctcatcagcagctttttccgcttcttccagcttttgcagggcagtagccaggtgctcctgagcacggtccagctcctcttcaaccagctggatcccacgttcaaggaggccacctcagcctcagcctgttcccgggcccacctttctccctcaacttctcgctggaggcgctcagctcgctcctctgcatcatctgcctgctgctgcagaacctggatcttgcgcttcaccgcctcgatggtggtgatcccagccatggtgcccacccagctactgctagagctccggttcctgcctcctccgatcggcgttgcagcctcctctcacccttacttccgcctcggttcaaaatatcttaagggaaggagttgatattactccccacatcacgggaagtttacatcccctggtgatatggtttgtaatatcccagggtggatagggtgatattactctccatatcgcgaaggagtactcccccctgtgatatggttcataatatccttggggggagagtgtgatattactccccatatcgcgagggccatatactcctttgtgacatggttcgaaatatcccggtgggggagggggtagagggtaatattactccccatacagcgaagagcatacgcccttctgtggcaaggttagtaatacttcagggaaaagagtgcaatattacttttcatattgcagggaacatacactcccctgtgacatggttcgtaatatcccgggggctgagagggtgatatttctccccatatcaccgggggcctacacctgggtgtgatatggctcataatatacagggagggagagggtgatattactccacataccgagtgaggggttacacaccctcgtgacatgttcgaaataccccaaggaggagacaatgatattactttccctgtcgcgggggctacaccctcccagtgatatggttcacaatatcccggggtggagagggtgatattactccctatatcaccggggggtgtacacttccctgggaaatggtttacagtatccccggggggagagggtactattactccccatatcacgttacatatcagggtacacccccacgtgatatggtttgtaacatcccaggaggaagaaaatgatattactccccatatcgcggtggcatacacccctccccgttaaatggttcataatatcttggggtggagagggtgatattactccccatatcacgtggggcatacaccccactatgatatggttcataatatcccggaggggagagggagatattactctccatgtcgcggggggcatatacacccctgtgatatggtttgtgatatcccgggggcggagagggagatattactctccatatcgtggggtcgtacacttttctgtgatatgattcgtaatatccagacggggagagggtgatattacttcccatattgcgggggcgtacacccctctgtgatatggttcataatatcccgaagaaaagagggtgatattactcctcatatcgcggggaacacacaccaccctgtgatatggtttgtaatattcagcgggggagagagtaatattactccctgtatctcggatggcgtacactcccctgtgatatggttcataatatccagaagaaaagagggtgatattactccccatattccagggaatgtacaccaccctttgaatatggttcgtaatatccaggaggggagagggtaatattgctcccaatatcgaaggaggtgttatacggttagtaatatccagagaaggagagggtgacattactccccacatcgtggtgggtgtgcacccacctgtgatatggttcataatattcaggttaagagaggtgatattgctttccatatcgccaagggtgtacactcccgtgaaatacagttcgtaatatccaaaaggggagagggtgatattactcccatatcgtggggggtgtacacccctctgtgatatggttcataatatccagggtggaataaggtggtattactccctgtatctcggggcatgtacatcgcctgtgatatgattcataatatccagaagaagagagggtgatattaatctccatattgctgggggtgtacaaccccctgttgtatggtttgttacactgagttggggagagggttacattactctcaatatcgagtggggcatacacacttatgtgatatggttcataatatcccagggaggagagggtgatattactccccatatcgcgggaggcatacaccccaatgtgatatggtttgtaatatctacatttttttttttgagacgaagtctcgctcttgtcccccaggctggagtatgatggccggatctcggctcactgcaacctcagcctcccgggttcaagcgattctcctgccttggtcccccaagaagttgggattacaggcgcacaccaccacgcccggctactttttgtatttttagtagagaaggggtttcaccatgttggccaggctggtctagaactcctgacctcagatgatccacctgcctcggcctcccaaagtgctgggattacaggcgtgagccactgcacctggcctggtttgtaatatctatgaagggggaaggtgatattactttccatatcacgggaggcgtacaccacgatgtgatatggtttgtaatatccagggggtatactgggtgatattactccccatatcgcggggagtgtatacccttttgtgatatggttcctaatattaagctgaggagaaggtaatattactccccatatcgcaggggtttttatatggttcataatattcaggaagagagagggtgacattactctccatatcacggggtgtgtactcccccatgtgatatggtttgtaatatccagggaaggagaggttaatattactccccatatcgcagggggtgtacacctctctgtggtttgtaatatccaaagggaagaggatgatattatcttcaatatcttggggggatacagtccccagtgatattgttcataatatccagagggggaggggatgatattactcccaatattgcaggtggtgtacaaccccctgtgatattctttataatatagagggggatgatgatattactcccaatatagtaaacaacctgtgtgtacaccccctgtgatattgtttataatatccaagggtggaaaggatgatattactcctcatatcgcagggggtgtatacccctctgtgacattgttcctaatattcaggggaggagaagatgatactactcctcatatcacaggggatgtacacccccctgtgatacttttggtaatatccaggggaggagaaaattatattattccccatgtcacagagggtgtacaccccgctgtgatagtgttcataatatccaggtgaaaagaggatgatattactccgaatatctcaggaagtgtacacccttctgtgatattgttcataatatccaaaggtggagaggaggatactactccccatatcgcagtgggtgtacacccccctgtgatatggttcataatatccaatgtaggagaggatgatattactttccatatcgcggagagtgtacatccccctgttatattgtttgtaatattcagggagaaagaggatactactactccccatatcacacggggtgtatattcccctgtgatatggttcctgatatccaagagatattataatcctctcttggattatgctacctctcatatcgcatggggtgtacacacactttgtgatatcgtttgtcatatccaaggagggagaggattatattaatcccaagatcacggggggtgtacaccctcctgtgatattgtttgtaatattaaggggggagaggataatattactcccaatataattaacaccctgtgtgtactcctccttgtaatattgttcataatatccaatgggggagacgatgatattactttcaatatcgcagaggatgtacatccctttgtaacaatgtttgtaatataaaaggcaagagaggatgatactacttccaaaattgcaggacatgtacaccccccggtgatattgttcctaatatccagtggggaagaggatgatagtagtcccaatatcgcaaagggtgtacacaccccctgggatattgttcctaatataaaaggaggagaggatgctattattcccaatatcacagaaggtgtaaaatcccctgtgatattgttcgtaatattcaggaggggagaggattatattactcccaatatcacagggtgtgtacacagggaggggcaagggccagaagcgggcgggaatccccatgtttgggcggacccagtttctaatggccagcatttgccaatcaaagcttaccagagaactctaaaagccagggctttcctgctagacaagactcatttctggaactgctttaaaaagaaacaaaacttcccaaggaccccttttcctctctgtctgcctaaaataatgttttaaaaactcctaaagcagctgaattcagcccccttcctgggggaatgtatagacggaactcccacctttcccggcatcccaaggccagagtatgtgaaactcctgggtctctatgtgtgtctgagcggctgctctgccaacactccacacagccctgtgtcctggacccaaggcccttatgacctgagctcaagaggggatctcctgatccatgggttgcaaagatccatgggagaagcatggtttctggggcggggtcacacgctcagtcactgtttccctcggatgccggagatggttcctttggctctctgccaatacagggtgaatcatcatccatccctcttttctttgttctcccgggtcaagttgtttgcctagtcagtcccaatgtgagaacctgaatatttcagttgacgcgctgacttcaaaatccccgggcttcgggaggcggagcttgcagtgagccgagatcccgccactgcactccagcctgggcgacagagcgagactccgtctcaaaaaaaaaaaaaaaaaaaaaaaaaaaaaagtccccgggcttttcttttcactcagtggaaggcagctgcttctaattggccatcttggcccgcccccaccacgtgaccttctgtaaaatgcctccactctccaggaacgctctcattatataactttgcctgaaaccaacagcacgctcattgcacatatcatgggctcatttatttcacttataaagaacctggccaaggaagagatagtgcctaaagtggccagtattctgaccgatatgttagaaaaatggtgtgccgaccaattcatgacatgtgtcccaaaactagcaacggaaattgtattcgccgtgttgaggtctctaatccagatgatgctcatctatgtactggaaaaggcagagtcctttcctgacaagctgctgaaactcttcagaaacatctcatatttcctgaagaagatgatgtctggacaagcagcacaggtcgttcagatttaactttctattcatatatccagcacgatattcgcacaattgtcacgaaaccttaccagttgatgagtcctgcacatttcctttaatttcaggaggaagagggtaatccggatgagttttctgacctactctgctgctgtgattaaacaaccaccaggaaattttgacgacactgttctcctgagctcctccctttcctccgggaacaaaacaattgaatttacaaaaataaagtgttatttgactggagtgaggtctcatgtctgcttatgcggtggctcgctgctcagaacagggtgagtctctgggttgtgtgctgaggaggggaggctctcaatctggagaaaacccactgcaggggacacctccatggggtctgagggactgaggatgaggagccggactgggtctagggaaggaggaggtttcagagggtgaaattctggcactaaagcctgggggtgtttgggaacttcctccttccgaagaagtttcagggagggataaagacaaaccctgggctccttgaggggcccttactaatttgagaggactctatcgggaaggagagtgacaatggcctccttgaggactgaggcccctgaataaatgaggcccagatacagtccatgggggatgagaccttcaagggtcacattttggttgggacagaggaaaagtgcagctctgcagccgcagaggaaaacccggcagtgtgaaagcgaccttggaggggccctgtgcgctctgaatgcgtctgagcccccatcccctgtccccgcctctctttctggattcttccagctcggctgtctccgccatcttctgagcgctccaccctgacttattcaagtttcccttctgccttccaagtactccaaaatctttcagatctgtgtccctacccctgtttttagcatgtgttggggctccaggtccctgaaggtttctggcctgaaatccacctccccagcggagtggactgcgttctagagactccacactccgcgaggttcccaggcccctgagggacaaccgagtggcctgcgcacttcagggctccacactcggcaaggtctttcaagcccttggggtccccttcttagttttttccacctttctgggctgcagtcactccataaatgctgggatctgatccccacccccactctcgtttcctcaattctgcgggctacacgctctggcaaggtcctccgggccctggatcccctccctctccctatgcccacgctcctagtcagcccttctggggtccactattttcaggaactaaccgttctcatggagccttgctaaccggaaagctgtgtggaagaaaggctttgaggatagaggtggagatttggctcttccatagtgccactcacccaccccaccatgctgccactgccagacccggacccctgtttcagaacaagtgaccagattcgctcctggacagccctggacactggccttttctctgaaaactactcaccctttctctagtccccacttcatgccagcctcataccctcttccttcccccacgctggcttccgggatcctcctctgctcagacaacctcttctgtgtcccacccccgtttttagaatgctttggggcaccaggttgggggaaggtttctggcctgatatccatctctttccaaactcccttcttcccttgaaaggcttcttgccttcagccccacttctggctccgaggtttcaggacaccctcctcttcatcctcattcttttgaccaccagctttttaggaattcgaacgtccctctcatcttcgtgaatcctgtccaggcatttgttgaccccttcatctgatacccctgacctcacattgccaaaagtctacccctacccagtacactggaattagacaaaatcccaggagttttacctcaactctgagtgtgcccacaggagctctccctgaagccacgtccttttaagcagggtctagggttcctcccttgtcttaatgaactctttgtcacacggaggacgttatggagcccttatgatctttcactgcctttctgcccagcgttttgtctttccatggacatttataatattttccatggacattttgttctctcaatgtccacccctaatttccaacatcccaaagattctcatgtgtttcctgaaagccatttacaggaatggctgtgcccagacccccttccccaggatcctccttcacacctggtaggtgcctctcctagagagatttgcactcagttgtcgtgcagtcacatggcccagatggttgttaatcacccccttcctggcaacagctagcagccagggaatcactggcacagaaacctcagggtgaccaagatgaggccacctctgtgctgaaggctgtgctccagagcctgcttgggatcaggcttaagcaggtcttcagccagacctgatgttacctggtttccttgagctgccctgcctgagctatcgggagcactccctcaatgcacatcttgattccctatctcatgctctgcttctagaaaccatgagctatcaattgctactggcaatggtcctgggaagtcaaccctaagtatggattctggggttggatgactccccacaggacttcagtgagcaacaatcactgctggcagttggaggacagagtcgctagggcatgtgaccactgtgaaaccaccgatgtttcacctggggtaattttggatgaactacggtagaagcactgaaggtacattgcttttggtttggaagattgtaggtaaataatagcgatatgaatgtggaattggatggctgcaaacgagtgccattgatgcattgaaagaggaaaagtcaggctgtcacctgtcactcagcaatttaaagtgtgagagttgggactagatgtggtggctcacatctataatccagagattcgggggaagcttgaagaggtaggatcttttgagtccaggagttccagaccagcctggacaccagagcaagacctcatctctacaacaaaattttcttaaaaattagatgggcttggtggcacgcacctgtacttgtagatctagctaatggggagcatgagataaaaaaatcacctgagtcagggacttaggggttacaatgaggtatgattgtgccagtgcacacactcccacctggccaacagagtgagattctgcttccaaaaaaataagaaataaatcaggtttgagagttggaaagcatcatcttctcctagagccaaaggacatgtacaactgagacccaggaacaaagcttcatcacaaagagaccatcatcagtggagccgggagatgcattccccctcaccctgccttgaggaggcagtggagtcatctgtctgggatcctttctgacccagccctatttgtttgtctctttggcttctttggatttgtatattttagctgttataacactgtaaaacaaacagagtgatttttttgagttgtgtgaatgatgctagctccatagtcaccctgagagtgatgggaacttttgaatttgtggcaagttggagggtagtgtaagtgacctgagattgccaaattggggctagcactggatgtgaggttaggctagtggaaaaatatgcccagaaccagaggagtgtgggctcactgcaggtggttaggctcagatccaaattgtacagatggatagctttggggtaaagaataacatagttgagaagtgcatgtgttagtctgttcatgcactgctataaagaattacctgagactgggtaattatttataaaactcaggtttaattgggtcatggttccacaggctgtacaaaaagtatgatgctggccatcagctcaacttctggggaggccccagaatagttagagtcatggcaaaaagtacaagggaagcaggctcatcttccacggccagagctggagcaagtggtaggagaggtgatacacactttcaaacaagtaggtcttttgagaactccatcaccggacagcacctatgggatggtgctaaattattcatgaaatatccgcctccataatccactcaactgtcaccagcgcagccagccccacctccaacagtggggattacaattccatatgaggtgtgggtggggacacagctccaacctcaatcagtgggcatcctggattgggtctactatagaaggagaaccaggagctgactatgatcttgaaccctacccatgatggccgggcggggtgactcatgcctgtaaccccagcactttgggaggctgaggtgggtggatcgcctgaagtcaggagttagagaccagcctggccaacatggtgaaaacctgtctctactaaaaatacaaaaaattagaccggcgttgtgctggatgcctgtaatcacaccactacgctccagcatgggaaaaaataccaaaacttcgtctcaaaaaaaaaaaaaaaaaaaaaaaaaaaaagactgcccatgaccactgcaccagtgagagggacaccagcatcactgagatgcaagggctggacattcttcataggtcagagctcaaagcaggggacactgatacagagatgggctccatccatagcaccaaagtggtgagaggatgtgggaatggcagaggccagcactttgccatcaatgcaagggggtataaggaggtgacaccagtgccagagtacatcacggggggactgccctacaatatctaggacttacctcttagagcgtgtttcattagcgacaacagatataaatggcagacaggtgtgtccctgcattaacaggaaatagaaatcatcaagaggaacagaaggcagatgtcagcagccccttagaaagtcatcatccttcatacagttaaaatctgagacagttctcacacgagaaggcctaactcaaaaagaggctgggttctcatgaggcaggtttatgcaaaaccaaggaaggtgtacaagtttggaattctccagtttcccttggaaaagacctacagtcatttgcttaggtaactgagcactgaacaaaggtgagtattgttgtcttttagaagctcttggccaagaaggccttgttggcataaaacccatggtttggaaacatcaccatgacccctgttagagtaatggcctaagggtgggggtcaggaaattgatgtattccttgccaacttctgcctctaagtgagtgaactctgtttgtgaacctctctcctctgtggttatgttcctaggctctcatgtataatcaggagtcatagacttagaaacaggaaaaatacttacagtgtttttgtggcctgtgagctatgacttataattttaggaaaaaaacaattgcaaatggaaagcctaagtctatcaatgctcatccaagacaacataatcaataaaaaccaatatcaaatctcaaggcaaattatttcctgtatatagatggcagagatgagcaccaccatcaaaaactcaaggaccagtgctgtgggtccagtcatctgtttcatggaattcaccagtctggtatcttcaaaatccagaaggatgatggcagatggcaggaaagtaatgcaaacgtcatcaggtgtgaccccactgtagcagctgtgatggatgttttctctcaccatagcaataaataacacaacctcggtcacactgtatgcattgttggtctgcaaaatccatgttttgcaaaactcttcaggaaggtggatctgtaatattggcattgacatgagaacaacagcagtatttattcacaatctcaagctctctgtcttcccgtctctctcattagccatccaagtagtcctgaggaaccaagcccatcagaacattctgcaacataatacacagctccattctccattcaaattttgttgttgttgttgttgttgatgagacaacatcttactccatcagccaggctgacgtacagtggggctatctgggctgactgtagtcttgagcttccaggctcaaggcatcctctcacctcagcctcctaagtggcttgaactacagacacacagcgacatgctgggctagtttttgtatattttgtagagacgtgctctcaccatgttattcaggctggactcaaactcctgagcgtaagtgatccaagcaccttggcctcaaagtgctgagattacaagcctgagccactgcacccagcccaatctccattctactgataacaatgtcattaccaggtctgatggacaggaaatggtaaggtttctgaaaacctaaggatcacacagcgagttccaaaggctgaaagtgcatacctgtcgacactgataccaatgacatccaatggtgagaatgacattccttgtagtcctagctctgctcataacaaatctatactgaagtgtaagagtttgatggtcatggggattttccatgtctctgcctttcagcgatgtgccatatctgtgaagtgttcagaaatgcaacagcctgaggcatgctgggcatatcctctaataaaaaggaaaatgccattttatggtcctgtatttctacaagttggaacacatgggcctgtgatccagatgggggaaatgggaatattcccactcattcaccttcatccacgaagcccatttgaaagctttgggcttcccatccttgtagattttagtgttgtgggctgggtgcagtggctttcacctgtactgccaacactttgggaggcctagacaggtgaatccactgaggccaaaagttcgagaccagcctggccaagatggtgaaaccccgtccctactaaaaatacaaaaattagcaaggtattggggccagcacctgtaatcccagctgctcgggaggctgaggctggagaatcgcttgaacccaaaaggcagagactgcagtgacccgatcctgcctttgcactccacctgggcaagcagaacaaaacttctgtcttgaaaaaaaaaacaaaaaacgaacaaaaaagatgttagagttctgggtttagaggtctataccccagaaagagaatggtttcaacaagggacaaagaagttgctttaaacgttgacttgccatttcttttcagtgtgtttgttctcttgcgtcaagagaccaccagaaaagtggtgcaattactctcctgtcaagaatcattgactatcatctgcaagagggtcagatcctggtatataattagggcagaaatacttagtctgagaagggtatgacatccagaggccctattaatgatgtccttttctccatgcctgactctgaccccatgtgctggactgcccctgtgtggatggcctcatggcctgctcggactctgaggtcccaccccaagtggcacctccatggagggctctactcttgtatgggctctgacactcacactgagacactctcccatggacacctcttcacccacttggggtctgaaactgggctactccatccctccctaacctggaacagagagctttcactgctattacacaagtcatagaggctaactcctcatttttccaagctaattattgaaacattagtcctgggttgataagacaagataagttaacttttcataaatttgcttatcaagttttgaataaattcaaataaattcaccttccccacacaccttagttgtcgacatcacacgcgcacccatactcacagggtgagcacgaaggcttcactgtcagtggagaaagtggcaaaacccttctgtgcctcatcctggtctagacctggccctcatcctttcccactcttcccctcactcccttggattcatccacactggcctcctgcctgctgctccacctccctgcgaagctcacccctgcctcagggcctttgcacgtgcagtggcttcaagccatatcctcttcacccagatctcccagatctcctgaatgatcttcttttatcattcaggtctcagcttgcatgtaatcttctcagtgaggattacccaaaccacatagttcattcattcattcaaatattcattcaatggcatattgacaaagcagctacttcatgccaggccttgggccaggtgttatggatatggcaacaaacaaaacaagagttttctgctctcaaatttttacccacttaaaggagatatcatacatcatctgtaaataaatacatcatctgtaaataatgatgtaaataaatacatcatctgtaaatctgtaaataatgatgtaaataaatacatcatctgtaaataaataaagtataataaaagaaaatagtaggtttttttggttggaggtgaccgtgaagtttgcaaataccatcttacaacacattattttattttatttcatttcatttttaattttattattattatactttaagttttagggtacatgtgcacaacgtgcagatttgttacatatgtatacatgtgtgaagttggtgtgctgcacccattaactcgtcatttagcattaggtatatctcctaatgctatccttcccccctcccccaccccacaacagtccccggtgtgtgatgttccccttcctgtgtccatgtgttctcattgttcagttcccccctatgagtgagaacatgcggtatttggttttttgtccttgtgatagtttgctgagaatgatggtttccagcttcatccatgtccctacaaaggacacgaactcatcattttttatggctgcatagtattccatggtgtatatgtgccacattttcttcatccagtctatcattgttggatatttgggttggttccaagtctttgctattgtgaagagtgccgcaataaacatacgtgtgcgtgtgtctttatagcagcatgatttataatcctttgggtatatacccagtaatgggatggctgggtcaaatggtatttctagctctagatcactgaggaatcgccacactgacttccacagtggttgaactagtttacagtcccaccaacagtgtaaaagtgttcctatttctccacatcctctccagcacctgttgtttcctgactttttaatgatcgccattctaactggtgtgagatggtatctcactgtggctttgatttgcatttctctgatggccagtgatgatgagcatttcttcatgtgttttttggctgcataaatgtcttcttttgagaaatgtctgttcatatccttcacccactttttgatggggttgtttgtttttttcttgtaaatttgtttgagttcattgtagattctggatattagccctttgtcagatgagtaggttgtgaaaattttctcccattctgcaggttacctgttcactctgatggtagtttcttttgctgtgcagaagctctttagtttaattagatcccatttgtcaattttggcttttgttgccattgcttttggtgttttagacatgaagtccttgcccgtgcctatgacctgaatggaaatgcctgggttttcttctagggtttttatggtttgaggtctaacatgtaagtctttaatccatcttgaattaatttttgtataaggtgtaaggaagggatccagtttcacctttctacatatggctagcctgttttcccagaaccatttattaaatagggaatcctttccccacttcttgtttttgtcaggtgtgtcaaagatcagatagttgtagatatgtgacattatttctgaggactctgttctgttgcattggtctatatctctgttttggtaccagtaccatgctgttttggttactgtagccttgtagtatagtttgaagtcaggtagcatgatgcctccagctttgctcttttggcttaggattgactttgcaatgcggggtcttttttggttccatgtgaactttaaagtagttttttccaattctgtgaagaaagtcattggtagcttgatggggatggcattgaatctataaattaccttgggcagtatggccattttcacgatattgattcttcctacccatgagcatggaatgttcttccatttgtttgtatcctcttttatttcattgagcagtggttttagttctccttgaagaggtccttcacatcccttgtaagttgggttcctaggtattttattccctttgaagcaattgtgaatgggagttcactcatgatttggctctctgtttgtctgttattggtgtataagaatgcttgtgatttttgtacattgattttgtatcctgagactttgctgaagttgcttatcagcttaaggagattttgggctgagacaatgggttttctagatatacaatcatgtcgtctgcaaacagggacaatttgacttcctcttttcctaattgaataccctttatttccttctcctgcctaattgccctggccagaacttccaacactatgttgaataggagtggtgagagagggcatccctgtcttgtgccagttttcaaagggaatgcttccagtttttgcccattcagtatgatattggctgtgggtttgtcatagatagctcttattattttgagatatgtcccatcaatacctaattattgagagttttcagcatgaagggttgttgaattttgtcaaaggccttttctgcatctattgagataatcatgtggtttttgtctttgggtctgtttatatgctggattacatttattgatttgcatatattgaaccagccttgcatcccagggatgaagcccacttgatcatggtggataagctttttgatgtgctgctggattcggtttgccagtattttactgaggacttttgcatcaatgttcatcaaggatattggtctaaaattctcttttttggttgtgtctctgcctggctttggtatcaggatgatgctggcctcataaaatgagttagggaggattccctctttttctattgattggaatagtttcaggaggaatggtaccagttcctccttgtacctctggtagaattgggctgtgaatccatctggtcctggactgtttttggttggtaagctattgattattgccacaatttcagatcctgttattgctctattcagagattcaacttcttcctggtttagtcttgggaaggtgtatgtgtccaggaatttatccatttcttctagattttctagtttatttgcgtagaggtgtttgtagtattctctgatggtagtttgtatttctgtgggatcagtggtgatatcacctttatcattttttattgcatctatttgattcttctctctttttttctttattagtcttgctaccggtctatcaattttgttgatccttttaaaaaaccagctcctggattcattaattttttgaagggttttttgtgtctctatttccttcagttctgctctgattttagttatttcttgccttctgctagcttttgaatgtgtttgctcttgcttttctagttcttttaattgtgatgttagggtgtcaattttggatctttcctgctttctcttgtgggcatttagtgttataaatttccctctacacactgctttgaatgtgtcccagagattgtggtatgttgtgtcttttttctcgttggtttcaaagaacatctttatttctgccttcattttgttatgtacccagtagtcattcaggagcaggttgttcagtttccatgtagttgagcggttttgagtgagtttcttaatcctgagttctagtttgattgcactgtggtctgagagacagtttgttataatttctgttcttttacatttgctgaggagagctttacttccaagtatgtggtcaattttggaataggtgtggtgtgatgctgaaaaaaatgtatattctgttgatttggggtggagagttctgtagatgtctattaggtccgcttggtgcagagctgagttcaaatcctgggtatccttgttaactttctgtctcattgatctgtctaatgttgacagtggggtgttaaagtctcccattattattgtgtgggagtctaagtctctttgtaggtcactcaggacttgctttatgaatctgggtgctcctgtattgggtgcatatatatttaggatagttagctcttcttgttgaattgatccctttaccattatgtaatggccttttttgtctcttacgatatttgttggtttaaagcctgttttatcagagactaggattgcaacacctgcctttttttgttttccattttcttggtagatcttcctccatccctttattttgagcttatgtgtgtctctgcacgtgagatgggtttcctgaatacagcacactgatgggtcttgactctttatccaatttgccagtctgtgtcttttaattggagcatttagcccatttacatttaaggttaatattgttatgtgtgaatttgatcctgtcgttatgatgttagctggttattttgctcattggttgatgcggtttcttcctagccttgatggtctttacaatttggcatgtttttgcagtggctggtactgactgttcctttccatgtttagcgcttccttcaggagctcttttagggcaggtctggtggtgacaaaatccctcagcatttgcttgtctgtaaaggattttatttctccttcacttatgaagcttagtttggctggatatgaaattctgggttgaaaattcttttctttaagaatgttgaatattggcccccactgtcttctggcttctagagtttctgccaagagatcagccgttagtctgatgggcttccctttgtgggtaacccgacctttctctctggctgcccttaacattttttccttcatttcaactttggtgaatctgacaattatgtgtcttggagttgctcttcttgaggagtatctttgtggcattctctgtatttcctgaatttgaatgttggcctgccttgctaggttgcagaagttctcctgggtaatatcctgaagagtgttttccagcttggttccattctccccatcactttcaggtacactaatcaaacgtagatttaatcttttcacatagttccatatttcttggaggctttgtttgtttctttttactctctttcctctaaacttctcttctcacttcatttcattaatttgatcttcattcacttatatactttcttccacttcatcaaatcggctactgaaggtattgcatgcatcatgtagttctcatgccatggttttcagctctatcaggtcatttaaggtcttctgtacattgttttctctacttagccattcgtctaatcttttttcaaggtttttagcttccttgtgatgggtttgaacatcccctttagctcagagatgtttgttattactgaccttctgaagcctgcttctgtcaacttgtcaaagtcattctccatccagctttgttccattgctggtgaggagctgcgatcctttggaggagaagaggtgctctggtttatagaattttcagcttttctgctctggtttctccccatctttgtggttttatctacctttggtctttgataatggtgacctagagatggggttttggtgtggatgtcctttttgttgatgttgatgctgttcctttctgtttgttagttttccttcgaacagtcaggttcctcagctgcaggtctgttggagtttgccggaggtccactccagaccctgtttgcctgggtatcaccagcggaggctgcagaatagcaaatattgcacaacagcaaatattgctgcctgatccttcctctggaagcttcgtctcaaaggggtgcctggctgtatgaggtgtcagttggcccctactgggaggtgtctcccagttaggctagatgggggttagggacccacttgagaaggcagcctgtccattcacagagctcaaacactatgctaggagagccactgctctcttcagtgctgtcagatggggatgtttaagtctgcagaaatttctgctgccttttattcagctatgccctgcccctacagatggagtctacagaggcaggcaggcctcattgagctgcggtgggctcctcccagttcgagcttccagaccactttgtttacctactgaagcctcagaaatggtgaacacccctcccccacccagtctgccgccttgcagttccatctcagactgctgtgctagcagtgagcgaggctccatgggcgtgggacccactgagccaggcacaggatataatctcctggtgtgccatttgctaagaccattggaaaagcacagtattaaggtgggagtgtcccaattttcccagtacagtctgtcacgggttccctcatctaggaaaggtaaatcccctaaccccttgtgcttcccggtgacgcaatgccccaccctgcttcagctagccctccatgggctgcatccactgtccaaccagcccaatgagatgaacaaggtacctcagttggaaatgcagaaatcacccatcttctgtgtggatcaggctgggagctgcagaccggagttgctcctattcggccatcttggaatggcaatctatgtttgctttttacatttgaaaaaactggtgtcacgtacctaggtattaatcattgtggtatcctcttgccgatttacctctttatcattaactagtgaccctccttgtcttttgttgttacagtctgtgattttagtctattttatctaatatgagaatagctactctggcacttttttggtttccagcttcatgaaatatccttttccatttccctgttttcatttccctttcggtgtctctatagatgaagttgatttctttaaggcaccataagttgggtcttatttctttatccatttgaccatttagagaatttagaacactgtcagtgttattattcataagtaaaaacttaagagtgggtgtagtggtgtacatctgtatttcctgcactttgagagactgaggcgagctgatctcctggggtcaggagtttgagaccggcctggtcaacatgatgaaaccctgtctctactaaaaatacaaaaattagccaagcatgctggcatgtgcctgtaatccaatttacttgggaggctgaggcaggagaagcttgaacctgggagacaaatgttgcagtgagctgagatcacacagagaagtcatctccactctcctcatcagaacctcttgttcacagcatttgtgagcacaaatcaatgatggttattctttcctactaattagggatattttattacacagcaatagcctccagcaaagggaaccatcatacatgattcctacaagttgacagggctggaattatcactgaaaaactaaggtggctatacttgattcccaatgtccaatttttcatgaatagagaaatttatcctttttccccccagccagaaaccaagttttgctcttacgcccaggctggaatcaagtggcacaatctcagctcactgcaacctctgccccccagcttcaagaaattcaccttttgaacaaggagatattaaggatacactatgtgtatgctaccggtggttgcaggagactcagaaaagagagaaacagtcactggcctcgtgcaactgatattctcgggaggagagaaaggcaatcaagaaagaaacatgctgtatttcagacagctgtaagtcctccacaagaaaagaaagcaggtgaggaacataggaaatgtgtcaaccataaggttcccgctaattctataagttggtcagggatatcctccaagaataagcagcatctgagcaatcacctgaagggaggaaggaaggaagactgtgagtggtggcttacacctgtaatcccagcactttgggaggccaaggagggcagattgcctgagctcaggagttcacgaccactcagagcaacctgttgatacccaatctctactaaaaacacacaaaaaaattacccgggtgtggtggcacgcacctgtagtcccagcttccatgcccagctgatttctctctctccatatatatatatatatacacatatattgtttttgcagagatagggtctcactgtgtcacccagtcatcaagcaattctcttatactgttttggaaaagcatgggaattacaggtgtgaaataccctgctggtcctgaaaaatgtgatatttgggattctctgcctggcttgttttacccaaaataatgacctccagttccttccaggttgctgcaaaagacatgattttcactgttttataactgaatagtattcctgtatgtatacataccacattttctttatttattcttctgttgattgacatgtagggtgattccatgtctttgctactgtaaataatgctgcagcaaatatttgtgtgcattttgatctattcctttgagtaggtacccagtactgcaactgcaggactgagtagttgttatattttttgttctttcagaaatctccatagtgtttgccataaaatctgcactaatttacattcccaacaacaatgcataagatttccccttttctccacattctcactaacatttgttatgtttttgtctttttcataatacccattctgactggagtaagatatctcattgtggtggttgttgatatttttgagacggggtctcactctgttgccagactggagtgcagtggtgtgatcgtggcttgctgcaacctccacctcccgggttcaagcaattctcctgcctcagcctcccgagtagctgggactacaggcgcgtgccaacaggcctggctcattttttgtatttttagtaaagacagggtttcaccatgttggccaggatgatcacagtctcttgagctcatcatacacctgcctcagcctcccaaagtgttggaattacagtcatgaggcagcgcacccaacctcaatgtggttttaatgaccatttctctgacgattcatggtgtggagaatttctttgaaataccttttggccatttatatgtgctcttttaaaaactgactcctgtccaggtgcggttgagcatgcctgtaaccccagaacttcgggaggctgaggccaatggatcacttgaggcaaagaggcagaaatcagcctggccaacaaggcaaaaccccatctttactaaaaatacaaaaaatcagccacgggctgtgactcgtgcctgtggtgcaagttactcaggaggttaaggcacaggaattgcttgaacccggtaggcacaggtcacagtgagccaagatcatggcactgcactacagcatgggtaatagagaaagacctgtctcataaaaacaaatgaataaataaataagataaaaaataaaaaagtctctttatgtcctttgccgactttttaatgggattctttggagttttctgttgtagttgagatctttgtttactctcggtattagtcttttgtcaaaggaaaagtttacaaataatttcttccgttctgcagtttgtctgctcactctgttgagaggattatttctttggctgtgcagcagctttttgtttcagtaaagcttttgaatttatataattaaaattttcagtttggtttaaatttgcactggtcgatttttggttttgttgcctgtacttttgaagtcatactcttgaactctttactagacaataaccagaagagttttctctagttttcttctcacatttttattatttcagtacatatatttaagtctataattcatcttcaattgatttttgtagaaatagtgagaaataggagtccaggtttattcttctgcaaatgacaattcaattgttccagcaccaattattgaaaagggtgtgctttcctcaacgtatattcttatcagctttgtcaaagatcagttggctataaatgtgtggctttctttctgggctctctagtctgttacatcaatctgtgtgtctatctgtatactactaccatgctgtattggtgatgatggctttgtaatataatttgaagtcaagaaatgtgatgctcccagctttgtttatttgcttcagaaaggctgagtcaacagctgcagagatgaagctgcccctcctcgcagggctccttcccggaaaaagatcatggctcccactgaccatataaccatggctggaactcctgaaattcccaaagggaggccctacccagtgaggggggatgaatgaaggtcctacttaaggaatctgtctggccacaatcaggcacagcagctgtgctgccttgtgggggaccagaccacctggattccctggagcctgcaggctagaatgtctgagtccatggaaacacagaaatggaggccgccctcacctccccagaaaactgtagtctcaggcagtctccagccgattgccactggttggctgctattccaagccagtgggtcttaacttgagaggtgctgtggaagtggggcccacggaatgaggctgcttggctccctggattcagccccttttctaagggaatgtacagatggaactcccgccttgcccagctttccaagtatataaaactcctgagtctctgtgagtgtctgagcgagtgctctggcaacattcgacacggctctgtgtatctgacccaagacccttatggcatgagctaatgggaggatcttctgatccatgcgtggcaaagatgcatgggagaaacatggtttgtgggtaggggttgtgcattcactactgcttctcttggctgtaggtgaaggtttctttggctctgtgctgatactgggtgcaccatcacccaccccctttgtttcttctcctgggtcaagtcatttgcctaatcagtcccaatgtaggaacctggatacttcagttcaaggtgctgaattcaccgtgcttttcattcaggggaagacagctgcttctcattgggcatcttggcctgcccacttcacgtcactttttgtaaaatccacaccactccaggaatatccattacttaacttcgcctgaaataaacagaaggctcattacacttatcatgggctcacttacttcgcctataatgaaggtgccatggaaatgctagtggatgacgtggtccattttcttagggatgagatagaaaaatggtgtatggctttttaatttaattaaaatttttagtttggtttaaatttacattggtctctttttggttttgttgcctgtacttttgaagtcttactcgtgaactctttactggacaatgaccagaagagttttccctaagtttcttctgatattttgaccatttcagtacatacatttcagtctataattcactttaaattgatttttgtaaacatggtaagaaataggagttcagatttattcttccgcatatgataatgcaactgtcccagtaccaattattgaaaagggtgtgctttccctagtgtatattcttgtcagctttgtcaaagatcagttgcctatgaatgtgtggctttcattttggattctctcgtctgttacatcaatctgtgtgtccacatttatacctgtaccatgctgtattggtgactatggctgtgtaatatattttagagttaggaaatgtgatgctcccagctttgttcatttgcttcagctgaaaaggttgagtccacaattacaaagatggcagccgcccatccccggaggacctccaacccagaaagagatcaggcttcccaccaaccctataaccctggctggagttcctgaaattccaacagggaggaccttcccagtgaggagggatgaatcaaggtcaaatttaaagaaacagtctggccactatcaggcacagcagcagtgctgccttgtgggggacccctcctgctccagaccagctgccctccctggagcccgaaggctagattgtctgagtctacggaaacagagacggtggccgccccaaccacccagaactcggtagtctcaggcacttggcttgctatcttgccactgcttggctggtattccaagcccgtgggacttgagaagtgctgtgatgatggggaccacaggatgaggctgtctggctccctgtgatatggctgtgatgagtggaggaacaccagggctcatgtctcacacagaattggagaaaatgacacaaacacatgtacagtggttttatggcgtgcagtttaataggcaagaacgaaggaagagctccccatactgagacagagggaggggggctccaaagccaaaagaggaaacccggagtgctgtggataccaatgagttatatgaagaaactggagggggcggtgtctgatttgcatagggttcaggcgattggttcgaccaggcatgtcatttatgtggcccacggaaaaactggccctcccacctagcctttgaatatgcacgtgccggacaccctgatttcctacactcatggggatatatgggggtggccatatcgccaggcacaggtggggacaagggccagaagagggcgggaatcgctatgtttgggtggacccagtttctaatggccggcatctgcagatcaaggttaccggagaactctaaaagccggggctttcctgctagacaagactcatttctggagctgctttaaaaagaaacaaaacttcccaaggaccccttttcctccctgtctgcccaaaataatttcttaacaactcgtataacacctgaattcagcccccttactgggggaatgtaccaacggaactcccacctttcctggtttctcaaggctagattgtgtaaacctcctgggtctcggtctgtgtctgagcagctgctctgccaacactccacacagccctgtgtactaggcccaaggccgccgtgactcagcccatgggaggatctcctgatttcttggttgcaaagatccatgggagaaaaatggtttctggggcggggtcacacactcatggcttctcttggctgtgcaagaaggttcctttggctctgttccaatatagcgtggttcatcacccacccctgttttctttgttctcctgagtcaagttgtttgcctagtcagtcccaatgtgagaacctgaatatttcagttcacgtgcttatcgtgaaattcactgagactttaattcagtggaaggcagcctcttctaattggccatcttggcccgccccctccacgtcacctcccataaaatggccacgctctccagggacgatgccattatatatctttacgtgaaaccgacagaacacttattacactttttgtgagctcatttacttcacttataatgaacatggccatggaaatgctagtggagaaagtggtcgattttctgatggatgtgataaaaaaatggtttgccgaccaattaatgacatatgtctcaaaactagtaacgagacccttaatcgctgggttgaagtttctaatcaagaagatgctcatctatgtattcaacaaagcagcttcccttgcttctgaaatgcttccaaacaacatctcatatttcctgaagaagataatgcctggacaagcagcacaagtcattcaggtttactttcagctcataaatccagcaggatattcgcacaattgttgggaaaccttatcagttcatgagtcgtgcatgtttcctttaatttcaggaggaagagggtaatctggaagagtttcctgacctactctgctgctgtgattaaacaaccaccaggaaattttgatgacactgttctcctgagctcctccctttcctcggggaagaaaagcattgaaactacaaaaataaagtgttatttggctggagtgaggtctcatgtctgcttatgcggtggctcgctgctcagaacagggtgagtctctgagttgtacgctgaggaggggaggctgtcaatctagaaaaaacccattgcatgggacacctccatggggtctggggggctgaggatgaggagctggactggatctagggaaggaggaggtttcagagggtgaaattctggcagtaaatcctgggggtgtttgaaaacttcctccctcagaaggagaagactcagggaggaataaggacaaaccatgggtcccttgaggggcatttactaacttaagaggactttatcgggaagcagagtgacaatggcctccttgaggactgaggcccctggataaatgaggcccagatccagatccagtccatgggagatgagaccttcaagggacatatttttgttgggacagaggaaaagtgcagctctgcagctgcagaggaagccttggcagtgtgaaagcgaccttggagggggccctgtgcgttctgaatgcttctgaggtccatcccctgtccccgcctctttttctggattttttgggctccatggtctccgccatcttctgagcgctccacgctgccaccttcagttttctcttctgggctccaaatactccaaaatctttcatatctgtgcccctacccctgtttttagcatgtgttgggactccaggtccctgaaggtttctggcctgaaatccacctccccagcggtgtggattctgctctagagaccccgcacttggcaaggttcccaggcccctgggggacaaccgagtggtatgtgcacttcagggctccacactcggcaaggtctttcaagcccttggggttccctcctcagttttcttcacatgtctgggatgtagtcactctataaatgccgggatgtgatccccaccccagtgattttttttagttccatgagtgttgctatctgaatagtcatcctgagagtgatgggaccttttgaatttgcagcaagttttagattagtgtgagtggcctgagatcgcaaaactggggctagcattggatgtgaggttaggctggtggaaaaatttgcccagaacctgaggagtgtgggctcactgcaggtggttaggatcagcacagaattgcaaggatgtatagctttggggtaaagaataacatggttcagaagtacatgtattagtcttttcatgcattgctataaagaattacctgagactgggtaattaattataaaaactcaggtttaattggctcatggttccacaggctgtacaaaaaggatgatgctggccatcagctcaacttctggggaggcgtcagaaaacttagagtcatggcaaaaagcacaagggaatcaggctcatcctccatggccagagctggagctagtggtaggagaggtgctgcacacttttgaacaatcagatctttttagaactctatcaccagacagcacctagaggatggtgctaaattattcatgaaatatccacccatatgatccactcaattctcaccggcccaaccaggaccacctccaccattggggattacaattacacatgagatgtgggtggggacacagatccaaactcgatcagtgggcatcttggactgggtctactatagaagaagaaccaggagctgactatcatccttaagactgcccatgatggccaggcagggtggctcatgcctgtaatcccagcactttgggaagccaaggtgggtgaatcccctgaggtcaggagtttgagaccagcctcgccaacatggtgaaaccctgcctctactaaaaacacaaaaaattagatgggtgttgtgccagacgcctgtaatcacagctactccagaggctgaggcatgagaattgcttgaacctgggaggcggaggtggcggtgagccccaatcgcactgctacactccagcatgggcaacaataccaaaacatcgtctcaaaaaaaaaaaaaaaaaaaaaaaaggctgcccatgaccactgccccagtgagagggacaccagcatggctaagatcaagtgctggacattcttcatgggtcagacattaaagcaggccacactgttacagagatgggctccattcatagcaacaaagtggtgagaagatgtgggaatggcagaggccagcactttgccatcaatgcaaggtgggcataaggagctggcaccagtgccagagtgcatcaggggaggactgctttgcaatatctagcacttacctcttagagtatgtttcattagggacaacagatataaatggcagacaagtgagtcccttcagtaacaggaaatagaaatcatcaagaggaacagaaacagatgtcagcagccctcatataaagtcatcatccttcatccagttaaaacctgagacagttctcacataagaaggtctaattcaaaaagagactgggttctcatgaggcaggttcatgcaaaaccaagggaagtatacaactttgggattctccagcttcccttggaaaagacctacaatcatttgcttaggtaactgagcactgaacaaaggtgagtattgttatctttcagaagctgttggccatgaaggtcttgctggcataaaacccatggttggaaacatcaccatgacccctgttagagtaatggcctaagggcaagggtcaggaaattgatgtattccttgccaacttctgcgagacgagtgttggtccactcatctctttcacggaattcaccagtctggtatcttcaaaatccagaaggatgatggcagatggcaggaaactaatgcaaacaccatcagttgtacctccactgtagcagcagtaatggatgttatctcttcattgtaatatccagggagggagaagatgacattattctcaatattctaaacaccctgtgtgtacagcctctgtgatattttttgtaatatccgtgtgggagagaattatattactcctaatatctcaggggttgtgccccctctgtgacaatgttcctaacacccaggaggggataggatgatatcacttttagcatcacagggggtgtacaccccactgtaatattgttcataatatccgggggggagagaatgatattactcccaatatcgcaaagactgtacaccaacctgtgatattatttgtaatatccataagaggaagaataatattactcccaatgtcacaggaagtgtacacccttctgtgatattgttcaaaagatccagttagggaggggatgatattactctcaatatcttaaacaccctgtaggtaagccctctgtgatattcctcataatatccagagggagaggatgatattactcccaatattgcatgaagtctacaccccacctgtgatattgttcctaatatccaggatgggagaggatgatattactcccaatgtcgcaggggatgtacaccttccctgtaatattgttcgtaatatctagaaaaggagaggataatattactttcaacatcgcagggggtgtacaccttccttgttatattgttgctaatatccagggaaaaagaagatgacattaccaccactattgcagaaggtgtacacccccccttgatatagttcctaatatccagaaaaggagaggagatattactccaaatattgcaagaggtgtacattcccctgtaatatttttcctaacattcaggaagaaagagagtgatattgcccttaatattgaagggagtgtgccccccccgtgatattgtttctaatatccaagaaatgaaaggatgatattactcccaatatcacaggggctgtacagccccctcccatgatattgttcccaacatcggggggggggtgaaatagtattattcccagtatcacaataggtgtacacacctgtcgtgatattgttcctaatacccatgggggaaaggacgatattattcttaatatctcagagggatgtacaccctccctgtgatattgttcctaatatccggggtgggagaggatgatattacccccaaaatctcaaagggtgtacacccctcttgtgatattgttcctaatatccagggtggagaggataatattattcccaatatccaggaaaggaaacgatgatgttactgtgaatattccagggggtgtcctcccctctgtgatattgttcctaatatccaggttggggagattatgatatttctccaaatatcacaaggggtgtacaccaaccctgtgttattgttcctaatatcgatggggggagaggacgatattactcccaatatcacagggggtgtacaccacctttatgatattgttcctaatatccatgaagaaagaggatgatattactttcaatatcgcaggggatgtacactccccctgtgatattgttagtaatacctaggagaagaaagtgtgatattactcccaatatcgcaggggatgtacacgcttcctgtgatattgttcctaatatttagggggaaaggggatgatattactcccaatatcgaatggtgtgtacacccccccgtgattctttttttttttttttttttttttttgagatggagtcttgctctgccgcccagactggcgtgcaatggcgcaatctcggctcactgcaacatttgcctcccaggttcgcacgattctcctgcctcagccttcggagtagctgggattataggcagctgtcaccataccaggctaatttttgtatttttagtagagttggggtttcaccatgttggtcaggctggtcttgaattcctgacctcaaataatccacccaccttggcctcccaaagtcctgggattacaggcataactttccctgtgatattcttcctaatattcaggaagaaagaggatgatattgctcccaatatcgcagagagtgtgcactcctcctgtgatatggttcttaatattcagaggaggagaggatgatattactttctatattgcagaaggtgtacacctccctcgtgatgtctttcctaatatccagtgggggagaggttattagtctcaaaatcacagaaggtgtaaacccccatttgatattgttcctaatattcaggggtggggagagaaaggtattactcctagtatttcagggcatgaacacccccaccgtgatatcattcctaatatccagaaggggaggcaatgatatttctcctaatatcacaaagggtgtacaccccttctgtgatattgtaaatattctgtgtgtacacccccctgtgttatagtctgtaatatccgggtgggggagagggtgatatttctccccatattgtaggggatgtacacccttctgtgatatggttcgttatatccagggaagaaaaaggtaatattgctgcccatattgtggagagtgtacacccccatgtaatatggttcgtaatatccaggagtggagagggtgatactgctccttacatcgaggaaggtgtacaccttattgttatatgattcgcaatatccaggggaggagagagtgatattgctccccatgtcgcagggggtgtaaaccctccgtgatatgattggtaatatccaggaaaggaaagggtgatatttctccccatatcgcgggggacgtacatcctcctgtgatatggttcgtaatatccaggaggaaagaggaaaatattgctcttcataacccgaggggtgtacaacccctgtgatatggttcgtaatacccagaagtgtacacccctctgtgatatggtttgtaatatccagggggttagagggtgatattgctccccatatcgcagtgggggtacacccccctggattggttcataatattcatggggggagaaatttacatttatcctcatatcagggggggtgtacaccccccgtgatatggttcgtaatatccaggggaagaaagggtgatattgctccttatatcgcggaaggatcaccctcccctgtgatatggttcataatacccagacgggaagagggtgatattgttcttcataaagcgaagggtgtacagccccctgtgatatggttcataatatgcaaaaggggagagggtgatattgctccccatatcacggagggtgtactcccttctttgatatggttcgtaatatccaggggtgtagatggtgatatagctcgccctattggggagggtgttcacccctctgtgatattgttcgtaatgtccagggaaagagaggatgatattactcccaatatcgcagaaggtttacaccactctgtgatattgttcataatatccagggaaggagaagacgatattactcccaatatggcagggggtgtagaactcctgtgatattgtttgtaatatccaggcaaggagaggatattactctcaatatcgcagaaggtttacacccctatgtgatactgttcatgatatccagggaaaaagaggatattactccctatatcacaaagggtgtacacccctttgtgatattttttgtaatatccaggggagagaggataatattactctcaatatcagaaggggtgaaaaccctcctgtgtcattgttcataatatttagggaaggagagagtgatattactccaaatatcacagtgggtgtacacccccctatgatattgttcctaatttccagaaggggagatatgatattattgccaatatcgcagaaggtgtacaccttactctgacattgtttgtaatatccagatggggaaatgatgatattactcctaatatcacagggggtgtacacccccttgttttattgtttgtaatattcaggggaagagacgattatattactcccaatatcgcagggtgtgtacaacactctatgatattgttcataatatccaggggaggagaggaagtgtacacccccccgtgatattgttcgtaatatccagaggtagagaggatgatattactcccaatattgcaggtggtgtacacctttctgtgatattgtcatgatattaagaaggggagaggatgatattactaacaatatcacaaaaactgtacactccctgtgatattgttcataatatccagaagaagggaggatgatattattctgaatctcgcagaagatatacaccaccctgtgatatggttcataatatcctaggggaaagaggatgacataactgtcaatatcgcagggggtgtacaattccctgtgatattgttcacaatattcagagggaaaaaggataatattactttcaatatcgcaggcggtgtacacattactgtgttattgtttataatatccggaatgagagaaaattttctcccaatatcacaggaggtgtacactcccctgtgatattgttcgtaatatccagggaggggagaggatactattactcccaacatctcagggagtgtaggccccccctttgatattgttcctaatattcggaagtggagaagatgatattacttccaaaatcgcagggggtgtacactccctctgtaatattgtttctaatattcatgagtggaaagaaagatattactcccagtattgcaggggacatacaccacactgtgatcttgttcacaatattcgggggggagaggatgatattactcccaatatcaaagtaggtgtacacccccttctgatattgatcgtaatatccagaattaaagatgataacgttactcccaatattgcagggggtgtacatttttgaatactgttcataatattaagagggggaggggatgatatctgtcccaatatcgcaaagtgtgtacacctcctgtgacattgtcccaaatatccagaggaaaaaaggatgttattactcttaatatctcagagagtgtacacctccctgtgatattgtttgtaacatccagaagaaagaggctgatattactcttaatatcgcagggggtgtacacccccgccccgggatattattcgtaatatccagggggaagtggaatgttcagaatgggagaggatgatattacttgcaatatcatagtgggtgtacaccccactgtgatattgtttgtaatatccgggaaaggagaaaatgacattcctccccatatggcaggggctgtacaccacctatcatattgttcaaaatatccagaaggggagaggatatgtctccaagtatcacagggggtgtacaccccgctgtaatattcttcctaatatccagggtgtgagaggataatagtactcccaatatcccagggcatgtacaccccccttgtgatgttgttcctaaaattcatggggagaaagaatattactcccaatatcacagggggtgtacatacactctgtaatattgttgccaatatgcagcaggagagaggatgatattactcccaatatcacaggggctgtacaccccgctgggatattgtttctaatatcaagggggaaaaaggatgatattactcccaatgtcgcagggtgtgtacttcctctttgtgacattgttcctaatatccaggagagaagagggtgacattccttccaaaactgaaaggggtgtacacaccctttgagatattgtctttaatatccagaacgaaacaggatgatataactcctaatactgcaggggggtacaccctctctgtgatactgtttctaatatccaggaggggaaagaaaaatattaatcccaatatcacagggggtgtacattccccctttaatattgttcctaatatccaggaagacacaggatgatactatttccagcagcacagggcatgtacacccctttgtgatattgttcctaatatccaggaaaagagaggatgatattactgtcaatattgcagggcgtatacactggttctgtgatattgtttctaatatccgggggtggagaaaatgatattactcccaatattccagcgggtgtacacccgttctatgatattgttcctaatatctgggggagagagaatgatattattgtcaatatcacaggggatgtacagattccctgtgatattgtttctaatattcacagggggagaagggtataatactcccgatatcgcagggggtgtacactccccctgtgaagttgttcctaatatccagggattgagagaatgatattactcccaatatcacaggcggtgtaaaccccctgtgtgatattgttcctaacatccagaggaaaagatgatgatattattttcaatatcacagggggtgtacgcatccctgtgatattgtttctaatatccaggggaggagaggatgatattattgttaatatcgcagggggtgtaccccaccctgtgatactgttcctaatatccggggtggaagaggataatattgctcccaatatcgcaaagggtgtacaaccttcctgagatattggtcctaatatccagggagggagaggatgatattactttcaatatcacagggagtttacacaacccctgcgatattgttcctaatatccagcggaagaagagttaggataatactattttcaaaattgctgggtctgtaccccctccccgtgatattgtttctaatatccaggaggggagaaagtaatatgactcccaatatcttagaagatgtacaccctccccataatattatttcttacatccagggggtagaggatgattttgctttcaatatcacagagggagtaaacctttccggtgatattgtttttaatatttaaaaagagagaagataaaattactcccaatacaaaggggatgtattgtgtactcccccctctgatattcttttttaatatccagatggagagaggatgatattactttcaatattgcatgggatgtataaatcccctgtgttattgttctgaatatacaggtggggagagtatgatattactccaaatatcgcagggggttctttccccctgtgatattgttcctaacattcagggagggagaggatgatattactcttaatattgcagggggtgtacccacgcctatgatattgttcctaatatccagagggggagaggatgatctaactcagaatatgacaaggggtgtacacacagcctgtgatatggttcctaatatacaggggagaaggggataatatttctcccaatatcgcagggggtgtacaaccccctgtgatactgttcctaatatacagaaggggacagcatgatattgttcctaatatcgcaggaggtgtacaacgccctgtgatattgttcctaatatccagggcgggagaggatgatattaccctcaatatcgcagggggtgtgcactttccctgttatattgttcctatgatccgggtggggggaaatgacattagtcccaatatcgcaggatgtgtgcaccgctcccccgtgatattgttcctaatatcaagggggagagaggaggatattactcccaatatcgcaagggatgtacatcctccatgcgatattgttcgtaatattcaggaggagagaggatgatattactcttaatatcgcagaaagtggacacccaccctgtgatgttcttcataatatccagggaagcagacgattatatgactttcaatatcgctgggagtgtacatcccttttgggatattgtttctaatatccaggaagggagaggattatattactctcagtattgcaggcagtgtacaccttttttgtgatattgttcctaatattcagaaagggaaaggatgatattactcccaatattgcaggtggtgtatatccccctctgatattgttccttatatcaaggaagagaaagaataatattactcccaatatcaaagacagtgtagacccctcctgtgatattgtatttaatatccatggggaaagaggatgatgttactcccaatatcgcagggggtttacacccacactgtgatattattcctaaaatccagtggaggagaaaataatattgctcccaatattgcagggtgtatacaggccctcccccgttatattgctcctaatatccagcggtggagaggatattactttcaatttgtgtagggagtgtatacccccctgtgatatttttctaatatcaaggatgggaaaggatgacattactcccaatatcgcaggaggtgtacacgccctgtgatattgttcctaatatctagggaaggagaggatgatattactttcaatattgcaggagctgtacaccctctgtggtattgttcttaatatttaggttgggagaaaatgatatgagtccaaatatcgcagaaggcatacacacttccaataacattgttcttaatatccgggggagagggtgatattactcccaaaatctctggggggtgtacacccccttctgatatttttcctaatatccagggaaggaaacgatgatattactataaatattccaaggagtgtacaccttcctaatatcctaatattgttcctaatatccaggggtgggagaggattatattactcccgatatcgcagtgggtgtacacccctcctgtgatattgtttctaatatccaagctaggagaaaatgatatcactctcaataccacagggggtgtacaccttccgcatcatattgttcctaatattcagagggaaagaagatgaagttactttcaatatcggaggggttgtacacaacccctgtgatattgctgctagtatccaggaagaaaggggattatgttactccccttatagcagggggtatacacctcccctgtaatattgttcctaatatcaaggctgggatatacgtggggggaaggatgatattactcccaatatcgcaggggttatacaaccttctgtgatattgctcctagtaaccagggcagaagaagatgatattactcctaatatcgcaggaggtgtacactcccccattatgttgttcccaatatgcagaaaaggagaggatgacattattgccagtatcgcagggtgtgtacaccacccctgtaatattgttccaaatatttagggggagagaggatgatattactcccaacatcgcagggggtgtacacacatcccctgtaatatagttcttaaaatctaggggaaaaggggatcttatttctctaaatattgcagagggtgtacactccccggtgatattgttcctaatagccgggagggagataattaaattactttcaatatctcagagagtgtacatcgcccttgcgatattgttcctaatatccagagcaaaagagaatgatattactcccaatatcttaggagtgtacatttaacctgtaatattgttcctaatatccagggggaagagaatagtattactgccaatatcgtaggggttgtacaccttttctgtgatattgttgcaaatatttagtagagggaaagaatattactcgcaatatcacagggaatgtatacttcccctgtgatattgttctgatatccagaaaaagagagggtaatattactcccaatattgcagggggtgtacaccccccttgtgatattgatcctaatataaaggaaggaagaggatattactcctcatatagaaggggttgtccaccccccttgtgatattattcctaatattcagggaagcagaggatgatattattttcaatatcacagagggtgtgcagtccacctgtgatattgttcttaatattcggggggagaggatgttattatgcctgatatcgcagtagaggtacacccctcaagtgatactgttcctaataaccaggggtgaagaggatgatattactcccaatatcgcaggtggtgtacacccccccatgatggtttctaatatacagagggggagaggaaaatattactcccaaaatcgctggaggtctacaccccccttgtgatattgttcctaatatccaggaaaggaaacgatgatattactgtgaatattccagggggtgtacacccgctttgtaatattgttcctcatatccagggtgtggagaggattatattactcccagtatcgcagggggtgcacgacgcccctgtgatattgtttttcatatccaggaggggagattattatcaatatggcaaggggtgaacaccccctgtgatattgtacttaatagttaggttggcagaaaatgatattagtctcgatatcgcagggggtgtgcactccgcctggtgatattgcttttaatatcaagggggagaaaatggcattactcccaatatcgcagggggtgtacaccgctcatgtgatattgttcctaatatccaggtggagagaacataatattactcccaatatcgcacaaggtgtacacccctcctgtgatatggttcctaatatccatgggaggagatgatgatattactcccaatatcacaggggatgtacaccacccttgtgatattgttcctaatatccagggaagaaaacgatgatattattgtgaatattacagggagtgtacacactccctgtgatattgtttttgatatacagggtgggagaggatgatattactcccaatatcacataaggtgtacaccccccgtgatattgttctaaatatttcggtggggagaaaatgatattagtctccatatcacagggggtgtgtgctcctcaggtgatattgtttttaatatcaagagggggaggagattatattactttcattatcacagggggtgtacacccctcctgtgatattgttccttatatccaggcgaggggaaaataatattactctcaatatcgcaggaggtgtacacaccccatgtgatattgttcctaatattaagggggaaagaagataatattactttcaatatcacagggtttgtactcctttcttgtgatatagtttttagtatccagggggaaagagcatgatattactcccattgtagcaaggggtgtacacacctcctgtgatattgttcctaatatccagaagtggtgaggatgatattactcccaatatcgcagggggtatacaccccacctatgatattatttctaatatccatgggaaaagagtatgatattacacccaatgtcgcagagggtgtgtatttttcctgtgatattgtttctaatattcaggcggggagaagatgatattactctcaatatagcagaaattgtacatccccgctgtgatattcttcataataatcagggaaaaagaggatgatattactaccaatattgcaggggggttacacttcccctatggtagtgttcctaatatccaggaagaaagaggatgatattaatcccattatccaggaagtgtacacccaccctgtcatgttgttcctaatatccagcagggaagaggatgatattacaccccccccccgtgatattctccttaatatccaggaggggagaggctgatattactggatatatagcaggggtgttcataccttctgtgatattgttcctaatatccagaaaaggagaggatgatattacttccaatatcgcagaaggtgtacacctccctgtgatattgatcctgacattcagaaggggagaggatgatattactcaaaataccgcagggcatgtgcattcccttgtgatattgttcctaatacccagaagggaacaggataatattactttcaatatcgcagggagtgcacacccccctttggtatggttcttaatatccagaaggaaagagggtgctattactttccatattgcaaggggtgtacaccccactgtggtatggttcataatatccaggcagggagagggtgctattactccccacagtgcggggcatgtacaccctgctgcggtacggttcctaatatccagggggagagaggatgctatgactccctatatcgcggggtgtgtacacccctgtgtggtatgttttgtattctccaggaacggagagggtgttgttacccctcatatcgctggaaatgtacactcccctgtggtatggttcgtaatatccaggggattgagggtactgttacccccatactccccatatcgtggggggagtgcacctccctgtggtatggttcgaaatatccagggtaagagagggtgctattattccccattttgcaggaggcgtacacccccctatggtatggttcgtaatatccggggtgaggggatgctatcaaaagaagagagaaagagaccccccatattgttctatattattttatactcagtacctgttttaagaagaaacaaggaagtgaaaccaaaagcaggcagcccggcgccaggcaccagacccaaaaccagacccgaaaccaggcctgggcctgcctgaccttagcctgatagttaaaattcaacccatgacctagcaaccaatgttatccatagattccagacattgtatggaaggacattgtgaaatttcttgttctgtgctgtttcactctgattaccggtgcctgcagcccctgtcacatacccactagattgctcaatcaatcatggccctttcatgtaagatctttagtgttgtgagcccttaaaaaggacagaaattgtgcactcaacaagctcggattttgagacgctagtctttcgatgcttccagctgattaaaagccacttccttcactacctcggtgtctgtggggttttgtccgcgactcctcctgctacactatgactccccatatcaaggggggtgtacacccccctgtggttcgtaatatccagcaggggaaaaggtgctattactccccatattgcagggagtgtacacccccttgtagtatggatcgtaaaatcaaggggggagggaaggtgtaattatccccatatctcagggggtgtacacccctttgtggtaaagtttgtaatatccagggatattacagggatattatccccaaattaatacttttataatttcttatgcctgcctttactgcaatctctgaacataaattgtgaagatttcatggacatttatcacttccccaatcaatacttttataatttcctatgcctgtctttactttaatctcttaatctcatcatctttgtgagctgaggatgtatgtcgcctcaggaccctgtgatgattgcattaactccacaaattgtttataaaacatgtgtatttgaacaatatgaaatctgggcaccctgaaaaagaacaggataagagcgatgttcagcgaacaagggagataagcataaggtctgactgcctgtggggctgggcagaacagagtcacatttttcttattgcagaaaatgagtaggagaaatatcactgggaagggaacgcattcctaggggaggcctatggacggccgctctgggggtgtatcccttatgtggttgaagataagggatgaaatacaccctggtcccctgcagtgccctcaggcttgctaggattagaaattccagcctggcgaattctagtcagaccagttctctgctcttgaaccccgtttcctgttaagatgtttatcaatgacaatgcgtgcacagcaggacatggaacctcaatagtaattccattttctccctggccttgtgaccttgctaggcccttctgcccttgtgatcttttattgccatttgaagcatgtgatctctgtgacccactccctattcgtatccccctccccttttgaagtccctaataaaaacttgctggttttgcagatcaggtggtcatcacagaacctgccgatatgtgatgtcaccccggaggctcagctgtaaaatttctctttcgtactctttcactttatttctcagaccaggtgacacttaaggaaaatagaaaagaacctactttgaaatattgggggctagttcccccaatagacattgttcctaatatccagaaaaaaagaagatgatattactcccaatatcacaggggttgtgaaccccacctgtgatatggttcctaatatccaggaagggagagaatgatattactctccatattgcagggggtgtgcacatccctgtgatattgttcctaatatccaggggaggagagggtgatattactcccaatattgcaagggttgtaaactccaccctgtaatattgctcctaatatttaggatttagggggggagaggataatattactcccaatatcgcaggggatgtatatgccctctttgatattgttcctaatatccagggggggagaggataatattactttccatatcacaaagagtgttcacccccctgtgatattgttcctaatatccaaaaaggaagaggatgatatcaatcccaatatcacaggaagtgtacaccccccccttttatattgtttctaatatccaggggaaatgagggtgatatttctctcaatatagcagaatgggtacactccccctgggatattattcctaatatccaggggaaaaaaagaggttgatattcttcccagtatagcagggaatgaatacaccctttgtgatattgcttctaatatcaaggggaaaagaggatgatatgactcccaatatcacaggggatgtaaacctgtggcgttgttgctaatatcaaggagggaagagtatgatattactcctaatgtcgccgaaggtgcacactttccctgtgatattgttcctaatatccaaaagggaagagaatgatattacccccagtattgcagggtgtacaccacccctgtgatattgctcctaatacccaggaaaaaagagaatgctattacccccaatatctaaggggacgtataccttccctgtgatattgtttctaatatccaagtggggagaggatggttttactctcaatattgcagggagtgtacactccccctgtgatactgtttctaatactcgggctgggagaaatagtattactcccaatatcgcagtgatattgtttccctgtgatattgtttctaatatctagtgggggagataattatattactaccccatacacaggggagggtgtacattcccctgtgatattgtttgtaatatccagggaaggagaggatgttactcccaatatcacaggggttgtacaccccttttttgatattgttcctaatatctggggggcagagaattatattactgtcaatatcacagagtgtgtacaccccctctgttatattactctttatattcagggcggtagaggatgatattactccctatatcacagggggtgttcacccctcctgtgatattgtttataatatctaaggggaaagaggatgatatcactctcaatatcaaaggaaatgtacacctttcctgtgatattgtttttattatataggggggcagaggatgatattaagaacaataccacaggggatgtacacccacgtattgatattgtccctaatatgtatggggaaagaggacagtgtaactcccgatatcgcagagtgtgtacacccccttgtgatattgtttctgatatacacggggagaaaagataatatttcttccaaaattgcagggggtgtacaaccccctgtgatattgtttttaatatccagtgggggagagaatattactcccaatattgcagggcgtgtacacaacccctgtgatattgttcctaatatccagagtaggggaggatgacattactttcaatatcgcaaggggtgtacattcccctgtgatattgctcctaatatccatgaggggagaggatgatattattcctaatatggcaggggctgtacaccttccctgtgatattgtttctaacatccagtgggggagaaaatgatattactccctatatcacagaaggtgtacactttccctgtgatattgttcctaatatccagaaggggagaggataatattactcccaatatcgcaggaagcttacaactcccctgtgatattgtttctaatatccagggaggtagggatgatattactcccaatatcgcaggggatgtacactcccccgtgacattgtttctaataaccagggggtgagaggatgatattacgcttaataccgaagggggtgtacacacccttgtgatattgtgcctaatagccagggggaagaaaattatattaattttaatatttatggggaaaaaggatgatattactcccaatatcacaggggctgtacaccgaccttttgatattgtttttaatatccagaagagaagaggataatattgctcccaatatcagaaaaggtgtaaaccccttctgtgatattggtcctaatatccagggagggagagaataatattactaccaatatcacagaaggtgcccacccccaaggtgatattgctcctaatatccaaagataatagggtgatgttactcccaatatcacaggaggtgttcacaccccttgtgatattgtttctaacgtacagggaagggagaggatgatattattcccaatatcacaggaggtgtatactcctctgtgatattgattttaatattcggggggaaaggatgatattactccctatatcgcagagggtgtacaccctctgtaatattgatcctaatatccagggcgggataggatgatattactcccaatatcgcagaaagtctacacaacccccagtaatattgtttttactatccagggggaagaggatgacattactcccaatttcacagagtgtgtacactcaccatttgatattgtttctaatatctagggggagagaatatattactcccaatatcacaggaattgtacaccacctctgtgacattcttgtgaatatccggggaaaaagagaataatattactcccaatattgcagagcgtgtacacccctccatgatatcgatactaatatttttttaaagaggatgatattactcccattgtcacaggatgtgtacaccccccttgtgaaattgttcataatattctggggggagagcataatattactccccatatcgaaaaaggtgtccaccctccttataatatggttcctaatatccaggatattacttaatccaggatacttgtaataccctaaatatacaattgcttgaacctccacctcccaggttcaagcaattcttctgcctcagcctcccgagtagctgggactacaggggcacaccaccacacccagctaatttttttttcttgtatttttagtagagatggggttttgccatattggccaggctggtctcaaactcctgaccttgtgatctgcccacctcagcctcccaaagtgctgggattataggcgtgacccaccgtgccaagccaggaagaggatgctctatagatttccccaataagagatggctttgcagggccattccaaaatatgtcaaagaaatacatttggggataaaatactttgatttcctttagggaatgttatctattatgtgatgctataccagagtcaggttggagtcggttatcttattgcaacaaagagtctgttccgtcactgttgggatctctattttttcctcttatttcttgagacagggtctcactctgtcacccagtctggagtgcagtggtgcgatcttcattcactgaaacctctgcctcctgtgttcaggtgattctcgtgcctcagccccttaagtaactaggattacaggtgtgcgccaccacacccagctaatttttgtattttcagtagagatggtattttgccctgttggccaggctggtcttgaactcctggcctcgtgtcatctgcccacctcgacctcccaaagtgctgggactgcaaatgtgagctattgtgcccagccaggatctctgttttaatgttagtgctggtcactttgcatgaactccaaagggaagaaatataatgaggtgtgtctgaccccctgccttctcatcgtgacctgaattagtttttcaggtttgcaggggatacccttggacaagaaggggctctattcggttggttggggggattagaattttactttttgtttacaatatttctcctgaaagagttaggggctcacaaggaatttccgcgtgagcaacttatgaggaaagccatctgggaagatatgtgtccttgtgtcactgggatattctcgtttaccccaatgatacggcaatgacgcagggttgtgaaattacagctatgtgtttggggaaaaaagaaagcaggattgtgtgactacgtttccaaacttcacttgcccttagccatagtgagttgggggcctggagattctgttttctttcacaatgatatagatacaattaaatgtatagaaagcaaaaaaataaaaaggtgagtaatgaggaacctctgattcctgagtggccatgtagttacccatggcacagagccacagttactgaaggtaaagtttgctggggaatttagaaatgaatccagctcttggaggagtcagtttactggatgcctaagaaaatgcaaacaaaataagaaaaaagggtaatattcaatcccatagttattgttacctgtcatagctaaagtaaaattaaaacagagtgctggcttcaatcttgatgctacactaagcttagatttcagtgaatgtgagtctcagccactagctcagagccacctcccaaagaccaaatcatgtagggacaatagaaagtacttctgagaattgtggttaccaagaacctagtaactgttggggaggagcaaaacaaagtacagaaaccagagggtacaatctgagtgagactgctatcagcttctggaggagcctttactaaaatgaatgatgagagtaactggatgatgagagtaactaatggatgatgagagtaagcaatgtctttggttttcttttttttttttttttttttttagcagacgtctcactcttgtcgcccaggctggagtgtaatggcatgatctcgcctcactgcaacctccacctcctgggttcaagcaattctcctgtctcagcctcccgagtagctgggactacaggcactcatcaccacacctggctaatttttgtatttttagtattttctggtgagggtccaggtttccggaaacaactcagagacatatgttaagatgttatctttagttttcacagggaaccaaatatgttacgactccaatttccttggctattgttttaagttaccattaccttctcgttgatcaagttgctcatttacttctcaagcctagctagatgcctggaatttcccttgaaggaagtcaagattttcctttatctccatactggctgatggtgatcgagtaagcccctaagaggggtccctgctccatctcgagatgctgctagattctacagtgcctaataaacagctctcgcctggccgacaaagagctgcttgctctctggatagcaattccaaagtgaacagacaacatcctgtttggaagactgccactctgttagaagaagcatcaggaaaacctttcttttgagctatttataactaacagcaattgaccaagtatacttttgtgagtgaaactgacctttctccctgtaagaattctccaaaatttggaaactatttgtgagtatttttacttatggcaatataattattggcacaagctcaatcagattcggttttctttcgtaacaggaaccattggagatactcattactctttgaaggcttacagtggaatgaattcaaatacgacttatttgaggaattgaagttgactttatggagctgataagaatcttcttggagaaaaaaagactgggtatattttcaatatgctttccttttaaggtccctcacctgtggaaagtaaagaatgtcactttctgacaggctcaggaacctcaagttatgtagggatctcaagaagatgggggaattcacccagttcatacaggtgaaattgctgttgcaaagattatgaatatgagagaagtccagcatggctgacttcatctcgtgtctggcctcaggctggctgcccttgctcactcttgggcataggccaagctagccatgggaggaatttagtttatagtttaactttgaagcacggatgataatagtctctccctaaaatgaaccccttccttgctcagggactgaaactacctttgtatgacaaatgaaagcccacaagattaagattatgagaggggcctgaattctgctaaaatgcaggtgtagctgactgataacaagtcattgtcccacagcttgcctttctataatctcttgcttctcaggagtcacatggccagaggtcctgagatttccagtcctgtgacccccacccagagatggacttagtgcatgaggaccattttccacacccctatgatttcatcctcaaacaatcagcagcaaccattccctagccccctgccttccaaattatccataaaaatcctagcctctgagttattagggagattgattaataatcccagtcctaccccttgggttgctctgatttaattaaaccttctctactgcaataccacggactcagtaaattggttttgtctgtgcaatgggcaagaagaacatgttgcatggttatacaggtactacaagcacagtctgatggcaaattattggttttgcttcctgcccttgatgtttctaaacatctagtccaaaattacttgtgaaaggtccagcaaagccaattttaaaagaggctatatggccaatcactattctttctacacattattgcaaataatcaggccacggctgggcacggtggctcatgcctgcaatcccagcactttgggaggctgaggcaggatcacctgaaatcaggagttcaagaccagcctaggcaacatgataaaaccctgtctctactaaaaatacaaaattagccaggcatggtggcatgcacctgtaatcccagctacttgggagactgagggaggagaatcacttgaacctgggaggcagagattgcagtgagctgagatcacaccactgcactccagcctgggcaatagagtgagactttgtctcaaataataataataataatcagaccaagtataatgaaattaaaatttattttgcaaataaattggtcctactacaatttatccttcatagaaatgtggaaactgaagataaaaaaaattaggtttcagaagaaaactatactacacctgttattagattctagccctaaacattgtttttgaggtttttattatttacctgcaatttggtctaaattctgaattatttcctgactacaagtatccaaggaataaatgggttttctttttctttatgatagttttagttggcttctaatgcaacaacaatttttattgtaatcctgtgtgcattctattcctactattcaaattattaatgttatagatctttcattgtagtacttctgaattaaccaaaatcacagtattctgaagatgattctacaaagcctgctgtttctacaaaggctgctgatgatttctacaaagcctgctgtagtgttgctgtggcctctgcttaaaaaagtagaaaacacattgatgcagcatgttcaccccaacctccctgcctaaaggctcagggaccatcttggaagaggaaggcgcgtgagattgtaagagccgaattagggggatggagtgtggagaataaggacacttcatcttggatgctcacctgccaaattgacttctgatgaaagccagctccagaaatgtgcctacagttactactttcacctaaaccctgcccttagtcaaatccttctcttcttctaagcaatcaacttcaattccttgtataacccacagtataaaagggcttttataccattctatcctattgcatgtaagccttgggtctgggaggtaacagtgtgggattccaccatctcatctccctgccacccaaacatgcctgctcttctttaagcaatattaaatgtttgtacttcagaaatttgatttgtcagcctcttcttcagactctcagcttctttggcctttgggagtaaatttgcataggcctgctcaaaacaggatgttctgggggtttgggggtgttgttttgttttgttttttgttttgtttagagacagggtctcactctgtcacccaggttggagtgcagtggtgcaatcatggcacactgcagcctcaaactcctaggctcaagcaatccccccaccttggcctcccaaagttctgggattacaagcataagccaccatgcccagccctggacttttctttaaagacatttacacagtgtaggaattactgtgggtgcactgctcaggtccccttctccaggatgctcattcctacctcatagatgattttcctgcagagatttgacctcagctgaagggcagtcacctggtccaggtggttgctattcacctccttcctgagaacagccaacagccagggacacgctagcacagagatataagagcgaccaaggtgaggccccttctgtgctgcggtgcatgctccagagcctccctgggatcagacttaagagggtctccagccagatctggtcttcgctgctttcctcgagctccccagcgcactcctgcaatgcatcttttttttttttttttttttttttgagacggagtttcactcttgttgcccaggctggaatgcaatggcgcaatctcagctcaccacaacctctgcctcgcgggttcaagtgattctccttcctcagcctcccaagtacctgggattacaggcatgcaccaccacgcccagctaattttgtatttttagtagaaacgggtttctccatgttggtcaggctggtttcgaactcctgacctcagttgatcctcctgcctcagccttccaaagtgctgggattacaggtgtgagccactgtgcctggcccaatgcacctcttgaatcacctcctcatgctttgcttttagagaacatgatccccaacatgtgattccagcaaagattctagaaagccaaccgtgacaatcacttctgggtttagatgacccccccccaccacaagatggcagtgagcacctcatcacagaggtgctgatggtctgcagcaccgcgccaggccagaacgtgccttttacagaagaaaataacccagtagctgactaggatggtgaggagggctggtgagcactgcggtagtgagagggacactagcatcactgagatgcaagtgatggtcatttttcataggtcaaagctcaaagcaggggacagttacagggcagggcttcatagcaccagtgtgatgaaagtatctgggagtggctaaggccagcactatgccatgggaagcaaggtgggcctgaggaggaggcagcagcgtcagcctgcaacaagtgggggctgccctgcagagacctaagagtcatgttatagagcacagtgtctgtaaggccaagaagtgtggacagccaagtgtgtcaattactagacatactcaagaggagcaggaagggcagggcatggtggctcatgcctgtaatcccagctacttgggagactgaggaaggagaatcgcttgaacccgggaggtgaaaattgcaatgagccgagatttcgccactgcactccagcctgtgtgatgggagcgggactccatctcaaaacaaaaaaagaaaaaggaaaaagaaaaaaagaaaaacctaggtatacttctcaagcaaataaaaataatcaaaaccaatatcatgcccgggcacaaatttcatatatataacagatttaaatatatgagggtgattatcctctcatatctccatttttttttgtttttccatttttttctttactaaaaaaagttaatgccaatgacacacaatttttttttttttttttttttttgagatggagtctcacttcttcgccctggctggagtgcaatggcgtgatctcgactcactgcaaagtctgcctcctgggttcaagcaattctcctgcctcagcctcccaagtagctgggaccacaggagtgagccaccacacccagctaatttttgtatttttaatagagacggggtttcaccatattggccaggctggtctcaaactcctgatctcaaataatctgcccgcctcggcctcccaagattctgggattataggcgttgagccactgcgccccgcctatgtatgattttttttttaattttattttcataagtttttggggaacaggtggtattttgttacatgagtaatttctttagttgtgatttgtgagattttggttcacccatcaactgagaagtatacactgaacccaatttgtggtcttttatccctcacccccttcccaccctttcccccggagtccctgaagtccattgtatcattcttatgcctttgcatcttcatagcttagctcttgaacccttactttctgtttgagggagaagacatatcatctacaagtagatactgtgtaaacattccattgcatgactatcccataacttatttattatttgtgtttggttatttgctgctatgtaacaaccccactcccaactaaatggtgtgacaattccatgattctgtggatcaaaaattctgaaaagtcaaacccaaggagttttgtctctgctccatgatgctaaagcctccgcaggggtgaggcgaatggctcagggtgactgaaaagctcagggttggaacagctggggatgaggcctctatgtataagatgattcttcactcacaggtctgaaactatggtggggacagccagaaggctcggctcagctgggacagtcacctgagccctacacatgacctctccaacatggtgatcctgaagcagttgggtttcttacacagcatcacacttttcttttttttttttttttttgagatgaaatattgctctatcacccaggctggagtgcagtggcacgatctcagctcactgcagcctccgcctaccaggttcaagcgattctcctgctccagcctcccaagttgctgggattgcaggcgcctgccaccaagcccagctaatttttgtatttttagtagagacggggtttcaccttgttggccaggctagtcttgacctcttgacctcaggcgatccgcctgcctcggcctcccaaagtgctgggattacaggcatgagccaccgcgcccggccaaagctcacacttcttatgattcagccttagatgtcacatcagttcattttccccacacttattagtgttagaagtcacaagcccacccatactcaggggactggcacacagaccccactctcaatggaaggggtgggacaccaccattcctgctgatgggcatttgggtaacttcctgtttgaagctattaagattgggctgctgtggccgggcgcagtggctcacgcctctaatcccagcactttgggaggccgaggcgggcggatcacgaagtcaggagatcgagaccatcctggctaacacggtgaaaccccgtctttactaaaaataccaaaaaaaaaaaaaattagctgggcatggtagcgggcgcctgtagtcccagctactcgggaggctgaggcaggagaacggcgtgaacccgggaggcggagcttgcagtgagccgagattgtgccactgcactccagcctaggcgacagagcaagactccgtctccaaaaaaaaaaaaaaagattgggctgctgtgactattctagtaggtgtctttggtgagcgcctacacgtgtttctctttttctctttagtatatgcccaggaggggaactgctggctcccagataccgtatgttcagggtcacacacacttccacagggttttccaaagcccttgtaccagcacgcactcccagcacctgtgtgactgctccagctgtcccacagtctcatcagttctattgctgatattttcattttagcttaagttatatttaataggaaaattaccgttgcctctgccccccgttcctgcctgtaggagtttctcgtagctgttgctacaggtggccacaaatctgtcacttaaacccacacaaattgatgtccttatggctttggagtcagaagtgtcaactgaaggtactagcagggctgtactgacctggtggcctcagggagcatctgtgctgcttctccaccttctagaggctgctgcatccctcgctccagccccttcctgacaccactcaccctcctacttctgttatcacatcctcaccttctctgtgttcagggctccctctgtctctctcttgcaagcacacttgggattccattgagggccacccacataacccaggagaatttctccacctcaatatccttaacaactgcagagcccttttgccataaaagttaccattcacgggttccagggattgtgacatgggtagctttaggagtgattattcctgcctgtctcccgctcaccagaacttggactttctctctcaacaggagccccctgtgtgggaatagcctgtctcaacgacgccctctataaggacctgcttcctcaaaggacctcatagtcgggtcctgcccctcagtgtccagtctgccttggctggaggggctgcaggggtgtgttggcgccacctggtggagacagggcatcacagcaggtgggagcccagtagaagcacaaccaaaacatgggtaatgtttaaaattttctggctaagcgctgtggctcacgcctgtaattccagcactttgggaggccgaggtgggtggatcacatgaggacgggagtttgagaccagcctggccaacatggtgaaacatcccctctactaaaaaatacagaaaaattagctggacatgtggcgcgctcctgtaatcccagctactcgagaggctgagacacgagaatcgcttcaaccccggaggggttgccgagatcgcgccactgcactccaggctgggcgatagagcgagactctgtctcaaaaaaaaaaaaagaagaggggaggcgaggggaggggaggggaaaagggggaatttgtttggagctgagacatccatcttctcctgacctcagatatttgcactcctggttatgaagccttcacacttggactgaatacaccaccagctttcccgatttccagcgtgcaaatggcagatcgtgagacttctcagcttccataattacatgagccaatttatatatataaattgggtcctccagaaaaacagaataaattatatatataattatacgcataacttaattaaattatacgtataacttagctatatatataatttattctgtttttctgaagaaccctactgacacaaatgttgagcatcttttcatgtgcttattggcttaataacttgtacatcttctttggggaaatgtctattcaagttctttgcccattttgtaactgaactattaatatttgtctttacattgttgagttgtaaaagttccttatatattctagatactagagccttatcagatatatttctgcaactattttctcctaatatataggttgtgtttttattttctttttctttttttttttattgagacagtctcactctgtcacccaggctggagtgcagtggcatgatcttggctcactgcagactcgacctgccaggctcaagcaattctcccacttcagcctcctgagtagctgaggttataggcacttgccatcgcacccagctaatttttgtattttttagtagagccgaggtttcgccatgttgcctaggttggtcttgaactccctgcctcaaagcgatctgtcagcctcagtctccctaagtgctggaagtacaggtgtgagccacagtgcccggccatctattttcaatagtgttttttgatgtacacaggtttggaattttgataatgttcaattcatccatttttttttttttttttttggttctttctactggaccaccactcttgagccctctaatccaacctccacgcggcagccagagggagctctctaaatgtaattactctttccctgctccacctgctcaaaacagtgtcacatttgtgatttaaaacagtatttctcaaacctaatttgcaaacaaagcaggtggaactcttcttgtatgcacagcatctgatttggttggtctggcatgggtctgggagtgagcacacctaccaagcggctgctggggtaacttgcgttttccactgatgatttcagcaatgtttccggtcccacatgctcctccagaaccttgtactcccccatgaaaaggtggagtccatttccccttcctttatttatttttttgagacgaagtttcactcttgttgcccaggctggagcgcaatggcgtgatctcagctcaccgcaacctccgcctcctgggttcaagcaatgcttctacctcagcctcccgagtagctgggattacaggtatgtgccaccacgcccagctaattttgtatttttagtagagacggggtttctccatgtcggccaggctggtctcaaactcccgacctcaggtgatccgcccgcctcagcctcccaaagtgctgggattacaggcgggagccaccgcgcccggctatttccccttcctttgaacctgatcaggacttgacgatggcatcaacatggtgagagtgaccctgcatggcttatgaggctgggttacacaaggcgatgttgcttctgactggctccctctcaggatacatgcccttggaacccatcctctaagctccttgggagcccaacttagcccatgtggagacaagacagggagagaaacagaggcacccccagccctcagccagcatcaaccgccagacaggagagcaaatgcgccaacaatgattccagctgaagcctcagacagcgtggagcagagatgagggatccctgcagattgcagatgcgtgagcaaaatgcatgctgtcactgttttgaaacaacaatgtctgggggctgtttgttatgcagcaatagacagctgtaacaatgctgttactgctgtattccatgaatgactgcactttgagtagcagggggctagatcactagataagccccatggcttctgtgtatgctatttttctacttttatatccttttcattcactttttttttttttttttttgagacagagtctcactctgttgcccaggtgggagtgcagtggtgcaatcttggcggactgcaacctccacttcccgggttcaagcaattattgtgcctcagcctcctgagtagctgcgactatagatgcacccccatgcctggctagtttccgtatttttagtagagacggggttttgccatgttggccaggctgatctcagactcctgacctcaggtgatccacccaccttggcctcccaaagtgctgggattacaggcgtgaaccactgcacccagcctcattcactttctttacttggctcatttttccttgttgcctcaattctcctctaagatcactttcctgacatttcagcctgggcctgttgccttctctgggtcccctccgcctcctgtgcctcccccatctcagccttgatccctcagattatacttcctctgtccccaccctgaccatcttggctgtccctggatagggatgggtatcttctcccactggtctgggagatctggaaggacaggcctggaaaagacttggtcactgctggaaggagctcagttagtgtggtgctgaggacagtacgggtgaggctggccccttcacccaaactcccactctcttccatagatttcacctctgtggcccaggccataggattagggcaactccccttaaacatcgagtccatcctccaagctgtccttttttttttttttttttttttttttgagacagagtctcgctctgttgcccaggctggagtgcagtggcgcgatctcggctcactgcaagctccacctccagggttcactccattctcctgcctcagcctcccgagtagctgggactacaggagcctgccaccacacccggctaattttttgtatttttagttgagacggggtttcaccgtgttagtcaggatggtctcgatctcctgacctcgtgatccgcccgcctcggcctcccaaagtgctgggattacaggcgtgagccatcgcgcccggcctcatgctgttcttgaatagtgagcacctgttacaagtcgccccaccagcctctcacttgtacccccctcatctctttctccccaagagacagaggaccctggcacttgtgaagcatgacccagaccctggggccatggcatccaacatcctcattccccatgacccctactgtctagatgtagctgccaagagacccccagactccccgggcctctgtctagagtgccaagacagagagagaatgccctgccgcttgcatgctttgtggggtgtccttcccccttccctggctgctaggcgtgacttcaacgttctccccaacccccaaacagcagcactgacaccagctgcagacctggctcaggttagctaatgaggaccaggctggggatggagcctgaacccctaaaccccagtcctgtaccccaccctaatcctggggtctccactggacaaaacgaagcagcttggtttttcgttgttattgtttttgagatagagtatctctctgtctcccaggttggagtgcagtggcgtgatctcagctcactgcagcctccgcctcccgggttcaagtgattcttgtgccgcagcctccccagtagctgggattacaggcgcgtgccaccacacccagctaatttttgtatttttagtagagacagggtttcaccatgttggccaggctggtctgaaactcctgacctcaagtgatttcccagcctcggcctcccaaagtggaagcggcttatttttaaggagaaaactcccgtggaaaggaatcagcacctcctctgtcaacatttcacttctctgaaaagactctcacttccaacagaaagtgctttgtaacacaacaatgaggctgggcgaggtggctcatgcctgtaatcccagcactttgggaagctgaggcgagtggatcacgaggtcagaagttcgagaccagcctgaccaatatggtgaaaccccgtctctactaaaaatacaaaaattagttccgtgtggtggcgtgagcctgtaatcccagctactcaggaggctgaggcaggagaatggcttgaacccaggagatggaggttgcaatgagccgagatcacgccactgcactccagcctgggcaacagagtgagactccgtctcaaaaaaaaaaaaaaaagaatgagaacatatggacacagggaggggaacaatacacacaaacaaaatttagaaacaggtgaaaataattttagtaatatttttactaatactgatatgctcaaaatattattatttcaataagtaatctaaaaattattgagatgtcttatgttcttttcatcatactaagcctttaatatttggtgtgtattttacactcacagcacatctcaatttgcagtccccatgtttcaagcactaaataaccatgtgtgtccggtggctaccatactggacagcgttgatctgaaatcgcatctgtatgcatcaccagcatatttgcagagatccccatctcagcagcacacctgaggctcatctgcgaaagcacctgcaacttctctacaacctcccacatcacctccaaacacatcctcatgtcatctgcaaacacacccatagctcacaggccaatgcctaaatatcattgcaggcaccttcagagaaagcacttactaaaggggtatacttgattccacatctgctttgacctgcaaatctcccttctcctttacatacatttgcatctcatttgtatgtcaatctaaatccactggcagagcctcagatcatcatctcaaagtcaggtggatgtggggctgggcaggcctccaggtgttcctcctcctgcttcctctggggctcttgatcctcctcctcttccttgctgctctcctcctcctcctccaatatggtgaccagttcctcccgcagcgcccccatctccagccccaggctgcacagctgtcccagcagctggacatccactcggcgcaggttcccctgccagtaggaaggggacgtcacagggatgccaccccagagagcaaggggtctctccaggacctgggtgagagcaggtcccaactcatgtcctggccacagcgcctgggcagggtcctcactgtgcccatggaccctaactgccttcctgcttctcagagtgtctcttgatctctaactcttctctttgtctctccatttcattgtccctgacttctctctctctgtctcctccctctcttatctatatctgtccctgtttccctttgtctctgtccccatttattttttgtctttccatgcccctgtctctctgtctttatgtgttgccatttctctgcccctgcctttggctctctttctctcgcttgccctctctctgccctccccaactttctcaaattcagtctgtctctccatctctgttcctgctctccgtctctgcttcccacctctgtccctctcttttgggatctccctgtccccacctctgttcccgtccctcactctatgtctgtctctcggtgtctgtacatgcctctcatgtctctgcttctatctctcagattctgtttttcgatctctggccttctctatttttgttcatttccattcattctcatttcctctctttctctttcccttccaaacccctcactcaccagctcctccctgatccacagcagactatcgcaggcacctccagtgtctgcccctgcagtcctgagggtctgaccagggatttccactggggagacctccctcagggcctgggggggtgggcccagccccggaggcaccagtccagcctgattcagctgcctccacagttccatcgtctctgagctatggctgcaaggagcaggaagtagcaaggtccagggtggcctggtcccctggggagctgtgtgcgtggtggagagtaaagggcagagggagtgggatgggggttcctgggaaaggtatcccaaagtccactcttcagagagaatcagctggccttgtgcttttctttttccttctgaagtctaacctcaactctgctcacagggttcaaacatagcctcttgcagaggtctaactccacccttccctgcctgtctcaggcctgacccctcaggggcgctcagtgtctgtagatgcctggcaccctctgtccttccacctgccccccaccaccacttctccagcctctcctcagcctccatttgacctctggcttgcccatagcttggtccttgcttgtcctcttggcacgggtcatcctagggctttcccaccagtgtgcctttgggggcaggaatggctcccaggggcaccaagacagcaatcccttagctggagtgcctgtgtccaggctgctggcctagggccaagcagccaattctgctgaccctggacttgcctatgggtatattatccctgttgagggtgagggcttctgctgtggaaaagtctgggaagcactgcaggcctctctcggccttggacccttccttcagacccaaggtgcatatatatacatatatataatggtagatcacgaggtcaggagatcaagaccatcctggccacatggtgaaaccccgtctctagtaaaacacaaaaaattagccgggcatgctgccgcgtgcctgtagtcccagctactcgggaggctgaggcaggagaatggtgtgaacccaggaggtggaggttgcagtaagccaagatcacgccactgcattccagcctggcgacagagcaagactccatcttaaaataaacaaatgaacaatatatatatatatgtattttgttttttgagacagagtctcgctctgtcatccaggctggactgcagtggtgcaatcttggctcactgcaacctccgcctcccgggttcaagcgattcccctgcctcagcctcctgaacagctggggttacaggtgcacgccaccacacctggcgaatttttgtatgtttagtggagacggggtttcaccatgttagccaggctggtctcaaacccctgacctcaggtgatctgcccacctcggcctcccaaagtgctgggattacaggcgtgagccaacgcgcccagccccaagtcccttttaccatagaaagtaacatagtcacagtgcccagggattcacaggtatggggagagggttcgttattcagctgccacacccaccttcctaaacctgctgcccttccagtttcctcacgtgcacagccacgcccgtctgcttttagtttctcaatctgttggcttaaccttcaaaacaggcccaggatttgagcacttctcaccattccctctgccccatccccattcatctcttgcctagactgctacagcagcctcttttactggtcccctgcatccacccttgccctctaaggcaagggtccccagtccctgggccaaggaccagtaccagcccctcgcctgctaggaactgggccgcacagcaagagatgagcagcgggtaagtgagcattaccgcctgagctccgcctcctgtcacatcagcagtggcattagattctcataggaggcaaaccctattgtgaactgtgcgtgcgggggatctaggttgcctgctccttatgagaatctaatgcctgatgatctcaggtggaacagtttcatcccaaaaccatccccaccccacccccgacccccagtctatggaaaaattgtcctccacgaaaccagtccctggtaacaaaacggttagggaccgctgctctaaggtacattctccacctggcagaaataatctttacaaaatgtaaatccgattttgacactcccttcttcccactgtgaatagaataaaaccctaccaggcctgcaccgtcagcccctgcccacctctcaacccagtctcctatctctgtctgcaagctggttcccacctcaaggcctctctgctctagaggctacctctccctgcagcgcttttcccctagatctttgaatggctctttccttatcattcacttctacttcaatgtcacctcttcagagaggcctttgctgatggccctacacccagtcacttttttttatctgcttctcatcaaaattgccttgctgattcctttgtttcttattcatcctctcccacatccatcctctcccagcccagaatgttgacttcctgagagagggactgggtctgtcctgctcaccatggtaacctcggcatctagaacagtgcctgccatcacgtggtaggtgctcagtaaatattcttggaactaatgaatgaataattctatccacaagacttcacaatggctcttcatgctgcgatctagctttcaactccaaactggtcttgagatctcacctcagtctctaaccttgacatctaacctcttcacccactctcttacctgaccctaatttttaaaaatgacgtggtcagcttttcagccccctcattccctgtttttaggaggtagtgagtggaagctggaagaataagaaagcttggggagactgcaattgcagtcaggaaagaaaggtactctgccgggaagaacaccccatcttctcctagggaaagattgtggagtcctggggtttgttttgtttttcaattttttgttttaagagacagcgtctcgctctgtcacccaggctggagtgcagtggcgcaatcacagctcactgcaacttcgacctccccggctcaagtgatccccccgcctcagcctcgtgagtagctgggaccacaggcgtgcaccaccacgcccggctaacattttattttttgtggatataaggttgccctatttctttgtggagataaaggctcccctatgttgcccaggctggtctcgaactcctggcttcaagcgatgctttcgcctcggcctccacaaagtgctgggttcacaggtgcgtgagcccgacctgtgtctcgttttgaagctcagggagagggcgctgtgagcaatccctaaaccctttaagagtaaaaagtgcgtgcacctttaagaggacggttagaaaacgcggggcgtggccacaggagaataagttcgcgctgaaccaggagcgtgggataagaccggccccttccggttacgaaaccttagcaagatggcggctccctgggcgtccctgcgcctggtcgcccccatgtggaatgggcgtatcaggggcatccatcgcctgggtgcggcagtggccccagagggcaatcagaagaagaaaaggacaatactccagttcctgaccaactatttctacgatgtggaggctctgagggattacttgctccaaagggagatgtacaaggtgcatgagaaaaatcgatcttacacctggctggagaagcaacatggtccatacggcgcaggtgcctttttcatcctgaagcagggaggcgcagtcaagtttcgagacaaggagtggatcaggccagataagtatggccatttctctcaggagttctggaatttctgtgaagtgcctgtcgaagctgtggatgccggtgactgtgacatcaactacgagggcctggataacctcctccgcctgaaggagctccagtccttgtcgctgcagcgctgctgccacgtggacgactggtgtctcagccgcctctacccactggccgactcgttgcaggagctctcgctggccggttgcccccgcatctccgaacggggcctcgcctgcctccaccacctccagtgagacctcagctcaggctgggccacatgcccaggcacctctcccacctaacccagatgcaggagaggaagtggggaggggcaatgttaggcagttctcatatccccctgcatccatcacaaacctagagtatttatggtagatgagcagtcacagtgagtctctggaagaattaaatgactcctggttttcttcctttttgttttagtcaaaactgtgtgatatcgacgctgttgcagaacagcaggagctggagttgcatatttgcaattaacacagtgggcttcatgtgcctggacagctataaagattttattttaggaagctaaggttgaaatttggggccagtacctccctatacacacacacatgcacgcatgcacgcacgcacacacacacacgcacgcacacacactgtcctgtaaggttgaaatttggggccagtacctccctacacacacacacacacacacacacacacacacacgcacgctgtcctgtacctccctacacacacgcacacgctgtctgtacctccctacacacacacacacacacacacacgctgtccttatactggcttatctccctatacacacacacacacacacacacacgctgtcctgtac

SEQ ID NO: 735292 - DNA, 188548 bp, Homo sapiens
ctccaaggctgagggatgaggagacctgctgaggacccagggccttatctttccatcccactccataggtcccagtattgactgatgctgtcttcacctcctagcctcacttttaaccttctggcacccgcccaccactgtccagttcactattgaagccctgccgtccagtgctgcagagggaaaggatgttcttctactggcctgcaatatttcagaaactattcaagcctattattggcacaaggggaaaacggcagaagggagccctctcattgctggttatataacagacattcaagcaaatatcccaggggccgcatacagtggtcgagagacagtataccccaatggatccctgctgttccaaaacatcaccctggaggacgcaggatcctacaccctacgaaccataaatgccagttacgactctgaccaagcaactggccagctccacgtacaccgtgagtgattcccccatacctctgggtgctggcggtcagttctgcttcacacacatgagattgtcaggcctgggctgtgcctgcatccccctctgcattttgtcccgtgttgagatttgggcatttagtgcaggacacacacatggtaggtaaacttcaacagatcagaattcctttcctgcatccaggccctgcagacactgatggcgggggcgggggggcctcagcagggggaggtcagtctcagccaagcaccccatgccctccccatgaacctgaccctgagaaagaccctggagaactgggtcagggcctggcctgagggcgtcctgggaacctcacaaaagcccagcctcaggactcctgactccgtgtgaccccgggaagcctgtgtcagggctggggtgtggtctcctgggcagggcttactgggagcaaggatttaccagatgtctgcgggctgtggttcctgaagcttctcatcagtgagggctcagctcccagagtctcatctagacaaggacagagcctaccactttccctgggactcagcctggagagggcagggggacaggattactagggcattggccccctgaatgaggagcttaagagatgcccttgggcagtcagtggcccaggggtaggaacagaggggagaaaatgttcctggcagcttcttgtccaccggggatcatgcccaggggtgctctcccatggaggcaaataacagatgctgttgatgtgaacacctcctctgtgccaagcttcatgtcagatcctgtgaataatttaaagttcattcacagacaaagtggcaagcctcagaccattttccatttacatattgtatggaggggaaactgaggcacagagagatacagacaccggccacggtgggcagatcgcagctggcagagtcacatgagggctgtctgcagctgctgccacgtcctctccttcatccctggtgccttactaggtgtctgtggaccttagaacagccactggttcggatgttttcttcttaggtgtctacagctcggagggggagattctggtctggagagttatgagtaaatacagaattaatcagttttttcttaactaaatcacctgcctcaacaatcagtcagtgctggggaagttcaggcctcctcgctcaggtccacaccccgcatctctggacatgaaatggcttcgtgtgttttctgatgtgtgggtatcattccaacaggaggataaaggggaggactttgctttctctccccattcacaccctgcaccagccagggcccagtgtgagacacatactccgtagttctctcatgaaggagggagggaatgaatgaaggaatgatctataacctcttcagagacagagacctggatacaagatcctaggaggttctgggcccaacgtgagacacacactctgtagttctcttatgaaggagggagggattgaatgtaggaatgatctataacctcttcagagacagagatgtggatacaagatcctaggaggttctggccacacctgttttctgtccctctagagcctaagacccatgtctcattcatctggcccgtttctcctaaatctgcccctgggagctgagtctcatctgaccctggggctgcagggctgtgggaaggttttcaggggagggatcaggcttgcgggtagtcccacacgtttgccttacaccctggagctctacctggttctcactatgaatatcccataataatcccccctatcctttctggggagtagaaaaaaagtaaatatttaaaaatatgccagagcatctgttcttcttagcaagttcagatagttattagttagcaggaataaatcgttattttaccagagcctcacctgctgggggtttatgggagcctaactgactgaggggggtgggaaatatccaactccagccccctctagccatcatgtcccacctaaaggagagaaaaaactgagaggcacttgtgacattcacagcccagggcacagactctatccaggaccacagaacccctccctccccccactcaccaccgcatcactgaacgcctgctcacccaagttcctgttgcccagtacatcatgtcctggctttcaacaaaaactacaagacagactagaggcaaaaaaaaaaaaaaaaaaaatgcagttcgaaagacagaacaagcatcagaaccagatgcagatgtggcagggatgtggcagggatgttgaaattatcagaccaggaatttaaaacaactctggggccaggagcggtggctcatgcctgtaatcccagcatttgggaggccgaggcaggcagatcacctgaggtcaggagttcgataccagcctggccaacatggcaaaaccccgtctctactaaaaatacaaaaaattaggcaggcatggtggtgggtgcctgtaatcctagatactcggaaggctgaggcaggagaattgcttgaacctgtgaagcggaggttgcggtgagcctagattgtgccactgcactccagcctgggcaacagagcgagattccatctctaaaacaaacaaacaaaaaacaatactggctaatatgctaaaggctgcaatggaaagcatagacaatgtgcagaacagacggatgctgtgagcagagagatggacaggctaagaaagaataacaacagctactatatctatctatctatctatctatctatctatctatctatctatctatctatatatatgtatatatatgctagagatcaaactcactgtaacacctggatctcagagtggttgtgaggatgtttattaggagattaaagagattaaagcagagttatacacagggcgagagctcaactgatgctatcaactagtattcttatttttttgatgttgttattggcaataaaatcaggaacaatgcagtaaaaatttggttttatcatgtacgagttctgtgaccttccttgacttactgaggtactgtaagtctcagattctaactctgcagatggcggtgatgcccctctccctcaaggtgatgtgaggatgagatgagctgtaggtaggttggtgcccactgtgcctggcacatggaaggcccctgaaaatagtcaatgaacatcatccccgctcatcagcatggagttgacagtgagggctcgctctctgtgacaatcatggaatggaaaagaagaaacaagaggaagactgggcgcagtggctcatgcctgtaatcccagcactttgggaggccgaggcgggcagatcatctgaggtcaggagttcaagaccagcctggacaacatggcgaaatttcatctctactaaaaatataaaaattagcctggcatggtggcacaaacctgtaatcccagctacttgggaggctgaggcaagagaatcgcttgaacttgggagatggaggttgcagtgagccgagattgcgtcagtgcactccagtctgggtgacagagcaagactccatccaaaaaaaaaagaaaaagaaaaaagcaacagagggaagaggtgtgacatgagaggaagaagggatttaaaggtacaggagcagggcgaggtgcaagcacctgtgggagaatgtaggagttggtacatcccagtgtgtcaagtctgagacacagaaaatggtgcaaccgtggagagcaagggagtcagctatgaggacagcccaacagaccacactcaggctctggagcatttccttcctccctgactatgcccctgccctgcaatgccccttatggtttcccttggaacaaacttgggccttgtcccctttgccttcccctttctgcagaaaacaacgtcccaggccttcctgtgggggccgtcgctggcatcgtgactggggtcctggttggggtggctctggtggccgccctggtgtgttttctgcttctctccaggactggaaggtaccgcagcttttccccagcctcctcccacccctaggctgaccccagtcagggaggagggagaccccgccctgtattcagggccaggctttccgcatcctcccaaggaatccttccctctcattccatggctcctcccttgccagctgctgatcctaggctgcctcttcctttatgaatgtggcacagttaaggttgcacccctgagtgctgtcctagttccctaacacagcaaagccacagctgcctggagggaggaagggagggagggagggagggagataagacgggagtgctcagaacctggtaccttctgctgttcattgaatttacccacccagtgaggagggatttgcaggcttgagatccatggtgggggtcctgggcatggtcacgcagtggggagtggcaaagcctggacaggctgggtagggtcagcaccccatcgtgattgatgtccctgaggtgtgagatgggagaacctggacctcaggacctgctgtcctttatgtctcttgccaaggggtggagagagagaggacaaggccattgccccatttcagcatctccaggcctgaaaggagggtctggccatggcagggatactgagttctgggagaatatgatacatgctccttgcctccccatgcccccagctcccccagtgtcctgcacacacagccggccctgctttccctctggggccttgacccttcctctcaggcaaacgcaggtggtctgattccctccctgagtcctcagtccctttcctgggtccctgggtcaatgttctcctcacccggcatctgcctgggggggtccttcctctctggccaggacagacgtgactgcttaaggcctatcctcagctccccgtcctcggccgctcctaccacgaaactgatggagacaggaggccttcactccagtccttgaaaatggagtcccttccttgtcctttattctgcccctaaacctgtgatttctccctgcaccctcatgaataatcctgacctttcctagggccagcatccagcgtgacctcagggagcagccgcccccagcctccacccctggtgagtgtcccttcagcccaggtgtgggagcccctaggcctgccctacggtgtccactcctgccagtcaccccctgggggcctctgaccctttctttggggctgcaaggaggatgtcaggaaacatgacacaggggaccccgactgtcttgttcagactgatctgtgggctctgggtcgtgggtcacctcctcgacctcagctgctcaggtctcccctgggaagaggctccctctccctgattctctgggagctgaggacccctacactctcctgcaggaggggcccaggctctcctcccaccctgctgctcactcctgtctctgtccccaggccatggtccctctcacagatccaccttctcggtaagcctgttccctccccagcccttttctactggggtcccaacagtgcaggctcagggcagggggaccatcaaccccacagcacagcactgacccacctttccccagaacagtcaggtcaaagtgagtgcctccagccaggatccgggcctctctacagggccaggaccacccacgccatgtgctgacccctccccgggaccctctacacctgaggagaaccctggagtccagcaggtgcagaatggacactgggaccatcagtcagaggcccacattaacaagggtgcggggtgggcccagccaggacaggggtcagggtgttgtgtccacactgggaggctgagctcaggggcagagctggtcaatcctgaggggaaatgagtggaagtggaggcagggaagtaagtcctggccgatcagagacaggaaccttccaggctgggcttccgtgaccctccctccctgtcccctgacatctcctctctcccctgcccaggcccctctacccagccccagaacagccactcccatctatgaggtgagtgtgggccatggatgttctggtcccgcaggctccaggggacccaggatctgcccccaccagcacctggctgagctcagattcaggaaaatgcagtgaaaatgagaacaggtggtggtgagcagaggagggaggggcctgggaacagggaccccctgagcacagccaggttcagccccagagaagccctgggtgggcccagagcctgggagatgccagacactgttctgagaaggctacaggggttgaggcctcttctctgtttttacaggaattgctatactctgatgcaaacatttactgccagatcgaccacaaagcagatgtggtctcttaggttcctctgggagctgctcttgtgggttgatggagcgtccccaaagctcccagccctggggacggggaaggacatggagcctgagccagagaaccagctctgagtcctgaggagacacaggcctggggacagggagggatgggagtccctgctgaatatctggagaccctgacaggttgccctgggctctgggtgggccgggacaaaggcctctcatcaccacaggaagcgggggcttgcaaggaaagtgaatgggcctgtggcccacccggggtcaccaggaaaggatctgaataaagaggacccttcctctcattggctctttttctgctcacgggaacttagcagaaactcacctgaaactccgtgtccattctctcccgggtcacacagggaaaatatctccaccttgtctcaaccacagtctctcttccctgggaggcagaaataggggttgggagtcaggctggggtgggccctacacaggaaagggcaagattcacatgagccctgcccagccagccgagcgctcagctgtcctcacactaccccagggaccaaggccatgcacagccccagcctgggtccctctgtgaatgcatgtggggtctcaggagcacagaagatggggccatctgatgtccacaaaaggtgagcaatgcgggagcaaccatgggtggtataggttgcggctgtggcccctacgcagcctccagtgtcctgacccctgctgccctcttcacccaggccctggaggcccagtctatcactgtcctccacaaatgaacttacctgtccccaaatccaggatcctgtgtgcttatacctggccactaggttctcctctgtcccagtggctactgctcaggacatctttatccctggtggggcacagagaggggctgtcagagcaaccaagattaatacagacgcataattcagtccttgagcactacccaggactctggcccctcattgctcatcagttcccactttaccccctggcatggatctcactgagcaagccaactctttacacaggagcatccaggtcagaggtgcaggactcccccatctaaagctcatgcaggctcccatggcgatgggacaacctgtctgctcctctccctggcccacagccctatctcgcctgcagctcctccacacacctgggacagcagttctcagcccttccctgagggcccctggaagggtgatgatctcatataggttcacttgaaccaggtgccaccttcccacaagtgagctggtgcctgcactaaagcacagagccacagttcccaagagtgttctgccactgccacaggtcccaagagtgttctgccactgccacaggttgttcgtcctgagatgagaggtaagaaaacaacccgcaatgggttgttttatatcgggatttgcatcaggatttagctctaaatgacccctgatcccacctgcacacagcgtcagatgagacaaggtgaggcctctttagttttctgttgaggctgtgacaaattaccacaagcttagtgacatagaaacctgaaccaaagtgcccacatggctgtgttctttctagaggctccagggaagagtgcatttcctctccttttccacctcctagaggcctcctgcaaccttggctgtgtcctctttctccatcttcaaagccagcagcacagcatcttgaaactattctgtgccctgcttccatccccacatctccacctcctcccacctccctctctcacttaaaaggaaggagccttgtggttattttggacgcacctgggataaaccacaacaacctccccatctcatgatccttcctttaatctgtaaagtgtcctttaccacgtgacatgtccacagatctggggatgaggatgtacacatctttgagaggcccttgttctgtccatcactcctctcaaggccatcttctcatcatcgttcactacaaactacacatgggcacctggatgggttcatcatgactgtggcgtcagttcctgcattaacatccccagcaccctccagatcctgagagagggagacggagggctctccatgcccctagtacctctccaccttcttcttggtgacatgcttagttgctaagaataacagaaagcggaggtgactgaaagatcacaactcaccggcccttcaatagttcgtggacatcagcaccacggacagtgactcagtgaggctaatttccaggtggcagcagggagcatgcagataggagggaactgcaggaaaagctgcccattctattctatatgagaaagagtgtaagaaagaggaagctattacagggataatgctattcttctctaatccataaattgcgaaacctttgcatgtctggatatcatggtttttagcacatctgctgccactccctgcagggctgattgctgcatccaggatgtggtctcttggggggctcacagcctgctttggcctcatggtgagtctccctgcccctgacactcaggccactgtctctgcctacaacatggtgggaaccttccatgattaacgtctgattctctgtgcctgacctttgaagcacatccatcactcagcctggagcatccgctgagctcagcatcctgctcctccatccccagctgagcccttgaggagatgcttgagaggatctcctgggctcctctgtgagctcctccaggctgagccttgtgcttggtgtcagaggcctttgccatctgcttgttctttccataggcaaataatcctcctcagggacaagtggggcctgaagatctgtctgaatatctatctatctatctatctatctatctatctatctatctatctatcatctatctatatgtatgtatatatgagaatgctttattaggcaaaactgcatactatgaacatgctttaaaatgcaacaggatgagatgtgaagacataaagaacaagtgtgtagtgacacatggctatcagaacacactgaagaatccacaccgcggccgagagcagtggctcacgcctgtagtcccagcacttttggaggctgaggcaggcagatcacttgaggacaggtgttcgagaccagcctgaccaacatggtgaaaccccatctctactaaaaatacaaaaaatttagccgggcctggtggctcatgcctgtagtcctggctgttcgggaggctgaggcaggagaattgcctgaacctgggagacacaagttgcagtgagctgagatcgcaccactgcactccagcctgggagatagagtgaggctccatctaaaaacaaaacaaaacaaaaagaatccacactgcttccccgcttcactttacccagaaaaggaatgttctaggccacttcctcttcagcacacatccccagggaactaaaataggttcacagtcacccccatcttcctcattcccatcacctcttacccacagaggcatctctggtcctacagatccagccctgccttcaagaggcacaggtccaacccatccagtgtccctgctagtcacacacagcactcagggtacaatggagggcttctgtgctttggatgggaacaaaccccacctcacattcccacacctgagaagccaccagggtcctctctgtcctgtcctcacactcaatgtctgtcctgggtcacccttgtcatctctcctggaaataggcatggctcctgacaggtaggattgaggctttgtcttttcaggagtccctcccactctgagcacatgaaactgctcagctccatgcaaccctctctcaccaggggccttgttctctgggtccctgaatacctgggtccatgccatgtacattttaagaaaaatgacagtgactctcaccctgacatcctcacccaaggcacgtgtctgacaagaatcaccaggtgagatacctgtggctccacacacctgaggcttcactgcgcaggggtgtcctcatccctctcctcccacccctagggacagtaagcaccacaggctgccttggaccaccagctccccctcccagacacagcctcagatctatactgacatgctacatggagaggctctgatgaacagcaggtattaggaaatcccaccgaaccaggtgccacttgcggccccactcctcctcatatctgtgactgggacagacacacataacacacctctgttcaccgcccagcccccaaggtcaatcacagtctgcttctcccctagatccactgctccccatgtcttccgtcctcagctgcatcctgggtggcctccttgctgttcttgtaccccagaggcaggttccaacctttgtgatgttgcctgcaatgcccaaactttcccttccccttccccttcccttttcccctcccccttcccctccccttcccctccccacccctatcccttcgtcttcccttgtcttcccttcccttccctataaagccaaacatacccatccacctaccttgtggtcaaagtcatcagcctcctgctccactcagtgttctctgaccctgcatatggaggtggtggcccctcctagaacacccaccactcactgtcagccttgcgtggtaatcacagattttgcaggggttacctgtgttcaggtgtgtcacctgtggaaccagaactcttggaaggactggcagagggagctgcttaggatatctcagggctcctggcatctggtctaccacagggctattaacaacagcacttagggacaaggtggaggatggacggttaagagggtaaatatggatgatgtgtgggcaaagaataggacacaggaacacatgcagtactcaaataattatgccaagaaaggtgaggacatggagatggacattcccatatacttctgatgggactgcagtttagtccctacagcaacattgacctcatcatgtttaacgcgcacacgctctgaccactatcctacttctgaaggcctccctgtgctgtgagctctgagaaggccaagcttgcctgttctgtctctgctaaagccagagaccagccaatagcccagcacagggtacttcataaatacatgttgaaggaatgagctccaggaacagtactccacatggtagagatgtgtgtatgaggatgttcactgcagaaggtcatgtcaatgtgacaagtgacgagcagcctcaaatccagcaacaggggtgtgggtaaaagatcatagtgtagccatgcaatggaaccaatgaaaaaaccacaattagagcaaatccacatgtattaataaaggaggtgccctccatacatgctgcacctaacagaatgttgccaaataagaatgaaaaatgatgatatttgggctgtaaaaactagaagtcagctaaataagaatgcatcgaaagtatttgtgaatgcttacaattttataatgccttggcatccgttttggatggaagttggactttctcataccagaagcagggctcagtcacctttgaaatagtttccagttctccacctccttccagttcctcagtgtgattgatcagatatctgatttatacaactgcctcctggtgacctcctccctatgggacttccggatacagcccgtatgactgccccactgaccccacaccctgcctgctgcagtgaccacctctaattacctggatctcatgtctgcttgcattaaatccaccaattaaaactccctgaggacaatctgtttgaataatattctgtaccctaataaaggccttgacccatgggttccccctctgtcctccccatactgcccctgacctctgtgtgtgtgtgtgggtgtgggtgtatgtgtgtgtgtgtgtgtgtgtcctccagacagggcctgtatcccccaggacctgtaagtaataaatctttattttcatcttatgtctctcgcaatcattggcaagagctctgcatcttaaagatcgcaaatttaagaaattggtgtagtcggcacaatagagtacctcttctgtttagcacaagatatctcggagctgctgaggcttttaacatcctcgccggtgtggctgcctcactggtgaggccgttctgttcagtgcaattcagttgctccactgtgtgctgctgtgttgctgctgtagagtgctgccatgttgttctccccaaattgttaccgagtaggaacctgtaatgtgctcccaaggtggtctaccccatgagaagggggattctccatctagggcaagggctaggtgtgtttctggaatcctaatagggaaggcatccacagagggtgaactccactcctccttagagtgaggagtgacatttcccatttattttccccatggaggtgccatgtattgactttttctttcactgtcccaaggttgagccaaggtgagctatggagaccagggcaagataccatttctgttagcaaagcaaatgggtgacaacgtgtggagaagctgtggttctcctgatggatatagcagagtgccatttagtaaaatcttgtcaggaggctgcccctggttagaccggcagtgtctgtagtcactaaggtggatgcgaattttaggccctgggccatggataatccctgcagacacagccgtggcttcatgtgatggggcaatcccgggctagtggctcccttgtttctgcatttcttgctgtggttgcacaatcaacacctcaggggttgattgggtcaccttggaaagagaaacagctgcctaggaggctggtgcacatggaggccaccctcaattttattctgctaacaagttgtaagattaaaacaacagggggctttgggtaccatcaggaacttgtcaagtaaacatccaaagacagaaagaagaaaaagaaaaagacattaaccgtctagaaatacaagccattttaaagattttgcttaaaagatgcgcttgggctgggagcggtggctcacacctgtaatcccagcactttgggaggccaaggtgggtggatcgactgaggtcaggagttcaagaccagcctgaccaacatggtgaaacctcgcctctactaaaaatacaaaaaattagcagggcatggtggcaggtgcctgtaatcccagctacttgggtggagaatcgcttgaacccgggaggcagagacggcagtgagccaagatcgcaccactgtactccagtctgggcgacagagtgagacttcatctcaaaaaaaaaaaaaaaaaaaaaaaaaagacgggcttgtttcgtcgttgtggagtcatcccagagagaggctactccctagagtcactgaccacctttcctcctccatcttttcctcttatcattctagagacagaaaacaagaatctcagctttaggtggctaacctcaccccccaagaaaagaaactaccactttgattgactacaaatccaagaaaaataaaagagaaactttaaaaagtactgagcaaaccacaggtctagcaaacataatgctagccctaggttacttattcatttacaacaaacccctagatataggaggaaaaaataaaaggtaattaaatatatacacatacaatattttaatataaatatataataaatagttaaattatgtatgtataatatgtaactaaatcaaagtaaaatttcatactttgattctattggaaattcaaaattcatttattaacttatatattaaggaatttatgtaaaaaaagatttttaaaagggcaccaatttgcttttgtgtctctacaacataggatctaatttaactttacatttgctaaatacactaattgacaaatattcatggatttaatcaatactggggctcaaattgtagccacacgtgggaatcccataaatttaaacactctgtccctattatcttgagaagaaaactaaatataaaattgaaaaaaacaggtatgtctcaatttacctgtaactttgcctaaatttcccggagtcatatacccattgctgtaaaacattctctattggacataggtgctctgagacaataaataaaatagaagtgtttttggtacttagacattggcttgacaaaatgggatcccatgaaacctcagttaagatagtgaatacggcccaatgtgagttgaaatggggcctttaaggattaaaacttattacatgaaacctagtaagtaatggggtgattatccatactgcttctccatttcatagcccaattttgacagttgtcaaatctggaaaaaacaaacaaacaaacaaaaaaacccctgggaatctgttgcctcacagagacacaaagtagacatcaaaattgtatatctcagttccagttccaaaatggtggcatagaagcaagctggctttactccttcacacagaaaaccaaaaacaaatatacagcaccaaaattattaccagatatattccagaactcaaatatgaaaatgaaacagttttcagagccacagagaagtgaaaaaaactcccgacagatgacaaaagaatcagatttccccatctgtaatgtccctccctgccccattctgcctggtaccaggtgtgtggaaaattttaccccaactcatggtttctacactgggaaatgtaagatcaatgcgggcaaccagtttctgcacaatcctgggttccctgtccctgccttaacccacaagaagcattgtgagtgcccgaagggagaaatttccctgaggacagtcaaagagtggggaggcaggactaccatctccttccctggaaactctgctgtgtaactcagccaagggagacatgaaatcagactggtgtttcagcagctccatgttgtagtaggtttgtttcacaggtatcctgggcatggacatctagccagctttcccacactgccaggatatcccctttgggacctccctcagttaggaagggcacactctgatcatttactagggccaaggtaaaccctaaaggtaacttagagatgaaaaggaggtagtgacctagcagtaaagaactctaagaaaatctatccaataaaaatcaaaacaagccagacaaagactaaaataaataatgaatccttcaatgtaaagacctggacttacatccacaagaaacagtaagcaggtaaccatgatctccccacatggacaaagtgaggaacaagtgactgatcctgatgagatggtgatgtgtgagctctctaatcaagaattcaaaactgcagttttaaggaaactcaatgatcttcaagaaaacatggaaaagcagttcagaaatttatcagagaaatttaacgaagggattgaaataatttaaagaaaacaaacaggaatcttggaattgagaaatatatttgctgaacaggaaaatttattagagtctctcaacagcagaatggatcagaggaaagaatcaacccaaataagactcccccaaggcataaaataatcgaattctcaaaagtcaagggcaaagagaagattttaaaacagaaagagaaaagaagcaaatggcataaagaagctccaattctgtggcaacagattttcagtggaaatcatacagaccaggagggagtgacatgacattctcaaaatgctgaaaaaatattgacatttgagaatactttatccagtgaagttatccttcaatataaaggagagagaaagtttcctagacaaacaaaagctgagataattcacaccatcagactagtcttcctgtaaatactaaagggtaaatactaaatacttcaatgtgaaagtaaaaaaaaaaacactaacatgcaaaacaaccacaacaacaataacaacatttgaaggtataaaatccactggtgaaattaagtacgtagacaaacccagaatactcaaatagtaattgtggaaagtaatccaatcataactctagcatgagtctcaaaatataaatctatcaaaaacaataatacattttaggaggccaaggttggcagattccttgaggtcaagagttcaagaccagcctggtcaaaatggtgaaaccccatctctaccaaaaaatacaaaaatttgcagggtatggtagcacatgcctgtcgtttcagctatttgggaggctgaggcaggagaattgcttgaacccaggaggtggaggttgcagtgagctgagattgcactactgcactccagcctgggtgacagagggagactctgtcttaaaaaaaaatagctacctgtttggagaaaggtaatataaaatatgtaaatagagacaaagtcaaaatttgcaaaggatgaaattaaagagtagagtttttttggggggttttctgtttctattattttatttgtgatctaagataagttgttaccttttcttctcttgaagatactttgttatatctatgtttttggaagtcttatggtaactgcaacgcaaaaaatctatgatagatccactgaaaataaaaaacaatgacttaaaacatactaccagagacaatcaaccacaaggaagacagtaaaaaatgaagaaaggaagaggggagttacaaaacaaccagaaaacaggcaacaaagtggcagtagtaagttcttacttaaaaatattgaacactgaatataaatggactctattctccaattaaaaggcatagagtggctgaatgctgcctatatgctgcctacaagaaaccacttcatgtaaaaagatacaaatagactgaaagtgaagggggtggaaaaagatatttcatgcaagtggaaaccaaaagagagcaggagtagctatactgatatgagataaactacaaatcaaagactataaaaagagacaaagaaagtcactatgtaatgataaagcgctcagttcagcaagaggagatgccaattataaatatctatgcatccaacacttgagctcccaagtctcccaagtatttaaagcaaacaatagtggatctaaaaggagagatagactgaatacaatattaattaggggactttaacaccctgctctcagcaatggccagatctttcagacagaaaatcaacaaggaaacttcaaagttaaactacacactagatcaaataggcctaactggcatttacgggacatttcactaactatctaactgttacagaattcacattattttcatcagcacatagaacattcttcagaacagaccacatcttaagtcccaaaaccagtcagaataaattcaaaaaagtttatatcacatcaagcatttgttctgaccacaatggaataaaactacaataaatgaataactttctggacacatacaacctaccaagatggaagcatgaaaaggcagaaaaacccaacaaaccaacatgaaactgtaacaaaaggaaaacccaggaccgaatgacttcactgctgaattctaccaaacatttaataagaactaaaaccaattctactcaaaatgctttaaaaaattgaagaggatggaacactttcaaactcattctacaaggtcagcattatcctgataccaaaaccagacaaggacaggacaaaaacaaacaaacaaacaaacaaacaaacaaacaaaaaaacactacaggattgcttgaggccaggagtttgagatcagcctgggcaacatagtcagaaccaatctcttaaaaaaaaaaaaaaagaaaaaaattagccaggcatggtggcatgtgcctttagtcctagctactcgggaggctgaggtgagaggaccaattgagcccaggaggttgaggccgcagtgagccatgtttgtgtcactgtactccagcctggggaacagagcaagatgctctctcaaaaacaaaaagcaagctgggtgtggtggctcctgcctgtaatcacagcactttggaaggctgaggtgggagaactgcttaagcccaggagttcaagaccagtctggacaacatagggggactccatctctcaaaaacaaccaaccaaaacaaagccaaaaaagaacataggccaacatcactaacaaacatagatgtaaaagtcctcaataaaatattaacaaaccatgtttagaaacacatcaaaagagatcattcactatgattaagtgagattcatcccagggatgccagtatggctcaacatatgcaaatcaataaatgtgatccatcacattaaagagaaccaagaacaaaaaccatataatcactccagcaagtgcagaaaaggcatttaataaaagaatgggttgagggagtggagcccatagtcagagcagcagtggtctgggattttggaagtagaaagaagggcagcaccactggccaggaccaccagggaacacccccataggccctgggtgttgtgctccagggagggttccctctggagttattaatcttggtgtccactttgcccagctgcccctcacagggtcagggaggatgaagggaaagcttccttctaatgaaagttcagggactcacagttcctagagcctgtagggagaggaagatcttcgaggaagagcacctgggcattggggcgtttgagaggaagatctatgccaggtccaagtggacaacctgtggactctctctccagggacatacgggtatctgggaatctcctgtagcttaaagaggtaaagacctctccctttagcctgaggactggaggatgctggttcaggtgaatgagtcctgcaggggctggtacaggcctggagggtggtggtgtccagggccttgggttcacccttagcatgattcaggccgggcggtgtttcacatgagcaagagggcctgggttcattgcttcaggacaatggtgaaatctcatggtggaagaaatcttgtccttgccagtgcccagctttcatttggtcttggcccagagtgtcctccctagagaagactcttgtcccttcttcacactgcccttcagggatatgccagccttatgggataagatggggtggagactgtagatgtgggtgggaatctctccacagagtgctccttctctcagcggttgcaccttgtctcagggcttcagcttgaaatctgggatctccaagcccttccctccccagtcctggccaggaccacatgggcagatgcattgtgtgaagtgcatttcatttggggtgtcctctctgcatggcaccctcccgttgattctctttgcgcatgtcagagtgcaggcaccatccacacctcctgctggaggagggacggagctgttgactcctgagagctgatcatgtgttcccaccctcacacacaatcatggtccatcctctgagggacatgtgttgccaccactgtggagatggtgcaactgacagtaacaaacagtaaaatctggtactgaatgggaccttaagccaacaatgacaatgtcattccaaggtgtttcatttttattgattcaatgcaagtcacctgatttcattgactattcacaatagctcgataaagtaaatgcatcatcaccaccactttaaagaggaaaaaggtgcttgggcagtttgtgactactgtggtggctgctgcattgctctctggtaaagccaagtaggtggtgggtgcggcctctgggctgggatgatccaccctcctggtggtggcaggggagccaagctggagccatggcctgtgcagtggtagcagctgaactgaccgctgctgcaggatttgcaagctgttacattttgcgaagccatgaagcacataaaacctcaagtagaacaagtgtttcaaagtctaccaaaatctgccttcagagattattactacagaggtggatatgaacccaaaatgacaaaacgggaagcagcattaatactagataatgaatgaacactagtaatagtagggtaagccctactgccaataaagaaaaaaataagagatgctcattaacatgttatgctcttaaatcacgcagacaaaagagggtctccttatatagtagccacaatcaatgaagctaaagatttactgcaagatcaagctaaaaacagtaggtgtataatgaatttttaacttcatattagtttatgtatatgaatatcaagtttttataataaaatgcctccaaacaaagaatatttgatttagggtttaataacttctaagaggggactcagatgtttcctgtttcacagtcagtctgagagggtcatttttcctggagctgacctgggtggaggcctcacactgatactccccagcatcctctctcctgatggggtttatgctgagcatacagtggccctgggacagctccattctctccatgagtcacagacgctggtcatggaagatccactggataaggttccagagtcatctgtggggcaggtcaggatcacaacatccttttcttctgtgactctggtgttgctgactcagatggggtcggagccactgaccctgtggacaatcagtggaggtgctcaactgaaagtgggctgagggcacgtcttctcctccatccctgggtccttaaggtaactgtggaccccagaccaactgacacaggagctagaaagaaattatttaggaagttagtgagggtaagagcgtccttggcaaggtttcccctttaacaaaaagcagcccaagataattccttttctaacaaagagcagcctgaaaaattgagctacagatgtagatgagcaagatggaagcttgcacaggtgaattccagtaggtgtgccaatagaaaagggctgcctggaagccaggtatgttcaacatggagactccatcctcccttttctccattaccacatgtacagtaaaaaaccaggcaacatggcaccggccaggtagacaatccatctgcatgacaaaagatcagagtggggcagccagcaaatggcacagctggtctaaacaatctttcaccccctgtataaatcagacactgcctcctgaagctcatctataaaaccttctgcatttcactatggaagtggcaacccattttccccaggacccctctctctgtgcagagagctcttctctttctttcccctatgaaacttccactcttaacttcactctgggtgcctgcatcctagttttccatggccatgggacaatgaacctcgagtattaccccagatgaatgatgctgtttcacaatcactggttcagctcccttcttcttagggtttcacagctcggtggggagaataccacgcctcagtggtctggggagtgaggaacaaatgaagaattaatcagattttacttagaacgctatcacctgcctcaaccatcagatccatgttgggaatgtccaggcctcctctcttagatctatacccacttcactggacctgaaatcctgtgtttcccgatgtgttggtgtcactcctatgagaggataaaggagagaactttgctttctctccccactcacaccctgcacaagacagggcccaatatgagacacacactcgctcagtagttctctcatgaaggagggagggagtgacctcgagtgattctgccatctgtagtctgtgtaccctggccagtggctgtatcttcatatgcctcagtttcccctcagtaaaataggacacacaatgagaactaaaaataaaattctaattccccagtgaactgaaaggatggcctcttggccaagcggatcccagagttcctgatcatgacaggatgggaggttacacctcattacagcccctccctttggaagtttagaggtgacaactgactagcattaacgctaaaatcgagatcatgagactgacagaacagactctctgtggccataagataccaaattataaactcaacctaaggtcatgcaggcaagggctaagccacactttcctacatttaaagaataagctatgttctaacacagaattttctttctctctagcggctaaagtaacactagccttcgagataagcaatattgaaatgatcgcggctcatccaccaacactggctaactgacccctgttccaacagccacaactacacttcaattggacaggagactgatttcagtaactttctcctaataagagaccactgagcatggcctggttctgctggtatacagacacggtgcactgagtaccataatgcttgtttcatcttttgatgtataagacctaatttaatacatttaaatctgaattctccaccccaaagtgaacatggggtgcatgtagcatgcatgtttgttgatcacgcatgtgcgtgtacttcctttgtgagtatccatagctccacctataacctgttgaatatgtatacctggccaactcattcagcataaatctatcttccacattcccctcccttgaagtgcctgctattggtctctgctggaggctgcatcttctaccctggggaatggccagcctgcaggctgtaaccctgtgtaagaaataacctggttgggtgcagtggctcacacctgtaatcccagtggtttgggaggttgaagtggtagaatagtttgagctcaggagccagagactagcctgggcagcatagcaagatcctgtctcttaaaaaaattttagggaggagagtgaggatcagaaaaaatacctattggctattatgcttagtacttggatcatgaaataatctgtataccaaacccctgattacatatataacaaacctgcatgcgtatctttgaacctaagataaaagtttgttttaaaaactatctgggtgcagtggtgcatgcctatagttccagctactcgagactgaggtgtgaggagtgcttgagctcgggggattgaggctgcagtgaattatggtcccacctgtgagtagccacttcactcaaacctgggagacagagcaagaaccggtctctaaaaaaaaataaaaatagaaaaataaaatgaaaaatatatgaaataaagtctcctttccaaacgtacagatctccgatttttctgccaacaatgataaatggtcagtggcttgccatgttgtctgtgaattacttttaaaatattcacgatcacctgacctaaaggttggtaccaaggaaccgcctgaatacaccgtctctgattatttgcctccaacagagtgttccctgggcctgatctctggtggacaatgagctgctgggaacatcctctcttctctattcctcccctggggatgctgaccttcccttggagtctcctaagttccccagggcagtcggctaatgtcctagggagcttacctgtcttctccataccaagtctcatgtgaaggacgaggctttgcccttgcccagatgaggctctgggggctgagccctggctggctaccagctgcaagagccatggcccttggacagctggtaaatccttgttcccagtcagccctgcccaagatgcctcaacccagccccggcacaggcttcccagggtcacatggagtcaggatcctgggacaggggactggacaggggtttccagggctgagtttctgaacaggggcttcccaggggtcccctcactccaggatctgacatggtcctacaaggaacgtccatggggaggggacccaggagggggaactgacactgacctccccttactgagcctccccccaaccccatcagactgtccttcctctgtagcaagtgcctgcagggtctggatgcaggaaagaaattctgatctgtggaagtttgtctcccctgtgtgtgtcttgcactaaatgtccaaacccccaaatgggatgtaatgtagagggggacacaggcacagcccaggcctgaaaatcctgtgtgtgtgaagcagaactgacccccaacacccagagctcatgagacatcactgtgtacgtgaaactggccagttacttcttcattcacaagatctgtttttatgacttgtagggtgtaggatcctgtgtcattgttggtgacattctgtatcagcagacatgtattggggtatattgtctctcagcctctgtggcaggtcctggggtaattacttgagttcctagtacatatcctgtaattcccctttgtaccagttgtagccaagcctaaggcagattgtgggtgagtggaagaatctccttgccttctgcagcttcaacagtgacttgggcagtggtaggcaagttccagaaagttaaaagtgaggctaggagtggggagagagcatcagttaatactgggccctatgcattgaggtggaaagatggggccctaggtcctggacaggtctcttcatccctcagccttggagtgtgtgtgtgtgtgtgtgtgtgtgtgtgtgtgtgtgtgtgcgcgcgcgcgcgtgcgtgcgtgtcctactgggccaaggtcagcagcatgacctcccttccttcagtgcctctgaccttggcatttccctgtttggagtccttttccccaggggtctgcctggctccctccctactgccttcaggtcctgctcacattagggcatccttgggagaccccttccctgacacctctagagaccctgggtcttccctttctgacctttcgctgctgtgttccctccagggctcttgtcaatacttgacctcacattctagatacccttgcatgtctgtcttcctccctatgagagcatgagctctgtgagaacagggacttgtgtgatcttggttgcaccccagtgcctgggacaggctgcggactcctgtggatgagctcatgagtgttcccagggcccttcacaacgtgggatttattttccaatggctgaggttgttggctaagagctctgttggagttcaatcaggctggtgggaaaaatattagagatagttatagagatagacacaaatcttcttggaagaccaaaaagtttgcataactttggtaatagatctgactgaaggtggtccctttacctttagttaaacaaattaaagtagtaacaaaggaaggcagagtagtttgtctagccagcttgtttactcatgtgatcttaagactaaccattgatgtgccacaggtgcttaattgctttctacttgggaagtccacaatgtcaattaccctctaacggtgttgactcaagcctttgttaattaatcttactgaataaatatgagtctcactagctgatcaaggccatggtcacaactgtttataggactcagcagggagtctgtaagcggccctgacagactcagctggactggcaaagcaaaatatgtgtgtgtcagtgtacactattcacccgtcccccacagctggtgcccctatatgaggagtgctgccacagagctctgtttagtgtcccttgttttttttcttgagtattaccccaacttaaattgtgattattgtcatctgttttcaacattaactgctcagtgatgattcacttggaaaacattaacaatcgagattgtttcttcactaacaacctcagattatttagattttcctgttgtaatcccttcttcctgtttagtgtccaacagaagccctctgtccctctcaggtccccgttctctccaagaaaccccagccagtctctgtgctccctcctcccatccactcccagggagccctcccctcacctgtgagcagaagcgcctgccagggatgtgcactctgtgaggaggggctgagggaggccccatgggctctgctgtctgctttgtcctcctctgtggagaggagcttgggcttcagaaaataaggaggccagaaagtaaggaacaggctgagaaataatggggatgtgtcgaaaggtcacagatgccaacatctttgtcctatgcaatattatccataaaattacaggtttgagatatgcttaaattttcttctaacatgcattaaaataaacatataacttttaatagttatattaaattgtatttaatataaattaaatgctcttgtcagagctactgtgactgtcagctctgctgtccttcctctctctgtgctaagcctcctcccagggcagaagcacttcccagggccaggggtgggggcggggaaaggtaagtggcaatgaggatctgcacaggtagcctttccgcctcctcccctctcagtcctgcctccttgtcttcttttcctctttttctccaatctacatttcagttccttagaccacgctgtgagaagcaaggcttattgggacccccatcccttaacaggatgacctgtgctccccataagtgacctctgctgtgtctagggattggctctgtcagcacctcacagagagtccctggggcccccaaactcagtgttattttctctatgacacagaaacccctctgggtatgcaaggttttcctcatgttttctaatgtctgggaaggttggatttactcccagcagggaggtcacagagatgtccagggagtggggtcctagaaatggacaaatctagagctaaagcccaggtctacgattttcagttgtttttttctgcagtgctatgtgaccctaatttcctaggagtaactaaaatgcaaacctcagacatttgtagacattttatgatttttctctacagcttgtaccactgttattattatttgctttatgctttttcctaaataaatttactttacaaaacatccttgtcctagtagggtgcaggggctcacgtctgtgatctcagctgcttgagaggttgaggtgggtggattgcttgaggacgggaatttgagacaaaacatctttgtcctatgcaatattatccataaaattacaggtttgagatatgcttaaattttcttctaacatgtattaaaataaacatataacttttaatcatcatattaaattgtatttaatataaatttatatacaatacatttttatataataaattatatatataaatgtatatataatagtttttcttttttgagatggagtctggctctgtctcccaggctggagtgcagtggcacgatctcagctcactgcagcctccgccttctgggttcaaacgattctcctacctcagcctcccgagtagctgggattacaggcgcctgccgccacgcccagctaatttttgtacttttttagtagagatggggtttcgccatgttggccaggctggtctcaaacacctgacttcaggtgatatgccgcctcggcctcccaaagtgctgggattacaggcatgagccaccatgcctggcctatatattttatataattatataaagttttctataataaattttatataataatatataaaatggatatttatttaagataaagttattagttttatatatttacatatatttaggaataaatgtgttactgtgggagcccagtgcccaggcaggtagtcagtacatgatggttgtcattagggttaatactttggaattctggattttttcccaagagagtgtctacgctggaatattgggcttgtggctttctgctgatgtgcatgtgtgaagaagctacttccacttattaggacttgtgtatctgtctcgcagtttcactacctattttctcgtgatgttggtcaagtcgcctaacttttctgtgcctcatttacctaatttgtagaatatgggtaacagtacacaagtgtgagtgtgtatttcccaggactgaccactagagggcgtgaaggcaccggcacttactattacagcaatgggtgtagtagtgctcatggtcgtaaacatcattctcccatgaaaggaaccagggcttcctgggagaaataactgattccagggctggggccggaaagcacaagcggagcctggagcatctcgtgaggccagaaagtaaggagccggctgaaaaataatggagatctgtcgaaaggtcacagatgccaaccagaaggagctttgaatgaccaattttgagacaaaatgagcactataagaaataatgatagtaataaattccaacccataaatacccatgagttcctactaatataaataaataattgaatacataaatatataaggatgaagaaacagctttttcttacagcagaattccaattaatgaatgtagaaggaatgatcaaatagaaaatcactatttggctaacagcacagtcaattgtttgtaggcaagaattatcaatggactttaaatatgaatgggtaaaagtatgatgatgctacaactagtgagtaccaagggggaaaaaaaagtacgttgagaagaaacaggctacttccatattcccaaagtatcacttcaggagctacttattgattataatgggacaaatagtaacttacagtagagaaacctggcaacagagtctctccgaggtacaaaggctctcttcaggaaggaggtaaggggaaggaagaagaaaacactgtcctgcctcaattatttgctttccccattctcaagtgtacttcatagacattcaaagatatgtgttgatagtgtccacgatccacatggctctattatagtcatttattcacacatacattcagtgaggctttgagtgcctaatgtgtgcctgatatttgctagatggtggatgctgagaagatcaggtgtgctgctgtctctagggtgactgaatccacctgccccactttacagatgtggaaattaaagtgaaaaggatttataggattagttcactgtcacaaggtcactagccttaaagttacaggagtaaagcaagtttcctgacttgctagattttctgctgcaggtgctgacaatggtgagctccaataggagagaggacactcagagtgaagtgggagccctgaacaccctggattagccaagaggacatgccgggtccagctgtgaccgcacaaaggaccattggggatatttgtattctctttttcacttagagcttgaaatgaggaaaactaagtgcagaaaaccaagagtggaagatttttcacaaagcactggtaacatgcatcagaaaaccctgtgctgatgtctgtcacggtgtttctcactgaacggtaatagtctggctttgagtgtgttccctctacagcctggagttctgcgaggcagggaccaggtgtgattcatctttgtctctccagtgacagtacacagcaggctctgataaatatttcttacaaaataaaatggaataaaaagtagacatctgcacaggtgtgggatgactgagcagcagcagaagcaggaaaagtcagcgtccccagatcagctgatgtggtgttcggattctagataggggtgaggtgccaggatggggatgggggtcctgtggctctgctgccctgggggacacccctaggtttcacagtgcctgctgtggttgctgcactttgcttccccatgggaaagtgatcagagggtgtggggcttcaggtgaccccatgtgggaaatggccaagggaaggtggggtgggcggcacatggttttttttaaccaatatttgaaggtaggttgtatgaaaaggtgttaggcttatttcagcttatggggagtaggacagggattggtgagtgtgtatcaggtatattttggctcaggatggaaaagaactgtcacagtaacataaggtcttttgggaaattacatgtttactggcagagttcaggccagggctgggtgtctgaaaatacctgtcagggtcacttttatggttacaagggcagagcttggcttggaaccaggtttcttactaataccacatattaagtattataaaaactgtcctttgcaataggacattgctctatgatgcaggttgaggtccctctgtttaagtaattgtgggtggctgtgattctctcatctagtctgcgacttggacttcacctccatctgcagtccctctcctttgctgttgacactggtcagagttaagcgcatttactgacgatggtcacagggtggcagcactgcctctctggtattttctaaaacctcttcctggaactgagccagtctaagaggatgtcatgactaagaaaagggcactaatgaggtgaacagataattttttttttcttgtttctcctgtgaagtaacagagtggaggtgagcatggaataattgccttttagaaatggaagacaatggagagaagtgtttcgcaaaccttaatgtgttcacagatcccacacagatctttttattcaatacagattctgatttttctggtgaggcctgagattgtgcatgtctaaggagcttttggatgatgccattgctgctggttggcggaccacactttgagtagcaaggctcgaagatcatttagaggttaattctcactgcatctaatttatggatgaaaacaaaccaaggtccagagagagcatatacagcttgcctaacaaagccattccctaagtgcctgacttcttgcatttaaacccagggcttcagcctttgtccagttctcactccacacatcacacggtttgttcactgttgtgaacgacagttgtggcagcatctctttagtttaggaatccagagccccaatttcactaccctctttggtcttggctcatgctgtgacttcgaatagttttgcccttacttaaaatcttcagtggctcttttgtaatcacaagatcaagttcgaatatctctgtctagtgttcatggctttataacatatggtatctctttagtaaccttacctaacttccctgttttaaaattgtctcttgctgccatagccctccttgctccttcctgctccctaacaaactgtgttcacttctctctcagtggtagtgatgatggcatggcctctgatgttagactcatgtaacttctaatcccagatccaccaccaacattggcaagttgattcatctttctgaggataagcatcctcctctgaaataaacttagatggcggttgagaggggtaaataaaataacacacaaacccactctcatccctgagaccctcttcaaaactagcatataaaaatagctatttgaagaggttcagtgaaattcaaggtaacacagagaaggaattcagaatcctatcagataaatttaatagactgaaataatttttaaaaatcaggcagaaattctgtagctgaaaaattcaattgacaaaccgaagaatgcactaaatctttcaacagcagaattgatcaagcagaagaaagaatttgtgagcttgaagagataatatatgaaaactcagagtcagagagacaaaagaaaaaagaattaaaagaataatgcatgcctacaaggtttgattattaagctactcaaagagatacaagagaagggtgaaaaccaacataaagaaatgtaaaaaacaatcagaatataaatgaaaaattttctaaaatgctagctagtttttttttgagacaggctcttactctcatcacccatgctggagtgaagtggcacagtcatggctcactgcaggctcaacttcctgggctcagatgattctcccacattagccttccaagtagctaggactaaaggcgtgtgccaccaggccaggctaattttttgtatttttagtagagatggggttttgccatcttacccagggctggtcttgaactcctgggctcaagtgatccaggagattcactgccaaaaaggatataaccaagtcatatagtcataggttatctaaagtcaatgtgaaggcaagaattctaagagcagtgagacaaaagcatcaattaacttataaaggaaaacctatcagtctaacaccagatttctcatcagaaaccttacaaaccagaaggtattggggtcctaatcttttggcttcttaaacagaatagctctcagccaagaatcttgtgtagagtgaaattatatttcaaaatgaaagagagaaatacagtctttttcaggcaagcaaatgcttcaggatttgtcacggctagaccatcctacatggaatgttaaagggacttctaaatcacaaaacaaaagatttaaatagaacagaatagaacctcttgaaaccaaaaaattcaaatggcctataaaacaataacacaataagaaaacaaagtagataacgatcaacatgatgactggaacaaatattaacattgaatgtaaatgacctaacactccacttaaaagacacagattggcaagataaataaaaaatcacaaaccaaatatcagctgtcttcaagagactcacttaacatgtaaggattcttatagactcaaggtaaagagatgataaaagatattccatgcaaatggaaaccataagtgagaaggaatagctatccttatatcatataaaacagactttaagcaacaacagtaagaaaaagacaaataaggcaactatataatgataaaaggatcaatcaaacaagaagatattacaatcctaaatatatatgcacctaactttggagctcccacattcataaaacggttatgatgagacctaagaaaaaagatcaacacaaaacagtgagggtgtcctgggttttctttttattggacagcagtgtactagcctatcactttcccagtcaggggatttttggtctccccattcccctaccatgggttcatgccaaagtccatattttttattagtgtttggaattggattttttttttttgaggtggagtctcgctctgttgcctaggctggagtgtagtggcacgatctcggctcactaacctctgcctcctgggttcaagcaattcttctgcctcagcctcctgagtacctgggactacaggtgcatgccaccacacccagctaatttttgtatttttagtagaaacgagatttcaccatattgtccaggcttgtatagaactcctgacctcatgtgacagggaaacaggcactcagtgaacttcatgcgattgaggagttaatgataatgagagaagggctgtgaggggacagcactggggacaccagagcctgtgacgggctgagttgctgtgccttgggagatgcccttttgactgagccctgggaaggagggggtgtgggggcaggagctgcctgcagagggagtggcctcaggtgggcggccacctggctgcagggaagaggtgacagagttcgtgtgcagagcttggagggtgaggaggaggtgggttgaggtgaccttggtgagggtgaaccatggggggctgtgggccctgctgagggaggccagccagccctggacctacagggtggtttggtcttttttgtcccattcccagcatccactgagtggtgaaactctgcaggccagggaccatcccactggccagaaggagcgcacagtaggtgcccactcagtgcatgttgggctggacagaacctcactctgccccctgcccccagctttgggagctgcagcaaggtccctccccctagggatctccatgcctctgtctctgaggggtgagatggggagacttcaaagggccatctcagagtgtgggggatagagacgcagaagtgtgggggatagagggaggcctgggctctagacccaaaggaccttacacacctcctgagtcttttcaaatggtttcttctgttactttaaaaatgatgtaagtcatcatatttattgtaaatcccaggaatctaatcatgcgtaaaataaggtgtcttatccttgaccccaccccttccccaattaaatttccaggatgttaccactgtttgcagttggtgtgaatctctctttaataatactctgtttatctcacttgtcgttttacgccaaaatacccattgaattatattattgctgaagaccattcttttttttttttttttttttgagatggattcttgctctgttgcccaggctggagtgcaatggtgtgatctcggctcactgcaacctctgcctcctgggttcaagtgattctcctgcctcagcctcctgagtttctgggattacaggtgcacaccaccacacctggctaatttttgtatttttagtaaagacagggtttcaccatgttggtcaggctggtctcgaactcctgacctcatgatccaccctccttggcctcccaaaatgctgggattacaggcatgagccaccacacctgcccagaccattctgttctactgaatcatgtgtggtgggcacctcttatatcaatacatatggattttatcttgtgtttgttattggctcccctttttctcattgcatggctacactcaatgctttgtccacacccctgttcctgggttggaatcttgtgacagaaaatgaagtaacaaaggctaaagctttctaaagtggagtcaggagattgcaagacaattgcactttcaccagcaagagctcaaaccacagaatgttccaatagatttggataaacagctgaagtcagtattcaccagccttcaacatctcaactaggagaaccctaaaattaactaagcacatagaatggaatggacttgtgatttaggattccttctcagccaatgagctgcttctgaaaacaactttttgtggaaattacctgtaaagaaaaccctctcctgtgcttgtcttacagaacactagtcagggctgccctgattcagtggacccgaattgctattatttgtttcctaaacatatggtattttctgtgaccttcatctcaatcttttttttaagttactgggctgtttcccagttttcataatgacgagacattctgcagtgtttcatacacatgtcttttccccatgtggagtattgatccaggagctcattcagtcaacgcatgtttatgaagcatcctgtgccaggctgtgggctggtcactgtcttcagcagagagaggacaggcacagtcttgccttcacagagctcacagctcagggaggctcttagaagtgggatactggtcggagcatgtgcacattaaacatgatgaggtcaaggttgctatagggactaaaccacagtcccaccaagatcgcattgagttcctgtggtagaccagaggtcagggcccctaagatgtcctgagcagctccctctgctcagaagttttggttccacaggtgacacacctgagcacaggtgacccctgcagaacctgtgattaccacccaaagccaagagtgagtggtgggtgttctaggaggaaccgtcacctccatgggcagggttggggaagactgaggggagcaggtggctgatgactttggccagaaggtagggggatgggcaggtgtgcgctcatagggaagggaagagaagggagggcattgcaggcaacaacacaaaggttggaacctgccttcatggactgagaaaagcagggagtccacccaggctgcagctggggagggaagacatggggagcagtgggtctaggggagaagcagactgcgattgaccttggggactgggcagtgagcagaggtgtgttatgtgtgtctgtccccatcatagatatgaggaggggtgaggccgcgggtggcacctgggtcggtgggatttcatagtgcctgctgttccctagagcctctctgtatagagggtcagaatagatctgaggctgtggtctgggggaaggggctggtggtgcttaccatctctaggggtgggaggagagggatgaggatgcccctgagcagtgaagcctcaaggtgtgtggagccacagttgtctctcattagacatgtgttttgcgtgaggatgccagggcctggtggttattactgttgtcaagtttgcatgacaaggacccaggtatccagggatccagagcacagggcccctggtgaggggatgaggctcagatggggctgaccaggttcatgtggtcagagtgggagggactgatggagagacagagcctcaacccctcctgtcaggagctgtggctatgtccaggagagatgacaaggatgacccaggacattgagtgagtcattgagacattgaaggtgaggacagggcagagaggaccctggtgactgctgaaatgtaggatgtgaggagggctctgacccatgcaagttacaggacctccccacccccgagcccacagatgacccttaaattgggcatcctgagtgctgtgtgtgcccagcagggacactggataggctggacctgagtctctgtaagggcagcgctggtctgtaggaccagagtcttctctgtgggtgtgacgtgggcaggaattagcaagatgggggtgacaaggcttggcttggaggatctggtacagaagcccatgggcttggtcagctcagcttctcaggggctcagctggggctggaggagcaggatgctgtgctcagggcatgctccaggcagcgtgatgtgtgtggttccagggtcaggcacgggggtcaaaaattaaccatgaaaagttcccaccttctgtaggcagagaaaatggcctgattgtcagggtcagggagacttaccatgtggccaaagcaggctctcagcctcccagagaccacaccctgggtgcagcactcagctctgcagggtatggcaatagatgtgccaagaaccccaacatccagatgcatgcaaaaattttgcgatatataaaatagagcagatcaagtttccctgcaataacgttgttcctggttgtgtctttttcttgtaaactagacatggacatctttccagcagtctgttctcatctgccaccttcctgctgcagcacctcagaatgaacattcctgagacactgtccgtggtgctgacgaccaagagctatggaacagagtgtgatgtagaatcttctagttacctctgctctcctttcacttttaacaacagagcatcattaacaatgagaaggtggagaggtgttcaggatcttgaagtgacttctgtcttgctctcccataaccctgaagctgctgtagacattattgcagaaactgacaccacagtcaggatggccttgtccaggagcccatgtgcagtttgtagtgagcaaggatgagaaaatggtcttgaaaggggtgatggacagaacaggggcttttcaaaaatgtcacatcatcacccccagcatccgtgaatctgtcacatggtaagagaccttacagattaaatgaaggattatgagtttggaagattattgtagtttatccagatgggtccaacataatcacagaatcccttccttacaaatgagagagggaggtgggagagtcagagaaggaggaggagatgtggggatagatgcagaagacagagcggtgtcaagatgctgcactgctggctttgaagatggagaaagaggacacagccaaggatgcaggaggcctctaggaggtggaaaaggagaggaaacgcactctgccctggagcctccagaaagaacgcagccatgtgggcaccttggttcaagtttctgtgtcacttagcttgtgggaatttgtcacagcctcaacaggaacctacagaggagtcaccttgtgtgcaggtgggatccagggtcatttacagctaaatcctgatgtaaatattgcaggttgcttttcctacttcctatctcatggccaacaaccctggacaatggcagaacacccttggaaaccacggctctgtgctttagtggagggaccagcttgtttgtgggaaggtagcacctggtccaagtgaacctacatgagatcgttactctccccagggccctcagggaagggctgagaacagctggcccaggtgtgtggaggagctgcaggtgaggcagggctggaggggcctgtgggtccaggtagaggggcagacaggttgtcccatcgccatgggagcctgcacgagctttaggttggggaaccctgctcctctgacctggacgctcctgtgtggagaggaggcttgctcagtgagatccacgccagggggtaaattgggaactgatgggaaatgaggggctagagtcctgggtagtgcctgggaggaccttgctcaaggactgaattcttggtctgttcccaccttggttactctgacaacccctctctgtgtcccacggggataaagatctcctgagcagtggccattgggacagaggagaacctggtggccagagctaagcatccaggatcctggatttggggacaggcaagctcattgctgggggacagtgatagatacggcctccagggcctgggtgaagagagcaggagggctcaggacactggaggctgtgtggaggtcacacccacgatctgtaccacccatggatgctcctgcattgctcacctttgtgtggacatcagatggccccaacttttgcactcctgagacatctcatgcattcacagagggacccaggctggggctgtgcatggccttggtctctagggtagtgtgaggacagctgagcactcagctggctgggcaggactcctgcgaatcctgccctttcctgtgtagggtccaccccagcctgactcctaaccccctactcctgtctttccagggaagagagactggggttgagataaggtggagatatttttcctgtgtgacccaggagagaatggacatggagtttcaggtgagtttctgctaagttcccatgagcagaaaaagagccaatgagaggaagtttcccctttattcagatcctttccaggtgaccccgggtgggccataggcccattcactttccctgcaagcccccgcttcctgtggtgatgggaagccttcgccttggcccacccagagcccggggcagtctgttgaggtctctatatattcagcagggacccccatcccttcctgtccccaggcctgtgtctcctcaggactcagagctggttctctggctcaggctccatgtccttccccatccccagggctgggggcttcagggacgctccatcaacccacaggagcagctcccagaggaacctaagaagccacatctgctttgtggtcgatccagcagtaaatgtttgtgtcagagtgtagcaattccagtaaaaacagagaagaggtcttgacccctgaggccttctcagaacagggtctggcatctctctctgggcccacccagggctactctgggactgaacctggctgtgctcagggggttcctgctcccaggcccctccctcctctgctcaccacctcctgttattttcactgcagtttcctgaacttcagctcagccagatgccagtggggacagatcctgggtctccctggggcccaagggaccagaatatctgtggcccccactcacctcatagatgagagcagctgccctggtgctgggtaggggaatctgggcaggggagagaggggtgtcaggggacagggaaggattcctgctgtgtaggaattccagggctctcctcaggtgatggagggtcccagggtggggttagcacagggagtggatgatcctggccctgaacagaggcccagctcatggccagggcaggtctaaccttatccaagtcattctgggtagggtgggtttgtgctggggattgacagtccccctgccctgagcctgcacagctggggccccagtggaaatgggattgggaacggacagtcttacctaggagatggagctgtcagagggtccatggcctggggacagagacaaaagtgagcacgagagtgttaggatagctgggcccctcctgcaagagtgtgtgggggtcctcagttcttagagaattggggagagggagcctttctcaggttattttaggggtcaagtaagcaagtgaggttgaggaagtgacccatgacccagagcccggaggttagggctgacccggccagttggggtttcctgtgtgatgttttatgggatcctctttgcagccccagggatagggtcagaggcccctgggtgtaactggcaggagtggacaacttggggctggcttagtagttcccagccacacccagactgaagggacactcaccgggggtggaggctgggggctgctgctccctgaagtcactctgatcgctggccctaggaaaggtcagggttatttgtgaaggtgcaaggttaaaagtcacaaattggagttaaaataggggaccaggaaaggagcctatttccaagaggggtatggagacctcctttctttatggagttctgtggtaggaggggcccaggtgaggggagttgaggaaaggccttacaaagccacatctgtcctggccagaggggaaggactctcaggcagatgctgggccaggagaacattgatccagtgacacaggaaagggactgaggacccagggaaggaatcagaccaccaggggttgcctgagaggaagggtcaaggcaccagggggaaagcagggccaggcacatgtgcaggacactgaggggactgcatgcatcttggattctcctggaactcagtgtccctgctgtgaccagacactccactcagggctggagatgctgaaatgggacaatgatcttgtcttctgtctctgccctttggcaagagacataaacgacattccaggatatgccatattggggccccggttctcccttctcacagctcagtgtctgcagttaccatgtcagtcaaaggggtgctgaccccacccagcccgtccaggctgttccagtctccactatgtgataatgcccaggatcccccctcagatgccctctcactgggtggatggattcagtgaacagggggaggtaccaggtattgagcaccgctcccccctgctccaggcagctgtggctttgctgtgctaggaaactaggaccatgctcaggggcatggccttaattggactgaattcactgaggacaaagctgttgaggaagcagcccagggtcagcagctggtgaggaaggtgccatggaatgagagggaaggatccctggggagtcgggaggctggggagagcctggcactgaatacaagacagggtctccttccttctcgcctggggtcagcgtgaaggatgggagcagaatggggaaaagctgtggtacctgccagtttttcggaggagcaggaaacacacaagtgcagccaccagaagactcccaaccaggaccccgatcaggatgcctagagtgttgtcatctgctgaaagaagaaggcaaaggggatgaggtccaaatctgttccagggggaaccatgaggggccttgcagggcaggggcatggtcagggaggaaggaaatgccatggagcctgagtgtggtctgttgtgctgtcctcatagctggctcccttgctctccgtggttgcaccattttctgtgtcttaggcttgaattactgggatgcatcaactcctacattctcccacaggaagcctgcacctcatcctgctcctgtgttttttagtccctccttcctctcacatcactcctcttccccctgtttctttttttccatcccatggcagtcgtaaagggcaggcccttgctgccaactcaatgctgatgagcagggatgatgttcattgactgttttcaggggccttccacatggaaggcacagtgggaatcaatctacctgcagcttttctcaccctcccattgccttgagggagaagggtatgtgatattgtgaaatacgtatttggtgttcatcaccattgatatggttaggctctgtatccccacccaaatctcaccttgaattgtaataatccccatgtgttatgggagggaccttgtgggaggtaattgaatcatgagggtgggttttttccatcctgttcttgtgatagtgaataagtctcaggagatcagatggtttcataaagggaagcttccctacacatgtcctcttgcctgctgccatgtaagacatgcctttcaccttccatcatgattgtgagacctctccagccatgtggaattgtgaatcaattaaacctctttcttcatacattaccaagtctcaggtatgtcttcattagcagtgtgagaatggactaatacagtaaattggtaccagctagtggagtgctgctataaagatacctgaaaatgtggaagtgactttggaactgggtaacaggcagaggttggaacagtttggagggctcagaagaagacacaggaaaaaagtttgaaacttcctagagacttgttgaatggttttgattaaaacgctgatagtgatatggacaataaagtccaagctgaggtggtctcagacagagatgaggaacttcttgggaactggaacaaaggtgactcttgttatactctagaaaagagattggtggtattttgcccctgccctagagatctgcagaactttgaacttgagggaaatgatttagggcaactggtggaaaaaaaattctaagcagcaaagtgttcaagatgtgacttgggtactgttaaaaacactcagttttatgtatttacaaaggtatggtttggaattggaacttatgtttaaaagggaagcagagcataaaagtttggaaaatttgcagcctgatgatgcaatagaaaagaaaaatccattttctgaggagaaattcaagccagctgcagaaatgtgcataaacaatgaagagcaaaatgttaatccccaagacaatggcaaaaatgtctccagggcatgtcagagaccttcctggaagccccttccatcacaggactggaggcctaggaggaaaaaatgtttcctgggccaggcccagggctcccctgctgtgtgcggcctagagacttggtgccctgcatcccagccactccagccatggctaaagagggccaaggtacagctggggccatggcttcagagggtgcaagccccaaaccttggcagcttccatgtggtgttgagcctgcaggtgcacagaagtcaaggattgaggtttgggaaccttcgcctagatttcagaggatgtatgaaaatgcttggatgtccaggtgaaagtttgctgcagaagcagagccctcatggagaacctctgctagggaagtgttgaagggaaatgtggggttggaaccccgacacagagtccctactggggcactgcctaatggagctgtgagaagaagaccacaatcctccagaccccagaatggtagatccactaacagcttgcaccatgcacctagaaaagctgcagacactcaacgccagcctatgaaagcagccaggagtggggctgtaccctgcaaagccacaggggtggagcccaaggctatgggagttcagctcttgcatcagtgtgacctggatgtgagacatggatacaaaggagatcatttcagagcattaagatttggctgccctgctggattttgggcttgcatggggcctgtagcccctttgttttggccagtttctcccatttggaatgggtgtatttacccagtgcctgtacacccattatatctaggaagtaactaagcttgcttttgattttacaggcttataggtggaagggacttgccttgtctcagatgaaactttggacttggacttttgggttaatgctggaatgagttaagactttggggaactgttggaaggcatgattagttttgaaatgtgaggacatgagatttgggaggggtcgggtggaatgacatggtttggctcttcttcacccaaatatcaccttgaattttaataatccccacgtgttgggggaaggacccagtgggaggtaactgaatcatgggggtggattcttcccatgctgttctcatgatagtgaataagtctcacaagatctgatggttttagaaaggggagttcctctacacatgccctcttgcctgccgccatgtaagacatgccttttgccttctgccatgatttcaaggcctccccagctatgtggaactgtaagtcaattaaacctcatttttaaaaaaattacccagtctcaggtatgtctttatcagcagccaagaccagctcggtcgcggagatcctaacccagcagtgctagaggaattaaagacacacatagaaatatagaggtgtgaagtgggaaatcagggttctcacaggcttcagagctgagagccccaaacagagatttacccacatatttaataacagcaaaccagtcattagcattgtttctatagatattaaattaactaaaagtatcccttatgggaaaccaagggatgggccgaattaaaggaataggttgggctagttaactgcaacaggaacacgcccttaagatgcagattgctcatgctattgtttgtggcttaagaacgcctttaagcggttttccaccctgggtgggacaggtattccttgccctcattcctgtaaacccataaccttccagcttgggcattagggccattatgaacatgttacagtgctgcagagattttgtttatgaccagttttggggccagtttatggccagattttggggggcttgctcccaacagactaatacacccattttctggtatgtgactctaaagtccttagaatcttcaaagtgatgtctttttcaagctaataattgactgatgactggcagcccctaggcaacttcagaatgaggctggtcactgacccaggtaggattagagggttgggactttcagcctcacccctaatccctggggagggacctggagtttgaattaatcaccaatgaccaatgaatcaattaatggccaatgattgaatcaattaatggccaatgattaaatcaatcatatctatgtcatgaaccccaaaaggactgggtttgaagagctgaacccatggaagtttctggagtgtggtgcatctggggagggcatggaagctccacaccccttcccacatgccatgctctgtgcatctcttcatctgcatcctttgtaaagtcctttattacaaaccggtaagcctaagtatgtgtttccctgagtcctgagagctgtttgagcaaactaatccaacccaaacagggagtcatggaaacctcaatgtgaagccagtcataagaagctctggaggcccagacttgtgactggtgggaaggtggtggcaattttgtgggactgagccctctgctgatatgtccaggtagatagtgtcaggatggaattggaggacacctagctgatgtacggtgcagaactgattggctgctgggtgtgtgggagaaacccccccgcatcacatttggtcacagaagtgtgtctgtgttgatgattgttattgtggagtgagagcagaggaaaaacacagtttgagtttttccaaacagggtggaatcccatctgccaatttagaatctgaaacttatagtttcagtacttcaattaagattgaagtacttcaattcagtacttcaattaagattcagtacttcaattaagattcagtacttcaattaagattacagaactggtaagtgaaagtgatacaacaaaaatgtaaccaaagtctgctcaacttaacagctaataacaacaaagttcataaaaataataccagtcgatattgatagcactgattgagccctggctctgtgcatgaccttgttaagggctttaatcgcattaatctctgaataaatatcctcacaaccaccctgagatccaggtgtttgtaacaattctacagatgaggaaactgaggcccaggaggttgagtgtcttgcccaaggtcaaatacctggtacctattgtaaccaggatgataactggatgagtctaatccctgagttcttacccacattgctccccaggctctgaaggaatctcatccttctcattccgtgtatcattttacaccccccctccctcctaggaaaatatacaaggaaaggagtgagaggggccgagggtcactcacattttacagtcagcttgagggggtcgctcctgttggagctgactgggttggagacctcacactgatactccccagcgtcctcctgcctgatggggtctatggtgagcatatggttaaaccaggacagcttcatcctcttcgtgacctgcagacgctggttgttgaaaatccactggaaagaggttccagtgttatttgtgtggcaggtcaggaccacggagcccttctctgtgactgtggtgctgctggcttggatggagggctgagccactgactctgtggatagagtgaccaacagaaagtgtcttggggccatgctgcatcctcagagatctcagagtcaaatttagaacattctcctgtgaataaaggagaaagatgaaggacagggaggagcagagagaaccagagacacccatagcagcgagcagtagggactacagtgacctcagagaccccagggaccaggaggacccagctgcctcagaccaggaccagggagccctgaaaaccctcccacagatgagcggccccagagtcacatgagatgcaatacctggggtggctttaggagcaggcagtcagagaaatggaacatgggtctcagcccctaagggacaaggaagaggtgtggccagctcctcctaggatcctacatccaggacccagtctgtaaagaggttatgattattcctttcttttttcattaattccctccctccttcatcagagaactactgagtgtgtgtctcagttgggccttgtgcaggtacagggtgtagtgggaagagaaagctgagtcctttccttcatcctcccatgggagtgacatcaacaaatcaagaaattcatgatttcacgtccagtgagggaagaaatgtggatctgatgggagaggcttggacaatcctggcattgagtctgatagttgagacaggtgatttcgttctaagtaaaaactgactaattctccatttgcccgtcattcctcagaccagaatctccctctctgagctgaggatgcccaagaagaaaggagctgaaccaacatctggtcctggggtccacagatgccccacggtggtggccacgaccagattctgggctgcagacacacggtggtgtgacgttgagcactgacagcctgtgtgatgctgatgcaatttctctttaataaaatggggtaaatgtcaatggtccctggcttgccatcctctctgtaaattaacattaaaatatttacaattacctgacctaaagcttggcacagaatagctccaaataaacatcatctattattattttactccaaaaaaaaaaaaaaaagagttctctgggcctgattcctggtggagaaggagcggtccagagtgtcttttctctgctttccctcctcctgaggacagtgcacttcccgggacatcttttaagtttcccatccagtttaatggcctgggaagtttgtttgtctgtcctctccactctgactctcaggtgaaagatgaggctctgcccttgcccagatggggctctgggggctgagccctgcctggtgaccagctctaggaaccacggccctgggacagctggtaaatcgttgctcacaatcagccctgcccaggaagccacaacccagccctggcacaggctccccagggtcatctggagtcaggatcttgggacaggggcctggggcaggggcttgaagggctgagcttctctcagaggatcctcaggccaggccctgactgagtcctataagatctttctcaggtcatgtctatgaggaggaggccaagcggggttggactgagactgattttcccccgctgcatctcccgcatcagactatccttcttgctgtagggaatttccacggagtccggataagggaaaggaattctgatctgttatagtttgtctcccctgggtgtgtcctgcactaaatgcccaaaccccaacatgggacgtaatgcagagggggatgcaggcacagcccaggcctgacaatcctgcgtatgtgaagcagaactgacccccaacacccagaggcacggaggaatcactcaccgtatacacggagatggtgagatgcctgttcaatctgagaatttctgtatgtgacttgtagggtgtagtatcccgtgtcctctagggtgacgttctggaaatgcagatctccactgggtgatattgtctctcgaccgctgtatgcaggccctggagtcctaacgtgagtgtctattacatatgctgcgattagctggttgggctccaccgttttccctttgtaccagccatagctgtaaagattctcgggcagataaaccacagagagatgaacattctccccttcagcaacttcaaagggcgctgatgcaataaagagccaggcagtggtgggtgcgttccagaaagttaaaagtgaggctaggaaagggagagaatatcagtcaatatttgacctatgcattggcatggaaagacggggtcctgggtgcaggtctcttcacccctcagccttagagggtgtgtgtgtgtgtgtgtgtcctactgggtcaaagtcagcagcatgaccctcattccttcagtacctctgaccttggcatttccttgtgtgaaccctctttcccaggggtctgcatggttccctccccactgccttcagttcctactcacacaagggaatccctgggagacttctttcgtgaagcctcctctagagaccctgggtcttccctttctgacctttcccagctctgttccctccagggctcttgtcagcacctgacctcacattctagatctctttgggtgtctgtcttcccccccatgagattgtgagctctgtgagggcatggacttgagtgatgttagttgcaccccagtgcctgggacaggctgcagactcctgtggatgagttcatgagcgttcccagggccttccatatcctggggtttatttgctaatgtctgaggttggcagatgaagacagagtttcatgccctggtggtgtttttatttaaattgtcactgtgatatagttttactatcattttcaaaatgtagtggccactgacaatgaacttgaaaacatggaccaactgagattgttttgccccttggcaattccagttcacttagattttttggttctccttagacgctctctcccctgagtctctaacaaaagccctctgtctcctctcagagccccatcctccccaggagaccccagccagtctctgtgctccctcctcccacccactcccagggagtcctcccctcacctgtgagcaagagcccctgccaggggatgcattctctgtggggacaagctgaggggggccccatggtctctgctgcctgctctgtcctcctctgtggagaggagcttgggctccaggaacgctctagacagggttactgtgactgttgtctctgctgtccttccttcctctatgctgagcttcctctcaggcaggagcacttcccgtttatgggcaagggcggggctctgcctacaatgtctctctgtcccctcccctctcagtcctgcctcccttgtccctcctttctccttcctttttgcctatatttggttccctaggcaaaactttgagaagcaacgctgatggggtcctcataacaggacgacccactctccccagtactgacctctgctgtgttctggccttggttctgtcacagccggtagattatttccctttgtgacacacaaaaccagctgggccctgggtctcctcatgctctccagtgctccaggaaggcagaatgatgcccagcaggaaagtgacagaggtggctctgggggctagaaaggggctcactgggtgatggctgggaaggacccacccgctatcttcagtgtcaccagcctggcctctgacccagggacagagacccaggcctggaggtctcgggaggatccccagctcctaggtgtggagggaggtgtcctgtgtgtcctgggaagagaggactttgatggaaggaggtgggaggctctgggttctgctgtccttggtgaaggtttcagggggaccctctccatgtctggggtctgtgcccccagcttaactctcattctctttgcaaatacatatattttgtggatctgcagttgcctgaactgtctcatgtccctaaatctttgtatccctttttacagaaggtcaggaagggtgtgtacatgagtatgaggactatctgatcagggcgagtgtttgtttcccaaagatctctttagatatggtataatacataagataaatgtactgaattagcaattttaagtgtagaattaaatgatactaattctattcacaatgttgtacaaccatcaccataattttttaccagaaaatcttcattataccaaatggaaacttcatacttttaatcaataactccccacttccccctgccccacccactggtagcctctgatactatcaatctctgtgaatttgcctagtttacatgtctcatataataaggaattatatacgtgtattatttttttctggattatttctcttagggtaacacttttaagattcatccacgtcgtagcatatattacagcttctttcctatttatggctgagtaatatcccaatatatgtttatacctcaattttaattcattcatctcttaatggacatgtgggtggtttccacatttttgctattgtgaaaaccgctgcaatgaacttacacttggaagtatctgtttgggtttctgtgttcatttctttgggggtacatataggagtataaatatggggtcatgtggtagttctatgtttaagtttttgagaaacagccaaactgttttccagtttgctgtgctattttatattcccatcagcaatatacgagggttccattttctctacattcttgtaaacacttactatttaatattttttaaaacttatagccattctagtaggtgtgaagtgatagctcattgcagttttgattttcatttccctggtggctgatgaagttgagcattttttcatgtatttactgacaattttaatattttttagagaactatttattcaaatcatttgctgtttaaaaaaaatgggttatctttttattattcagttgtaatagttctttatatattttagatacaagtcccttatggggtacatgatttgcaaaatttttctcatattctgtgtcttctcactttcttcatggtgttctttgaagcacaaacatttttaactttgatgaagttcacttatctatttttaattttgttacttatgctcttgatgtcatattgaagaaaccattgcccaatccaagatcattaagttttactcctatatgttcttctaatggtttgataagttttgctattccatttaggtttttgaaacattttgagttaacttttgtatgggctgtgaggtaggggtctaactacactatctcgcatgtggttatccagttgttccagcacaatatgaagaggctaccattctttccccattgaggaatcttggcacccatgtcaaaaaccaatgggctgtaatggtgagggtttatttctggactcttgattctattccattgatctctatgtgcattcttgtgccagaagcacactgttttaatgattgtagtgttttagtaagttttcaaattaggaagtgagtcctccaatttttttttccagattgttttggccattctggggtgacttttaaaaaagatgtagttcaatggttctcaaagcaggagtggttcagctctccttttttggcagtctggagacctttttaggaccttaatctaagtagataaattattcccactttcttttctgagttgctatgttacagtgtatattgacacccatgaaataattgagagaccctggaagtgcttgcctacatagtgagggacaattagttccatgatcatgggcacagaagattttgttttgggaaacaattttgttggtggagttatattcatgcttactcttttatttgtcttcatagcctgcatctccttcagacttcatatctgtttattttcttgtttgtcctctggggtttgggtgttgggtgaccagtcagctggagctggaggaggtgcttagcaaggcagtgaccctggttgggaggagcagggctcagcagggtgaaagtagctgggccttgagtcaggagtggcatctggaaggcctgactgtaagggtcagaagggccagcaggtgggtgtcctaggcacaaacggtggctgctgctgtggactggaggaaggtaagaggccccgagtattccatgttcttactggctccccaactgaggattcctctcctgggctggtgctgtcctgcagcagggaggggttagacagggacggctgcacatcaggccggagtccatgtcatcctcttaggcactgtcactacagattgaggattctgttcataagccaagcctttgcacaaggaagggacccgggctctcaaggaagagcagctcctggtcagacctccatctccttctctctcattgcctgaggcctcaagcttggtctacctggcacaggggtctggatcctcctcccagggttggggtcttactgagctgggcacctgcaggtgggagaagatctggaggggccccatctgccttcaccagattgatgttgagggtccctgagtcctgcaccactatcaggtgctgagcaacttccagtgtcagtgacaaccaccccatggtggaagcagaaccacctcgtgagaaagcacctccaagcctcagtgcttgccatgtgtgggaatttgctggtttcagttgggggcatgttggtgggtggtcatgaattcagggccggattctatgctcacagtgcacatgctggatgtggtacagaccccaggcagggctcagtggggtggttttgggtgtgcacaggtatcttttctggaggagctggtggtgatttggctcccagaagttcctgagctctgcagactcaccaagcactcaatatttgagtgaacattgggcgagagagcagaaggtaagtgtcagggcatcggggttggtgcctctgggaagaggaggaacattctgggaacaaagctctcccccggcttacagggagcttcccatcgctcctgccttgaggatcagggaaactagggcctctgctcttccaggggctgcttgcaggcagtttgctctgggagggggtgacccaggagttgcctctcattttgcatttgagatttaaaaggagaagggacagtatatcttgccaggtcacaaaaattacaggcatcatattgactgaagggcactcctgtcatcactgcaatataccagaatggtcttttaaaaaaataagtgatttaggtttaccagcaactgtaatgcttgttttattcttctagttcaccgttaatgtcacttttgtagttttagcactggcaatgttgattttatgttgactctgatgattttaagctttcatttgttcacatagagatcatcttctttctgaatattaatgcattttttctctatttctactggttattcctgtacatagagtagagaatcacttttcccaaggaggtggaaagcttctgactaccaaaaaaaaaaaaaagtgtcaaaatgctttaaagtcagtaacttaaagatcaaatccaagagtgggcaacagattctgcccagggtctgaaaggtggagaggtgactggtgaggatgtttaaaagacctctcctctctactccctaaatgggggccatccagtgttcttgaggttcagagaaggcccagggctggggcagcagggcactgtcagctcccagctcccaggggccaggagtaagaccccaacactgtccagacactgattgcattcattttgggggagagtagattcttatttaaagaataatacaaaagtctacaaatatgaacataaacagaaattcctttgctacaattttccccttaataagacattccttcctaatgacatatgtgactgcattcatggctgagatgttttctaggatggtgagagcatcagagtggactatctggtgccttggggtcatgcattttcttcttccaatgtctacaggatcccccatgtcccactttgtagtgtaactcagtgtgtgtcattctggtttttgttgtatagatccttggaaagcccatgtcattcctgctgtgaggtacaggcagccaaatggcatcatctctaaacatgccttctcctggtacatcaaattatggaataaatgaaagccattttgacagatattgaagatataagtttctactcttcccacacatgcttctcccaagtgaaggattttactggtgaattgttattagagattagtgtggatcagtgactctgccaggggaaattttgccctctaggggacatttggcaaagtctggaaacattgttggttgtcagagctgggggagggagtcctgctggcattgagtgggtggatggtgctgaacaccctgcagttcacagagccccaccagtttgaccacccaaatgtcaatgctgaggagtggagagccctgctgtgccctcccgcagcttccctgaagcttcccctcacctgctcctcccatgtctccccaccacttccccacttcacccgcctccttacacctcagtcccctccacctgaactcaccccttagtccaaggccagccctgatctccgctctcctggtctccttgctccttagcaggaggcgcccactagatggcgcccttgcccttactggagctcaccgtctccctttccaccctgagacaaatgtggctgcttttactgccacaaccccagccctccacactctagatttgctcagggagcagctcctggacagacctcagggaccccagggaggagcctcactctggagattttgatggcatggtctttgaacttcactgttacccccagtcaggatccaggatgttgggagtgcatgattctgcccggtcccacttcagcaggaccccactgctgagttgtctgtggggacccgggcctctcatctccttcttgcattgcaggagagggatcttagcactgctttcacataaagtcagataatggaggagtgcaggtgagtttgggaaggtggacatgaagagaggttgtgtccctagaggtggcagcagtgagaggatgggcaggtgggaggaacacagcccatccagggttgccagccatattaggagcgacagcctttcctctaagcctccagcctttttcctgaaacattccagaactttccacttcagcacttcccactgaggctcctcaggtctgtccctgagctcccagctgagcctacctacccatctgaaatcctgagtcctgtgtcaccctcgttccccattattctgtgcagttctgtgggacgcccagctctcctgacacccccagtcttcagaatggccatcagcgctgtcgctgtggcaccagggtgactgccgcctggaggctgagtcctggcttcctgacagctgtggggcccgctctaggctcccttgtcctgatcattcatcacctccaggatgcacagcagctgggccagggggaggagcagggacaggtgtcagccaccctgtgtgtctgcaagtcaggctgggggtgtgggaggacgccaggaatgactgaactttctgatttagagggtgagagcttgcactgatggaatttgggatttaataggaaaagcatagcgttttcctattttgtaggcagggtggctggagtttggaatcatagattcccctgggatgtcactgtggacctcagtcccacccgttaggggcacagatttcagaatccacaccctggggcaaagcaggcatgggaggctccatcagcctggccagggctctctatttgtgcagctgctgcaaggagatgtgcactctgatgggaacagtgctccctcctccttggggggcagtatctagctccctgcagcccctctccctgcaggccctgccctctctgaacctcaccttccccaacccgccccccgcaatcccatctcagctgtaatcccaacactttctcatccattatgggtggactgcttgagcccaggggttcaagactatgctggctggacaatatagcgagttgttgtctctacaaaaagacaaaaattagctgtgcatggtggcatacacctgtagtcccagtcactcaggaggctgaggtgggaggattgcttgagctggggaggctgagttggcagtgagttgagattgtgccactgtatacttcagtgtaggtaacagagcgagaccctgtctcaaaaaataaaagtaaaaaaaaaaaaagaaatatggaatacattattgttaactctaatcaaccatgctatgcaatagtccaccagtaataccagtaatagccaataatgaattatctgaaaaagaatacaatttattcttagctatctactgctaaaatttttaagctatcttttatgatagctgaaacaaaagaagtaaatttaaccaaggaagtaaaagacctttataatgaaaactgtaaaacattgatgaaataaattgaaaaagacacacgcacaaatagaagatattccatgttcatgaattggaagaactgatattgctaaaatgtccttaccacccaaagtggtctacagattcaatgcaatttctgtcaaaacaccaatgatattcttcgaagaagtagaagatcctaaaattagaaaccacaaaaattcctaaaacctgcacaaaacaccctgagttgccaaagcaatcttaaacaaatagaacaaagctagtggcattacacttcctgacaatcaaagcatactgcaaagctatagtaaccaaatcagcatggtcctggcataaaaacaagcacatagatcaatgaaacagaataaaaatcccagaaataaacccatgcatctctagctaactgattttcagccaaggagccacatgcacacaatggggaaaggacagcctcttcaataagtggtgctggggaattggatattcatatgcagaagaatgaacctagaccctatccctcaccatgcacaaaaaattaactcaaaatgtattaaataaagacttaaatgtaagaactgaaactatgaaactactagaagaaaatatagggggaaaatccatgacattggtctaggcaaagagtttttggataaaatctcaacagcataagcaacaaaaccaaatataaacaaacgggatttcatcaaactaaaaagcttttatacagcaaagaaaaaaaaggccagcagagcaaagagacaacctacaaatgggaggagaatatatttgtaaatatatacatatatatttgtaaatatatacatctgataagaagataatatccaaaatatataagaaaattatgtttctgtatagttttatctgactgggatacagaggccacatccacagtcccatcctcaaaggccacttgttcccaaaatgtcaagcacatccctcaatgatccatcatcaacacctatgtctgtaggatgaagggtgaatcatgaagcactaaaaaggaagaaggaagccaatcccaaaacaaaatgatgcagggtctggaaagtccaaagcattttttttttttttttactgcatcttcctcctttcttctccacattcccaatcctcactattgattaacaaaacaaaaaaaactgggacccaccatcttccctactgtcaggagatctagcgagattgtttgagtcttagaccaaactttgccataagccaaatttctggctgactttacaatgatatgagctagcacagtctctttttctgccagtcaacttgtgctcggttttatttgcaaccaaatagaggtggtaaccaaatataggtgaccctaaaattagtcatcaggatgaaatcctaaaatgtgcaacaaactgggttgaattcaggattagtagcaacatctctgttgtgggcttgaaaagggggcacccttttatgcagtagcaaaattgctaaattgttgtttgctgagtctttggactctcatcccggattttctatgaccattcaaacagggctgcaatgaacatctatggttgtttagcttggcacacttctacatttctatatagtaatatctagaagtgcatttgctcaatcacaagatatgcacattttataattgactgctatcgaactaccttaaatagccttaatttgttctcaacattgtttaacagggtctgtttaatgtcctacgtccagcaaggacagtatcacttttcttaatatttttcaaattattggaccttaacaaatacttaatgtgcaattaattgattcctttgtattcccatgccttcttttatatgtttccttatagtacacaaaaccacattattgtttctttacttgtgtcattccaccctggaccattcctatctaaactataacattatgagagagagagagagagaaaacaatatgaaaatataaattgattaatcaaaaaaatttaaataggacaaatcaggaagacacaagagagattttaaaattattcagagaataccacaatagctgtaccaatatattttaaaacttagatgaaacggacaactatctcgataaatgtaaattaccaaaactgactcatgaaaaaatggatattatgaatagagcaataatcagtaaagcaattaaaaagacagttgataatttttatttactgacaacaataacaaaatttcaggtcctgatatttttatggtgaattttaacaaattttcaagctcctcctcaaccaattctcagaaggtttaaaactttaacaagaaaacactttctaacacattttcagaagctgttatagcatgataccaaaaccacacaagaaaattatagaccaatctcacttacaaatatacatgcaaaatcaaacaaaatcttagtgaaccaaattcagaattaataatagcaaacaagcaaaatatgttatcatacgtatggcttatatcaggaatgcaagtatgtttcaacatcagaaaatacttctccacattaacagactaaaggagaaaaacgcttgtttaattatctcaataggtttttagagaattttgaaaattttataaagttatgcgtattctgtaaaattgatgaaatccaaccttgatttatttttaaaaattgcctttcctatagaattataggtaaaggaaacacatgcatcctcacagagctacttcaaggctaagttacttcccataagtaacgtatcctgtaatgtgtgcttggcacatattcaatactaaacaaatatttgcaaatcctcaaaccacttctcgctcaaataacccacctttgtcttttgcctttatgttagggttgattttctcaattgtatcttggagatcctttggtgggtctttcagcaattaccctgaatttgcttttctgtttacaattttaattcctgggaactctttcttgttctctgactgcacccttttcatgagagttcagccatcaatcctccagaaccccaccccccccgcccccccaaaaagcaataaagatgtctaaaagcttccttctgggctttcgaatgatgtttaccccaggcatttgttctattcgttcatcacccattttccctacaacttgcctacacttgatatcagatttttatttattagtcacctatcttcttcattggcccattttcctattttgccactggttgttctcaaatgtgttatgattcctggttgtacagtcaagtggttgataatcttggatatacgataaagatttgctctgtagctgtgtgtaagcctatataaaagcttttgtatttttcttcttaaaaaagacaaaagatggttgggaagatccctccagttcaccagttcgaggctgcagtgagctatgatagcgccgctgctctagcctgtctgtctgtgaaaaacaaggggggcggggggcgggggggaagactggagatgtaaatctcccgcagggccctacccgtatccgcaacaggtctctaacaggaacagcctcaggcctgtgttggaacaaggtaggttacagaaatctggaagccagatctgtaacttcagggtaaggactggctctcagggctgatcccccgggctgggtgtcccagaggcacccgcccccgccccttccccaaggcaggccaggacaccttcactcctctccttaggctccccacccccttctcctccccactgtgcctcctggagtagcggtggcggtgccacaggggagcggggcggggcgggctctgagggcaagggggatgggccccgccggggtcactggcggccaccctggaaactcgacgcaggccggcccttctagtgaatcgtcccagccacagctggcctcccagccgcgcttggggcgcctcggggcgcgaatggtgcaggttggggagactcaccacgcaccgtcgggggtcggtccggttattcctcaccgctcggctccagtgggcgcgcgggcctctcctcctcagttcctgcgctgcagtccctccctcacccttcgcagcttgggaatccaactgtgtcattccgacggagcgccgtgaggacctccgagggtgttagcgccaagtgatctctgtccagcgctctgaatatccaagtaaaggagttcaatgaagggcgggtcaacggaggagaaaccgtgactctctcaagggagcccaaggcctccttgtctaattagtgacgcgccaatggatggaggctcttcccaccatctcttcccagcatccagtgacaccaccgccaagggacgggctcggcggaacctgcaggaaagaagcatcggctgagcctgactgcagcgctgtgaagagacaggggaggggatcagtagttggtcccgcgcccaccccctgtttccgcgaggggcggagttgactggccatgcaggcagagggcgaaatgtgaaattccactactcctaccgtttttccctgacccgatggggcggagtgtcgtcaggctaagttccctggcggtaaggtggggagattgaggcgcacacctgccgaacggtaacgcaggattagctaaggcgagctcaggacagaagcctcccgaggagcaggagggcaaaataataaataaataaataaataataaataactcactccttggtctttatttgcggcaggaattcagaaggtgaaagcggggccttaggatctttctgaccttttgggttttaagcaggaggtgtcagaaatgttaccacagggctagctggcttgtggccagcaagcgttcacaatgccctcgatttttcatccctctctgtgggttctttttttcattgtaaggcagaatttctacgattgctcacccactcagagaacctgagctggtttagaccaggtgagacaggctaggtttaccctggtgatgatgtgttgttgccatggcgatcctgcccagtaccagaggccctgcagattcagatgcttggtgcctgtgcttggctgaggggccaatgggtgaagctgccatctgcgggatgatgactgaagcctctaagtcagaatccgcccaggctgagccttagggcagctccatggagcctcggctggcctgggatagagagtccaccactgtgccagcccccagccactgcctaggtcctgtgctgagagccccttgtccagggaaatggcgtccagtggaaaagggaccacccccttgcccttcactcaaggcaggttggtgacaaccctgaagctaatccgttcctagaggagctgcttctgggtccgagttttctctgcagcagagcagctccctggatgggatctgttcaaagtccgcctttcacgcggaattttccgtccttgcaattttccacctccaccactaggggatcctctctgaccgcctcatgccggctctggcctctgagcaggggtttctcttctgcatgtgcgaccttgcgcatgcctagtggccttttgggacctagagctgctccacaccccgatggggttacagagtgcctcgcctccactccaccccaccagggttccttccctggctgggatgggatttcagaagcgccgaggaacagcccagacaggtgtgggagagtagccaaggcccctgtcccggggtggccaggacagcggtggcctcgcataggacctggctgggctgctgcaatcagtgtcctgccccttggagagcaacagtgaaaacaacaagactatcttcacccaccttaagaaagaacagaaccagtatccccaactctgctgtgtatcccaacccaattccattccccaccccactctcagtagccaatatgcaaaatattagaatactcttactgttattattttcaaccacactctgcatcctgaaaaaccatatatttcgttatgtgcttttaaacttcttgaaaatgaaatactgaggctgggcgcagtggctgacacctgtaatcccagcacttcgggaggcggaggcaggcggatcacgaggtcaggagatcgagaccatcctggctaacacagtgaaaccccatctctactaaaaatacaaaaaattagccgggcgtggtggcgggcgcctgtagtcccagctacttgggaggctgaggcaggagaacggcgtgaacccgggaggtggagcttgcactgagccgagatcgcgccactgcactccagcctgggcgacagcgccagactctgtctccaaaaaaaaaaagaaaaaagaaatactgaattttcaaatacttgctttttttttcggtcaaaattatgttctcaaatttcactcctgtagatgtgcgtggctggctgtagtttttgcatttttattattaggtattctcctgttgcattaatatgccacattttatttctctcatgtttttggtgaccacttggggtgttttttggttttgtatttttgctgtatacatgctgccatggtggacatacctctttatacatatttcctgttgtatgcagacacaattttaggatgtgacatcttcagcttttctattgtgtcgtgtgtcttttccttcgtgctttgtgttatttacatattctggacacagattctttgtcaactgtatgtgctgcacatctctttcccagtttgtgtcttcttcttcttttttttttcttaaaaaaaactttctttatagtgttttttttttctttctttctttgttttgttttgtttttttgagatggagtcttgctctgtcacctaggctgaagtgcactggccgatctcggctcactgcaacctccgtctcctgggttcaagtgattctcctgcctcagcttcccaagtagctgggattacaggtgcctgtcaccacacccagctaatttttgtatttttagtacagatggggtttcaccatgtttgtcaggctggtctcgaactcctgacctcaggtgatccaccctctttggcctcccaaagtgttgggattacaggcgtgagccacagcacctggcctgtgttctttcttaagtagatgttacttttaatataatagaatgtatcatattttgcttttatattagtactttttctatctaattcaaacacatccccaagggtctttgtgtgtagactgaccaatttctcaagaatcatgaatgaatactgcttctctttccccaatttatctgtaatgctacctttattataaagtttctatgcatgtgtagaaatagttcctgatttttcactctgtgccaccagcataccaatagcacgctgtcttaaatattaaatagcagagctttatgagacaacttgatgtgcagtaggcaattgcccccttgttactcttcttcagggttctttgttgtaccacatgaattttagaattggcttgtccagctaaaagacaactgcaaggattttatttggaagttcataattctatacataatttggggaaagtattttcataataccaagtcttcctattaatgaacacagactctctctctctctcccccacccccacctgtttagttatttatatctttatggtctgttagttattgtttattgtctttcaaccaggtttcatgtttttctacatagaggccttgcatgtgaaagtctttcttcctagcttgctattacaaattttttttaattgcactttttgggtacagtggcttgtactgtaatccccgatacctgggaggctgaggcagatggattgcttgagtccagaagttcaagaccagcctgggcaacataatgaggtccctgtctcaaaaagtttgttttaaaaattgcatttgctgttattcaacaaatgtcattgtgtctcatatatggatttttatatctgataaccttgttcaacaatcttttgattctaacaatatatcagattcttttgagttttccatatagacaataatgtcatctgtaaattataattgtttcttctttgttatttcttggaccttttattttatatttttgtcttgctgcaaggcaatatccctctatatattgtggggtcttttttctcataaagtggggatggtgaacacccttgtcttgctctctgattgtataaagcatgctttctgtagcattttgtagacgctcttttttagattgaggtaattcacttttatttctggtttactgagtttttagcataaattcaggctgaatttgagctaaagctttttctggagacatcatttgaaaaattcatatgatttactttctttaagtcaccaaagttatgatttacattgaactgagtttctactgtttaactgtattcttgggagaaaacccacttgtcactgaacaatatctgttttatttactgctgtcttgtgtctaaattttcttttaggattttttgtatatgctcagattagcctgttattctcctttctgtatttttttctggtttgggggtcaaagttataatagcctcacaataagagctaagaaaccagccctaatggaggccggggcaggaggtttggagttcaagaccagtctgggcaaaatagtgagacccccatctctatgaaaaatagaaattagccaggcatggcagtgagtacctgtagtcctaggtacttgggagggtgaggcaggaggattgcttgagcctaggaatttgaggctgcagcgaactatgattgtgccactgtactccagcctggatgacagagcgagaccctgtctcaaaagaaaaaaaaagaagaaataaaaaggaaaagataaaagagctaagcatctgtttccttttttccattttctgggagagtatgtgtaagactgtaattaactgtttcttgaataatgggagaactctgtaaaataatctggctttggtgttacctgtattggaaggatgaaaaataccaattcagtttcattattggttgatagggctactcatgctttttgttttgttttgttttgttttgtttttgagaggaagtctctctgtattgccctgttgtccaggctgagatgcaacgttgttcacaggcctgatcctggctcactacagcttctaacttccgatctcaatagatcctcccgcctcagccttcccagtagctaggactacaagcatgcagcatcacatccagcctcttttcctgcctgacccagttctggtttcctttagttttctaggtgttcatccattttatctaatgtttaatgcatttggcataagggtgctcagtgtcctttcattgtctgttgtctgtaactgttgccattttcattcctatttatgagtactggcgtcttctctcactttttcttaataatcctgctggaactttgctttttaaagaacatcttttgacttgttgattcttttttcatacatattaactattttcttattttttgcctttatatttatttcttttcctgtttgaaacattgctcttttcttactataaaaatgggtaagtagctcatgaattaccacctcttttaaaaatcttttctactgtaagcattttagcagtttacatttgcccacaagtaccacttcagctacaccctatgtgcttttacataaagtcttcatttttggtaagacatattctcaaattttaattatcacttgtttttaaatccatgatgttttatttgaaatgttgtttctaaagatacattttctggttatacttttattcttctaatttagcacagtggccacaaaacatggtctgtgcagtgcatacaatcgatgagtaatttctgagctgtagtatttggcataatatatggcaaaatttcctaagttttccatgtgtgctttaaaaaacttccagtaaaatacataaatctgttagatcaagcttctcacattgttcaaatagtctatatgtttactgattcatttgactgcttgatttatcaattacaggtaggaatgtattcaaatctcctattaaagtgtgacactcaagtggctttttaaagacagagatgccaaaccaatgaatacatgattttccccaaagcctgcacaaattctctaatgaaattttaccatgaaagtttgtttaattaaggcttactaaagcagtatgttgtcttttactttttaaacagagaatatatattttaatacatcgtttaagtttatgattaattatctattactgaggataagaatctttgcctgtgctcattcagcatttgcacttcatttatgatctgccttctcatagcttctgttaatttttatactagagacatttatttgtttgtataaatgttgaaggtttttttttgttgttgttgtttttgagtcagagcctcgctctgtcacccaggctggagtgcagtggcatgatctcggctcactgcagcctccatctcctgggttaaagtgattctcctgcctcagcctccagagtagctgggactacaggcatgtgccaccaagcaaggctaatattttgtatttttagtagagatggggtttcgtcctgttagccagggtggtctcgatctcctgacctcatgatctacctgcctcggcctcccaaagtgctaggattacaggtgtgagccaccgtgcccagctgggttttttatattataaggagatgtaatagatagatagatgtttcaaagatagtcaaatgtttttaaaatttaaaacacttttttacaggttgactttcaccatttaatttcatctatgtgttttgccttagagaaattttaaatgctatgtagatctcatgacttataattatgaagcattttgttttctgttttccacgaaacttagcttaactttgagcatataatagttgtaaaggtaggagagtaacactgaaaaaaggaattgcataaaaatggcacattttctgtagagttgtttatcgcctgaaaataggccccatttcatggaagtaagatgatcaggctcaggtccccagacgaaactcttggcatggtttttggagatagtccagggctcagtactggctctatcatttgctacttctcccaaagtaaccaatatctcatccaccctgagcccatttccatatctctaacatgaggataatagcatctaccttacacaccaagtagagggatcaaatgtaggaactaaatcaaagtaccagcactgaataacctacatcctcccacttcccaaaaggaagagagatgtatcccctgttgacaaacgagaccattttgcaggagagaaaggaaatgccagttcacttgcaatgtaaacatgctctctctttttagggatgtccagggacctgagagagaacccatgcttaccaaagagtttctagttccagacacacaggactcgaagggtgacaagtatggttttcagggtccctgaatccacccagtcctcacagaaactcctaaaagctgtcgattgacagcgttgagttcacagctctggtcctcacatgctgatactgcttgtgatatcgaacccgacaggaccccacatcacaattgatttaccaactacaatataatacctcctgaatctccaaattggctcacccaggaacaaaggcttggggtaaaactggattaggagatataagctctgaattttctgagggtgagacacacaaggattctaagtgacacgccacagagtaacgggtctgtgactggaggacccacagatttgtcttactggagacaccacatgcacacaaactccatccttagctgtggaaacaagggtcttttgctatcttagccgaattctgggagtaatttttggaggggaggagatctttgggattgcctctttcaggccctttacaaaaatacctacttcttaaatggtaaagcttacactaaactgaaaaaattacatccttggctttttatgaagtaggtgttggattgaatcactactggaagaagtatggcatcgcaaattctaagcagtggtcaaaggatggatctgttaaattagaaaaatctctaaatttataaaaagattttagattcctttattctaaacaattgacctatttgtactcatgggacaatcaaatttcaaaggagatatgtaacgatttcatggcttgcattaaaaatccttctgataaaattaaagataaaaaatctgaccccctgccaaaaaaatcttttgaagttcatactgcctgctttcaatattctgtgggattcacaatgaaaggtgccttatattgtggcctagcttcaagtttatgccttcgccaccatggcctgggttcaattcccagtcagggccccagcgcctttggtttaatgtttgcgtggcatttgacttttttacctatttagtattggtgagattacctttggtaaaaaaaagtttaaagagtggaaatcgcaattctttgtgttggctaaaatctgattataagagatctggaaggttttatttttctttttcaaagagctctatggtcagaagtcggcttcatgaaaagctaatatttaattatatgtacatacagtctttctggattttctcttttgcctcctgttttgaaaaatatttggatttgagtgaaactccgttttagaaattaattgcttggtacaatatacccatgtaactaccctgcacatgtaccccctgaatctataataagagttgaaattttgacaaaataaaattagattttgaattaaaacaaataggtgcttggttcctctgctcacttctttttaaaaggaattcctctcccatgtacttcttcttttcccttctttaccttccttttggcatctttggtatcacatgaagggatctagagggaattttaagtgactctgaaattccttgagaaatacacaaaaagatcccactcaccccttttgggggtctcctgttctccttgtggagtccagagtcagggacaggctcctccaggtctgcagctctgctctcttttatttcatcttggctgattgctttggttttgtgagtaccaggcattactttgtactgtgagagacacgtcctttgtgagtgcaacggctgctgggtcactggtgagggctgcagtttggagatggctgagagccgttgcaataaatggttgtgattgcagggggctccttgtttctttgcaagtttagatgagaaaggtgcagtttggacacagtttaaaggctgtgaaaacaccaccaatgaatatgatttcctttggggatggtctgattaaaagtgggctgattgttgctgtgctactagccttgaagacatgtttctacagcattgtgcagtgtggaaaaattgtgtggcttggtcttgtggcatgtcccttcttttagagacctcagattcaatgtgaaattcgggatttttgattttcaaagatctagatgccctgccttccagatgtgcctactcttcacatattttaaaattagatcctataaactgcaaatactttgttggcttctgtgagatcagaggtccagttagaaaaggaagacagtttgttaaaattaaaaactatttatctaatctaactagattggcctccaaatatgactttctgacattcagctggttactctgaaaagatttctaaatctcttgaggctcatctatatgtttccttgcaaagaaaaaaaaaaaaaaaaaaaagcaagcccaagcactagtaagaaaaagatttgcaatgtttcatgaaaggagtagatgagtgaagcatttatttgtagatactgggttggatacctgtgcaaagaagaagaggtcaataataaaaattgccaggggatttcttggaacttaacaagctgaattaaatatagaaatgtcaggaaatcaaggcaggaaatactcacttgtggttaggcagacagggcagggttctgagcttgagatggagcaaacagttgtggtgggtgaagttcacatgctttagagctcagctgtcctagtaaagaagcctaagagtctctaaagctcttatgagaagatggattttttttgcctagattaaaaggttaaagaattgctttaagttggataaaataaagctaaatgtttaagcaagttgtgaaaggtttatgaaaaaattaattaaaatatttttgtgtgtaaacatattgactaaagttgaaggggtataattcagcatttctgtaaattgagcattgaaataaaaacacaatgggtttctcttagagcactaacctgctctttaacaaaaattgtaaagggttatagaaagtctataaaaatgttaccttatggtcaaacattaaaattgggtaaatatgtctatcaggttttattaagaattaggtttaacattaatagtacactaatgtaaaggtgaaatttggcttatttggtacaaaaatcatacaggaagcattgtgaaatataaaatgatttttagctttctttgggctatatttctataaatatgttattgatgagggttccaaagttatgggagactcctataattctgctatatctcagtgtacattatcagtcataattataattgtcatgttaaattattgtgggccacagaggtaacagatttccttgtcaattgtgtctttgactatgactaccctaaaacgttcagtcacccatatacacatgttaccttgttttggccctctttagaaggtaattttataatcagctataaagccctaacaggtgctcttaaatgcaaattttgataactttggagattgtgacatcagaagagaggaaaaatgttcgggacacttggagagctaaaatgttcattgatatcaagcaggacaggaattaactgcatgaagtgaactaataggaggctgaagtgatctttttgactttttgcttaaaacgttgctgatcctttgttttgcttttcagagtcaaggcaaattttcttttgagctattgacagcttttaacgattaatcaaaatatactcctatgaacaccatttggagcattatttgtttctctctacccgatttccccagaatttggaaactatttgtgggtattcttaatttatggcaatatagttatttgcataagtgcaataagaatgtgttttctttggtaacaggacacaatttgaaaaactggttattttaccaaggttttgaccagaatgctgtgctttcctttaaggaatcaaacttgacttgtggagctaataaagcctttggaaaactgaccttatatcctgtgaacacagtccctgtacagggttactgatctgtgggaagaaaagaatgtcacattctgacaggtcaggaatcccaagttatcttgaaacttcaagaggacaggaattcacccaaccatatgtatttgatggtagaaatccatggcaggggctcagctttaaaaagtcttatctcagattccttctataaaacaaagtcccattaaaaccaattttaaaagcctatgtgaaaaataattattcttgctgcacctcgtacaaataaagtggcaaagcataataaagcaaattggtcctgtcgtaatttgtctttagtaaaaacgggaaactggggtcgggtgcagtggctcactcctgtaatcccagcactttgggaggctgaggtgggcagatcatctgaggtcaggagttcaagaccagcctggccaacatggtgaaaccccatctctacaaaaatacaaaaatgagccgggcatgatggcgggtgcctgtaatcccagctactcaaggggctgaggcagggaagcggaggttacagtgagtcaagatcgtgccacttcacgacagcctgggtgacagagcaagactccatctcaacaacaacaacaaaaaagggtaactggagagagggaagttatgtttcaaaaacttttggaaactatagtacacctgtttttaaattctagtctggcattcagtttttattattttctacagtttgggttaaattcgtatttctctggctacaagtctcctaaataatcttttcatttgtttcctttttctttccctttttccccatttttcttaattggaaatcactgaaacctaagctgtgctttcttaaagccctgtgaactgaagactagacaaccgaaacttctgaaggaagtagcagcaacctatttatatgtgttgctgttgcctactattatgttttagcaggtgctgcctctacacccccgaaacagagagtgctactgggaacaaatcgactttttccactccagtgctgcattcggtgccccataacgatgaccccctctcagcaggaagtagccagaaagattacaatgctccatctccctatgattcttgtgataaataaatatacaagcatgatagaaatcatgcgcaaattgacagtggggattgtggcaggccagatttcactaatggaggtccccatcacaactacttcagtactgactgagtggttaagttcagtatcaaaagctgaaagtgccagcgcctttctacaaaggctagaatgtaacaaaagcccaccaagggttttacctaggcctttcctgggccttacagcatgacaaaacaaagaaggaattcttaaccagacctgtttaggattaaacaaatttaattgggggtctgaagaaactcgccaggcctccacaaacaagttcattgggggtctaaaggaaccccccccaaacctctgtgattgagcaggagacaaggtcagggtaattgccccagcacctggactcatttagatttaagtaaatgtactgaggctccagagaaaggtctccaagacttagactagagttacagattaaaagaagttaatcacttatatctttagataaatgcacactgacacgtagacatacatcttagaaaatatataagctctggaaaaccttgtaatttacagttggtctggagatattttctgggccttctctctgtaaccggttccagaaataaaaaactctcttcctccccagtttatctgcatctcgttattgggccgtgagaaatagcagccagaccctgagtttggtctgggaacacactggctgggcttcctgcctggcggtagagcttcactgtcctccttcccagccaaaatgtggcccttgaaggcttcctccccaactgaccggttttgggttctaggtactcagggaacaccgtcttcaaggaggccattttcatactgttcctggtttgatttttctgaaattaggaaatgccccttgaggcatccaggattgtctttatttcccctgaagcttcccctcctgaagaaaaaagttctcaaacaccctcaggactcaaaccccaagttcaccctgtgaaacattcccatttcctaaacccaggcaggctcatggccctcagcctctcagaccccatggaaacctcctcccccacttcacgggttctctccatattgagagcctcccctcctcggcacacaacccagagactcaccccaacatgtgtagcaaatcaccctggaaacaatcatggctgaacgtggtagcccatgcctgtaatcccagcactttgggaggcccaggaggtggatcacctgaggtcgggagttcgagaccagcgaggccaacatggtgaaacctcgactctactaaaaatacaaagttcactgggcattgtggtgtgtacctgtaatctcaactactcaggaggctgaggcaggagaatcacttaaacctgggagacagagattgcagagagccaagatcgcaccattacactccagcctgggcaagaagagtgaaactacatctaaaaaaaaaaaaaaaaaaaggaaaaggaaaagaaaaaaaaaatcatgaggcaacattgcatttaacaatattttatttatcaaaagacacttgtctttctcaggtaagtgaaggtctagagatgaaacgagtcccgatgtaaattgccccatgggcattgctgagatcacaagatcatcactgcagcatgcagcacaatagtaaatttctcaggatggaagttcaacaatccaaaaggtagtattttttttcatgatgctcagtccatcatacgaaataaaaataaattccttttcatgatcatccattcagtagaaaaaatgatagtaaatttgttctcatgaagatttttaccgtaacatataggatttatcgttattattattattctttgttttttgtttttttgaagcggagtctcactctgttacccagtctggagtgcagtcgtgcgatctgggcacactattaacctccacctccagggttcaagcatttctcctgcctcagcttcccgagtagctgggattacaggcatgcgccaccacacccggctaattttcgtatttttactagagatggggtttcaccgcattggtcgagctggatttgagctccggacctcgggtcatccgcccatctcagcctcccaaagtgctgggattacaggcgtgagccaccgcgcccggcctcaatttatcattattcacgcatccacaaactgggttcttatattttgtacgtgattttttccattgaggagagatatctgtgcatattcatgctgctcatatttcatccacaaactcggttcatatttcatccacaaacataattttttccgttgagaagagatacttgtacatatttatgctgttcaaattcacatttcatcattcttttacaagaaatagataatgtattttaaggttttccagtggtattacagatattttactgggtgtatagatagaaattaaaccaaacttctttgttctggccgccagtcatgcatcctgttttcaacatagttcacatacaactggttgtgtaaaaatgaaattattttgtttagtacaatcatcaacagttggttgattagatttttaattatcaagttaatcattgtcattatgcttctcatcgcactcgtcattaattgctgtgggaggaaatttgttatgttccctatgagagggtgtatcacaaattcaaataagaattcaacgacaatggactgtataaaggaaataagcaagtccatggaaaacatatttttttccggaaaggattaaaatatttttaaaaaggaattaaaaaaaaattgggcacggtggcaaatgcctagagtcccagctgctcaggagatggagacagaaggattgcttgagcccaggaataagttggaggctgtagtgaacagtgattccaccactgtactccagccagggcaatagagggaaaccctctttctaaaaagacaaaaagaaacaaaacaaaacaaaaaaacaccacatcaaaaaacccaacaacaaaatgaaaaaccaaataacagcaatacaattggagctattcgatccaaagaagtaaatgaaacataaagcaaataaaagagaaaagctaatacctgtgtcctgcaggactcagtccaagttctgctctgactccctcctggtgagccaccccttaaaaagtcacttggggcggggttactttgacagacagtcttctgtcaaagagggaggcggtaaatagcacttttttttttttaatttaacgcctttccaacaaattagcggctatgttgtctaagagtgcaaatgtcagaggtgggtacaggcagcaagaccctccccacaggggcagcagaaggaggaatgactaagggaacaagactttagtgtgctcaactacacaggacaggaaacagatgctttttacaaaagctggtggacttgaaggcagaatattttcaagttcctgtaactgcgaactatgacctgtagcctgtgagagtgactttctgtggcaaaggagcttttgtgaatgtgaggaagttaattatcttaacagtgggaggttctcccggcttatctagctagaccctcgtgaaatcccaagtgtccttaggaaggggaagcagagagagatttgagtccagaagaggaagaaggtgatgtgaggcccagtaggggaacaaagggcgatggcatgtaaacacttagcccccagaagtgggagagggctggggttcatcacaccagaatccctaacaatcagccttattttaattacccttgaaatggaaggaggccttagagagccagaggcttggaggggcaccctctgctgcatacacagatcccaactgctgtgggctccaaataattgcaccagggaaatcacaaattatcaaaaataaaggatgtaaagcttttaaaaaatattaaaagcccaacaaataaaaaaagttctaaatctataaaattgacctcagtctgtatatttagatgagtcatgtgtatatagcgtttcacttcaaaatatatgataaatctctcattcattggcttaaaaataaacacttcaatcaagtctttatcagaaaaattgaaacgttaactcaattgccttttagttcatgtgactttacaaaacttaaaacaataaagtcagttttaaaaattattagtaaagtaaaagaaaaatatcttcacaatgtagacattttgtccacatgagacatgtgaaatattgccattactaaatatttgcaggtcaaaaactgtttccaaaacattttaaataatcatctggcctgtctgttttagagcattcaattctagctgaggtctggggacatgtgaaaggagccacggcccgactccgtgctgggaagagtcagacattttccacagctctgtcctttgctgtgggctctgcaactcctaccaattaaaattgcttacgtttttgttttatttttactaaagaggggttcctaaaagctaacattatactgagtatatgtaactaaaactactaagaaaacaatttcacaattatacaaatgtgccaagtaaatgaaaaaataaactgtattttaataaaggttataaaaagaaaaacatatagtggtgtgaggactgtctcaggtcttcactgagcaagggatcatgacattctatggcggacagctgaccttggctttctgctcctcttgattatgtctactaagtgacatacttactctttttccacctgtcttgcctctaagggtaacaggttttatgagatccctcctagtgctttgcaggtcagcctccctttgctgcattccaattttactgcctataccctccagctggcttttgatgacaaaagtcctggtcccagccattctcagattctgtcatccccgtgggcactatggagctcagcactatgggaggttccccaaaaatctcgttttctatgaggaatggccaccacctgcatctcagtgatgctagtgacccctttcctactcctgtgctcactggtcctcatgaagatcctggttggtctgtagccccctatttttcctattaaagagaaattacagtaagacccatttgtgtgcaaaatcaattttaggcttattacacttggcctgataatttgcataaaatgcagcaagaattcatcggccatataggctacttttgagttaattttcctgggtttttacctaaaaatatactattttggttagagtcttgtgaaaataaccaatgtgttcaattgttttattttaaaaggctcttactgaacactataaatatgtataagttgaatatacaaactatattgtcataaaatcacaacccaaaatgtggagaacgcagagggaaaggtaaatttgctcgcaaaaacatacttcacccaaataactggaaaaaaaaaaagactttcatgacccttctttaaccagagcagcagctttcaaacaaggtgtttgccttggaaatgccattcacaagccaaacggcccttgagagctgtctgtcaggcactgtagaatctagcagctcctcacagagttagaaatagtttcaggaaagagattccctgcttttagtaactgcactttatattcccagatagcgagattgtatgtaaaccatttttatcttattctggaactcttttgggtactttttttttttttttttaaatgatggagtctggctctgttgctcaggctggggtgtagtggtgcgatttcagggtatgagaaaatgcagctggacctggctctttccaggaagaccctcacagccaaggagtccaaagcctggggttttcatctaattccagtgtgactggggtaggagcagctttggtgctgggtgtgtgtgtgtgtgtgtgtgtgtgtgtgtgtgtctatgcctgtgtctgtttagggtgttaggctcgtggttgtctagatacaaatgtcccagggctcaggagccccagggttatgtcaggggcaccagatgaaggtgtcaacagaagttagggcacaagggacaaaggtgagagcaaggttagattcatttaggtgcaagaaatcatagagggaggagggagaggaagccctcctgctaccaccgaggaagaagcgcagcttaaggcagaaagcctgtccggagaggaagtgagtttgagggcagggctctctgggtaaagtacggtctgggacaccagcctgggggaagggtacagaatgcagagtggcctggcgtggggactaagaacagaggagagcagctttcactgggagggtcagtgttttcagtgtccagcactgagcaaggtgagatttgggcagcttgctgtgaaataaggtcaggctctggcattgtccccattgcgtgtgtgtgtgaggggcactttgggagagtgaactctccacctccatcctctcatacgtccttcaaccgagcttgccagttaccctgattccaaggagatctatttattgttgacaatactggatcctagcagaggctgggtaggagcctgggcacaagcaagtggaggagggggcctgggcctgaaagacctgggaggtttgagagaggacacagcccacagaatggagcagatggggtagagtcggcaagcattcagggctcctagtaagttggacaatggagaccctgaaagatccagtaaaacggggagaacaaacaggtccccaactcacatccttgcagtgcctggagcttcagactccagacaggtggggaaggaaaattgagggatgtgaacatgttggagaatgtcgtgccctgaagaatgaagaaaaggggggtgaggaatgagagcaggaacggcttccagtgcctggtgcccaggagaactcagaaaatgggtgtggtggagaggaatcgaggaaccggaagtggtggaagtgtgcagggcccctccgagatcactgtgactgccaggcgtcctccctggctggagagcttcactgtcctccttcccagccaaaatgtgtcccttgaaagcttcctccccaatggactggttctgggtcctatatatttgaaggggtggcctgcctctccacacctgtgggtatttctagttgggtgggaggagagacagagaaaagaaataagacacagagacaaagtataaagaaacaacagtgggtccaggggaccagcactcagcacaccaagggcctgcaccggcaccggcctctgagtttcctcagtttttattgattattattttcattatttcagcaaaaaggaatgtagtaggagagcagggtgataataaggagaaggtcaatgaaaaacatgtgagcaaaagaatctatatcataattaagttcaagggaaagtactatgcctggacgtgcactcaggccagatttatgtttctctccacccaaacatctcagtggagtaaagaataacaaggcagtattactgcaaacatgtctcacctcccgccacagggcagcttttctcctatctcagagttgaacaaatgtacaattgggttttacaccgagacattcagttctgaggggcaagcaggagacagtggccttcctccatctcgactgcaagaggctttcctcttttactaatccacctcagcacagaccctttatgggtgttgggctgggggacagtcaggtccttctcatcccatgaggccatatttcagactatcacatggggagaaaccttggacaataccccgctttcaagggcagaggtccctgcggctttccacagtgtattgtgcccctggtttattgagactagagaatggcaatgacctttaccaagtatactgcttgtaaatattttgttaacaaggcacatcctgcacagccctaggtcccttaaaccttgatttcatacaacacatgtttttgtgagctccaagttgggtcaaagtggctgggtcaaagtggctggggcaaagctacaaattaacaacatctcagcaaagccattgttcaaagtacaggtctttttcaaaatggagtctcttatgtctttcctttctacatggacacagtgacagtctgatctctctttcctttccctacatatattcatggaccacagtcttcaaggagtccatttcctcactgtttttggtttgatttctctgaaattaggaaatgccccattgaggcacccaggattgtctttacttcccccagagcttccactcctgaggcaggagcttctcaaacaccccccaagactcaacacctaatttcaccctctgaaaccttcccatttcttaaatccaggcagggtcatggtccttagcccctcagatgctgtggagaccttctttccctttcatacattctctcaagattaaaagccacccctcctcagcacacaccccagagactcaccccaacatgcattgcaaatcaccctggaaacagtcataagaccacactcatttaataatattttatttatcaaaagacactctttctcaggtaagtgaagttctggagaggaaaagaggagtcctgatgtaaattgccctgcaggccttgctgagatcacaaggagattgttactgcagcttgtagcacaatagtaaatttcttctctggatggaagttcaacaatccagatcgtagtatattccttttcattatgctcagtccagcaaatgtgatgataacaaattccttttcatgatcatccattcagcagagaaaatgtttgtaaatgtgttttcatgaagatgtttaccataacatacaggatttaccattatcaatgcatccacaaactctgctgttgttttttatacataattttttccatcgagaagtgatagttgtacatattcatgctgttcatatttcaaccacaaactctgctggtttttttatacgtaattttttccattgagaagtgatacttgtacatatttgtgctgttcatatttcatgtttcatcatccttttacaataaataggttatattgtattttaagtttttctaactgtagtgcagaaattgtactgggtgtatacatagatatcaaaccaaatttacttgttctggctgataatgcatcatttatttcatagattatgtatttctttgacacatttcacgtacaactaattgcataaaaatgaattttcttttagtatagacatcagcatgtgcttaattcggaatttaattgttgagttaaacatcgtcattgccttttccgttgttattaattgctctggtgggaattttgttatctcatacataagacagtgtgccacaatatctcttaaaatttcaatggcaataaactttatatttaaaaacagggaatctatggaaaacacatttttttctaaaggattaaaatatttttttaaaataattttctaaaaagttaggcacggtagcaaacgtctagagtcccagctactcaggaggctgagacaggaggattgcttaagcctacgagttgggggctgcagtgaactgtgattgcaccactacattccagccagggcaatagaagttaaccctttttctaaaaaaaaaaaaaaaagaaagaaagaaagaaaaaaagcaacaacaccaaaacctcaccaacaaaatggtaaagaaaaaaaaaacagcaatacaatgtaagctatttgatccaaagaagtcaatgaaatttaaaacaaatgaaagggaaaaagtaatacttgagtcctgcaggactcagtccaagttctgctgtgcctccctcacggtgagccacccctttagaagtcacttgggtcataagttaacccgataggaagtgtcctggccaatgaactagggaggtggtaaatggcaccattttaaatttaaattcacggccttttcaacggatcagtagccatgttgggtaagagtgcaaatgtcagaggtgaaaagaggcagcaggaccctcccctagtgcttgggcaacagaaggtggaatcactaaggggacaagactttagcatgctcaagtacacaggacagaaaacatgctttttacaaaagctggtaaatatgaagagggaacattttcaagttcctgtaaccaagaactaccgcctgtaaccggtgaaagtgactttctatggcaaaagcgtttttgaaaaggtgaggaagttaaatatcttaatgttgggaggttcttctggtttatctggctagaccctaatggaatcccaagtgtccttatggagcggggagcagagagagagatttgagtccagacgaggaagaaggtgatgtgagtctgggtgcgggacagggggagaatgatgctatgtggggatctgggctggggaatgacttagctgcatgagcggagtgacttagactcctgaactagaagaaatctagggctcatcacctcagcagccctaaccatcaaccttatttttattacaggtcttccatcgacggactccctaaaaagccagcggcgtggaggggcgccctctattggacaaatagatcttgactactttcggccctcaaatagcctgactaggcaaataacaaataataataatttttttttaaatcatggaaaatattttaaaaaacaattaaaaagttataaatctataaaatctgcttctgtctgtgtgtctgtatatttagatgtctcatgtgtacataatgtttcactaccaaaatatatgatgaaaccctcattaatcggcttagaaaactaaacacctaaatattttctcagaaaatacaaaaactttaactcaaatcccttttaattcacctgactttaaaaatctttaaaaaataaagcatgctttaaaattattagtaaagtaaaattagaacatcttcagaatttagacatttggtttaaattatacaggtcaaatactgcccttagtaaatattttcaggtcataaacaactcctgtaatcttttaaataattgaattacatgtctgttttagagctttaagttctagctaaagcctggggacaaatgaagggcaccatgccccctctctgtgctggaaagagacattttctacagctctgacccttgcagtaggctttgcaactgctacctatcaaaattgcctacatcctaagtttattattaaaaggagttgcttggagttaacattataatgaatatatgtaactaaaactatttctcatacaaagtatatgaaaaagtagaatgtatttttaataaaaagttataaaaagacatgaacatgtagtttttataaaaaacagtaattttgtctagttttgcagttctaaaaagttatgttaaattcaaaaataaaaaataacaagacaagactcaaggtttaaataagttgtaaaagatttgtaaaaattagttctataaaaattttacaaaaaaaagcattggttaaaatttaaggaattattttgtttttacagaaattaaacattcattaaaaacactctgatacaaggccttaatttgggttcatgtatcagaatagcagggttttcttagaatattaatctattctttaaaagaactatgaatgttatgcaaactttataaaaatcttaccttagagtcaaactgattaaaattccatagattttacgtaaaattttattaaaaattaacttcaacaaaaataaaatttgattttctcctttaaacaaaagttttgcgtaatattaaataataaagcatttttgtttaccttttaaactataaacacacacacacatacacatacaccaacactaaagtcagctgacctcatactgtctttattggatattcttgtttaaaaaactatcttctttggaaaataaagttttttattttaaaccatattttaaattatcattttgactaaatccataacatacagtgatctgtaataattctattttataatatcaagtgttttgaagaactccaggaacagccatgagagaacactgtggtttagtaacactttatttcctcagtttgaaaatagttgtctttcttggggaggccggtttcagcagatgaaaacaagagtcatgatgaaaattacccagcagtggttagtgtgaccataggaacattgtcatcaggtcagcagaaaacatatcagcaaatttttctcatactggcagtgtgtaggggtggatgtttacagttcctgaagccccagtggtcgtgtggtcttttagttttgccatttataggcaacttgtggtaactagctcaattagacacattccttatcacaaggacagagggctttctgtatcctagggttcttgccttggcattccagaagaatcaggtcacacgtggacgtggagaatgagtgcaaggttttattgagtggaagtagctctcagcagatgggggagccagaaaggagattggtttctccctggattggggccgttcagcagccctggctctcctctgactgccccaggcaaaatccacatcgttctataagtcggtgccctgctggtgtgctggtgcctgttgtcatgttcctcttcatgtccagccgcctgtgtgttcctccgctgatgtgctcctctcgacgtcaagcctcctgtgtgtctgactgctagggtcttggggtttttataagcacaggatgggtcttagcaggccaggatgatcttgggaaagacaacattcggtcaggaaaacaaaaatgcctgttgtcatctaggtccgtggggacaagcccaggtgtggagcttttagccagggaccacagcctcctgtatccaacacttcccttcaccttttctatatcattcaaagggatcatgcccttcccatcccagcacttcactttcatgtcatttgccccctctgaagaggtacatctaactgccattagaatatggatgatgaccagtcttagctgcttcctgctgaaagggggcattgttttgggggaaaacggcagtcagattcctcccaggggtctctataataaaagatcgaggtggctactttcaggaggtcctctaatgtactatctggtcccaagtcccatttctgcaacctcctcctgatgtcaggagctgcctgagtaataattttatcctttaggattatctgtccctcgattgaattaggagatagagaggtgtgatttaccaaggcctctcttagcctctccaggaaggcagtgggattttcatcaaatccctggttaattatggacaacttagtataattgagaggcttggtcttagacctacgtaagccctctattatgcacacctgaaagtgtctcctcttccagtcttccatctcattattgggatcccatttagggtccttcactggtgctacttctcttccagttggataatattcgctcccttccctgatgctataggtgatgcaaagctcatccccaaatctctctgctgctggcagagcagcctgcttctcagtgtctatcaggttctgactcaaaagtaacataacgtctctccaggagagttcaaatgttagggtgaaattctggaaagcttctatatatctatcagggtcatctgaacacttgcccagatctcccttaatttgctttaagtcttgtagggaaaagaggacttggaccttactgggcccaaattcactgggcatctgtaggaggggcaagagtgagactgggcttgtttgggatgaagatttctaggaggggccaggtgagaggctgaagctggatacggaggttggggtggacccagaggagcagggcttgagggagctggcacgtcagctgggggtgcgtctgggactcgtgtctttaattccctgggcttgaccctggcagccttccccgagacagcaaacaggagggctggaacaatcctacatgtcagcaaaggtctggattgctttgcaaggtatagaaagcctgcacatttggggcctcagaccatgtgtcctcacatccagagaaaagttctaattgcaggatggtattgaaatgaatggtcccttcctgaagccaagccagtccttcctgtaaaccataatttggccaaacctatgtgcggagggctatgagatgcttttcctctggattctgagggtcaaaacagtcccaatggttcaggatacactcaaggggagtacaagctgggggtggtgaggagaactggctgcccattctgaaagacagggaatagaggtgttcctcatttcccttccttcttttggcaaaaagctcagggtgtgatggggagggaaagcaagcatcttcacttcactttccacctcttacccctgcgccctggcaaccttggcaggtgccggccacaggtacaaatgcggtatgtacccatgaagcagggagaacctggagattaggaattaactgccctcacctatgtttccttttctccctgctgttgaaaaactttgagttccctgggcctttttatcccatgaggcatggcctccttctgtgggatggggttcagtcagcaggaattggtcctgtccatttacattgtgcctgttgcctggctttgaattcctcagacctgctttctctttctagggcctcagcctgaagcttggaattgagtttgggactgaaaaagcatttcagaggctgtttatatccatttagtgcctcaaataagccctgctgaatttgcaattatcagccagcaggggtcactcctctgttaacttccctattagaaacagagcggtggggattctcacttagaaaagaaaaaaagagaaaaacagttaaagaggcaaaaagtggggaatgctgggggaagaaccccttgcttagtgcaagtgggcccctctaatccttataactttcccatccttcccccagttcagaccaggttgaattccttggccatggaaggaaaggttccattgatgcagtgggtgagaagcactctgtagggtcctggctaccatcggttttctcacacccccctcatcccaggcagtggagggagacacttctgcgacattgctccccctgccccttcatggctattgggtgtggcctttgcctgctgcaggcatgcctaggtgctggagctgggagggaaaagggtaaggagaggtgccctggaagccgctcatgcctggggctgtcaaggtggaggcatacatggcacctctaggaaaaattggtctgatttgcacctttggcggctgagccaaatgctcattttacttagtaacattgcctcagcctgtagcaaaactcttaacattataaaggaagagataagatccatttcaaataatgtgtgagagagaaaagagatgaaaggaaaacagagtcttttacctgcaggaaagggagagaagtggcagagttttggaagaaaggcaggcccaacagtttcccattcactcacactcaccttccgagatcccagacgagccaccagttgaaatgggaaaagtttccttgtccccctcacaggaggtggagtgggggtgtggcttgcttctttagtactccgctgctcaaacctctagggaagcatacagactggcaagttgtggggctacaaccccatggcagcatctaggggtagatgtttacagctgctgaagccccagtggacatgtggtaccatgtgctcttttagttttgccatctataggtggctttgtggtaaccagctcaattagacccattccttaacccaaagacagagggctttctgtatcccgcggttgttacctaggtgtaccagaaaaatcaaatcacacgtggtcttggagaatgagtgcaaggttttattgagtggaagtagctctcagcagatgggggagccaaaagggagaatagttttcccctgaagtcgggttattcagcggcccaggctctcctctggctgccccagccaaactctatgtcaatccattggtcggtggcctgccagagtgctggtgcctgttggtggattcctctcagcgtcgagagtttttccctctcaggaaagggagagaagtggcagccacccatgtgttcttgcactgatgtgctcctctcgacgtccaacctcctgtgtgtctgcctgctagggtcccagagtttttttaggcacaggatagggcatggtgggccagggtgatcttgggaaatgcaacatttggtcaggaaaacaaaaatgcctgtcctcatctaggtccaggggcacaagcccaggtttggagccctagccagggaccccggcctcctctacccatcactttccttcaccttttctgtatcattcaaagggaccatgcccttcccttcccagcacttctcttctgtatcaataggtgatgtttttaaaatttcccaactctagtgcaggcatggtactagacatatacatagaaataaaaccacacttattcttctggctggcaagacatagtatttttgccaaattatgtgttgttttgaagcattttatgtacccctggtcatataaaaataaagctattttgttcagtacaaacagcagcattttctggattagaaagttaatcatcttaaaagatcatcacggatttttccattgcactcatcactaattgctttggcaaaaaatttcttatctcacgcatgacaaaatcagccgcagtatctcctagtaatttaatggtgatgatctttataaaggaaataagcacatcaagggaaaacataattttttttaaaaaaagagtaataaaactttttaaaagtcttttttaaaagactgcttttctaaaatagtaaaataaaactccaccaataaaaccaccaacaaaacagaaaagaaaaaataatgatatgatcggagctatttgatgaaagatggtaaattaaatttaaaatgattagaagagaaaaagcaatacctgtctcccgtaggtctcagtccaggttctgctatgcctttctcctggtgagccacctatttaagagtcgcttaaagcatatgttaatccaacaacagcagattaaaaaccaatgcaatctgaactatttgatctaaaaacataaataaaatttaaaacaaataaaagagaaaaagcagtacctgtgtcctgtaggtctcagtccaagatctgctctgactcccttgtggtgagttagccctttagaagtcacttggggtggggcatatgttaattccactaacattggttctggccaatgagtcaggaaggtggtaaatggcaccttttcttcttgctgatttctttcagttcctttggagtctggacattagtcctttgtcagatgcctagtttgtgactactgtttcctatactgtgggttgtgtgtttaccctgctgatatttcttctgccttgcagaagattttcggtttcattaggtcctattgatcttattctatttttatatttttgcgtttgcttttggggcattagtcatgactacttggcctaagccaatgtctagaaaagctttttggatgctatcttgtagcatttttagactttcaggtcttagatggaagtttttatatgctttgttaaagatcaggtgactgaaagtaccgggctttgtttctcggttctctattctgttccattgctctatgtgcctatttttatacttcctgcaccatttattgaataaagtgtcctttccccaattagtgtttttgcatactttgttgaagattagttgtctgtaagcatttggctttatttctgggttctctattctgttccattgctctatgtgcctatttttatacttcctgcaccatttattgaataaagtatcctttccccaattaatgtttttgtgtactttgttgaagattagttgtctgtaagcatttggctttatttctgggttctctattctgttctattgctctatgtgcatattttataccagtatcatgctattttggtgattgtagccttgtagtataatttaaagcctgccttcagatttgttctttttgcaaagtattgctttggatatgcggtcacgtttttggttttgtataaattttaggattcttttttctagttctgggaaggagaatgatgatattttgatgagaattctactgctctgtagatggctttggagagtatggtcactttcacaatattgattctacctattcataagcttataatgtgttcccatttgtttgtgtcaactgtgatttctttcagcactattttgtagttttccttgtaggaaacttacattaacctacttggttaagtatatttctaagtattttacttattaaaaattctcagggaaatgcaaagtaaaactgaggtgggaaattaaagaaaaataaaattaaaaagaaagggaaataagctttcttgtattaagctaacttgtcccagaggcagcaacaggcacagcccagacccaggaaaagtcttgataatattatttattgtattctggagactcttccagcactccttcaatgtagggagaagaaaaacaaattttcctttgttttatggtatgagtttatagattcttgttctctttaactagtaacttcaagtattctgttttatctaagaagtatggcaaaggtcatgagaagcctgagcaggcctgaactacagctctctaggcaccatagtgaagataaaccaatgcaagcctctttagagcaaaacctagataatagacatctgggttgcatagcaacagttatgtgcaatcctgagttatgaacctgttacaatttgattaactgtctttttcctgcctctgtatccctgctttcacaccactgtaagcttgcttcaagctggcccacccccttttgtgaagtgtgtataaaagtcaagtgctgtctttgttccaggccctgtctttggacgtgagtctgctgggcctgagagcactcaataaaagattctcctgttttaacccaaagcctctctctcatcctcctaaatcccacaacaaaaccacaatgagatgctatcttaatcttgctagaagcccataatttaaaagtcagaaaacaatagatgttggcatagatgtggtcaaaagggagcactttgacactgctagtgggaatttaaactagtccgaccactatggtaaacagtatggggattccttaaagaactaaaagtagaccattcattccagcaatcccattactggctatctacccaaaggaaaagaagttattccataaaaaagacacaagaatatggatgtttatagcagccgattcgcaattgcagtgatatgggaccaacttaagtgcccatcaacgaacgagtggataaagcaaatgtggtacaccatggaataatacttgataataaaaaggaacaaaataatgtcctttgcaacaagttggatggaactggaagccattattctaagtgaagtaactgaggaatggcaaatcaaatattgaatgttttcacttttaaatgagagttaagctatgagaatgcaaaggcataagaatgatataatggacttggggactcagggggaaaggttgggagggggatgaggaataaatgatgacatattgggtatattatacactgctcaggagacagatgcctcaaaatctcagaaattaccactaaggaacttttatccacataaccaaaaaccacatatattccacacactattgaaagaaacataaacattattttaaaaaataaagccacttttaaaattagcaaaataaaataaatatgtcttcagagtttagatattggatccaaattagacagatcaaatactgcctttactaaatattttcatgtcattaacaacttctaaaacctttcaaacagttttttgacatgtcttggaaccatccatttctagctaaggcctgggcacctgtgaaatagggccatgcccccccttatactgggaagagtaagatatttcaagactaagatgttttctacagctccatctttttctttaagctctacatcaaggacataattaaaattggttgtctcctaagtggtttactaaaaatgcatacttaagagttaccattataattaatatttgtatctaaagctacttaaaaattttcacacacaaatctgactgaacaagtaaaatatattttaagtcaaagtttataaaaggacatgagaacatagcttttatgaaaaaattagttttgtcaagtttagaggttttcaaatattttaaattcaggaaataaaataacaaaaagacaaaagaaaatggttgaacaacttagaaaaggtttgttaaaattcatcttataaaacaatctacatgtaaaaagtgggctaaaatttgaaagagattatttaggttttccataaattaatccagaaggggtaggaagtcttaagaatgaggaaggacaggaggaaggggaggtcatcctgacactgcagaggcagaagtgcagctgaaggtatgaaggctaagaggggaggggagtttgagtgctgctgcctggctgtcagagcagaggagggtcctgggcaccagacttgaggaagggatgaaaatgctgggcagacctgtagtgggcccttgagatggcagatagtggtttccagagagagggccattgttttccagtgcccagcactgagcagagagagttttgggcagtgtaaaaaaaaaaagagaacttacctctttctcgttttagaaaaagaacagtctaagaatatcagcagggaaactctcagtgcttcaaggggttaaacgcccttttggctttcttgtgttggtttcatcatagaggaggagaaacttcttggaagtgttcctaaaaacacaacacgtctgcttctcctttcaaaaaaggaagtgctaaaacacgaacactctagatccaaatattaatacggatgtctaaatgcttccgttttccaaggggcagaaagctaaaggttgtaacctattcatttcagtcaaagttggtgaaagggaagcaaaggaactgggtggggcttggaaggatgacgaagctcaagctcattggccagcaacctctctcctgggggcgggaggggtgagcatacgtcattgctttggcttctataaaatgaggaggactcaccgagtgtgaagagtccttctggtgattgcagctgagagcacactcacgacgttctgcaaggattctctgattatgattctgaagggaaaagcgatggaatggacagcagagattgtaattttctttatcttgaattacggaagaaagtatctaggacagaaatccacgacaagtccttggaaccagcagatctcttcgttcacggagacgttgacgtattctctattgaagaagattcttaccttcttactggacaaggttttgtcagttctgcgtgactggattgtccgggagactctgaggaaactgatgtcacatgtttttccaaagaagatgtttctggaaccaacaactgtgattgtggtttgaggacttctgagagttccagtacaggaaataagcagaacatcagctggaggctaaacggatccagacttcactcttcacttcccttcctattcagtctattgtgcctgctgactgagaagcttggctggtatgtgagcaaataaacggaactattcagaaggagatgttgacatattctgtattgaagaagatccttatcttctcacctgacaaggttttgtcagttctgtgtgactggattgtccggaagactctgaggaaactgatgtcacatgtttttccaaagaagatgtttctggaaccaacaactgtgattgtggtttgaggacgcctgggagttccggtatgcgaaataagcagaacatcagctggcggctgaagggatgcagcctccactcttcacttcccttgccattccatctattgtgtctgcctgactgagaagcttggctggtatgtgaggaaataaacggaattataaacaaggagattgtttctcatctacttcattctgttgtggcttttctattttggggttcagggtgtgtgacaaggaccaaggagatgaaaggtttcatgatggagaaagcccaggcaatcagattgaagagctatccacagggaatcttggctgctgaggggctgcaccctgcaacggactgaccatatgacagaaaagggttttaaaggctcaacttctggactgagaacccagagtaatttgggaacctcctctgtgaggagatatgaaagctgggaatcatgacatccctaggaatggaaggcacatttcctgatggaaggggtgctttggaaaacaggagcagagtagacacagcagccttgtggatacgggtgggcagcatgcatgggtgatgtgaacgtggagtgtttgtgatcgaaactcaaaatgtctgacaaagtgaaaacctagaaaccacaatgaggaggaagagtttgtgagggcaatcactctccccatgtgtgaaaatcgggggctcttaaaatctcatctggagaggtgcagtctaccaaactctgggactttagcctccccttttaaaaaaccgtgcatcaataccaacgtccgaaaccacagaaataacacctggcttgcatggagacaaggacaaaaagccgtcatgatgagttgttctgctcacttgctgcctctgttcagtgcacaggatattgtccacccactagcaggctactgcaagagaagtgtgcaatatgttccctatgtgccatatatgtgccatatggcccatatgacaactgagtcagaaaatatctgatgccctcagagttacactccacctggagcttgcccccagccatccaggacctaggctccctaccctgtccaattttctggtgttttgggggcttcattctctaaggtgtgcccactctttactcaaaccaaaacacccacatattcctgcccatgaacaaccaatcaaccacttctcagttccacatcctgctgttgggtctctagtggtgacactgtaactcccaggtcatagtggtgacactataacacctagctaaattgatgccttgtctctaggaggccatgggctcctgcaggtctcatctgactctctgtagccttccctgacaatgctcacaatacccaagccagagccacattgacagcaagctgctctcatcttacctttgccagacctggccactggaaaaggctgaccctcatcctgcaatgcctatacctccaacctttgtctcaagctggtgtcctggagggacttctaagcagaaaacagattcagactcccatcctctcctgaatggcctcatatccaattctcagaccctcagccttcattgtaaggacacttcatccatgcccttgagtattctgtctgcactgtgtattctgcaatagattctcctccctctgcgaccctcaactccttccgcagactttttgttttcttgatcatctaccatagtcttccactgggacactgccaagcccattctggagagtgagttgtgcaagtacactgccccccatctacctttcgggaggtgtatacacccttctttctcccaggtctggaggctttctattttcatcctgaggcatctccacctgctcttggattcttcaaattgacaaccaccagttaacaagaactatgtgtcaccaaatagccaaacaatggcaattacaaaaataaaattaatagctgtaacccccattagcaaggatacacaaatcaaatcagggatagtgggtgaggaagtctgcctaacattcaaggaaggattctgaagtgatacaaaatcattgcctttgctatctttagaatggacactttcagccaggcacagttgctcagcctgtaatcccagcactctgagagccccagttgggtggatcacttgaggccagcagcttgagaccaccctgggcaatgtgcagaaaccccaactctactaaaaatacaaaaatagccagttattgtggcacatgcctgtaatcccaactccttgggaggctgaggcacaagaatcacttgaatctgggagccagagtttgtaatgagcgaagatcatgccactgcactctagcctaggcattagagtgataatctgtctgtggaaaataaaaacattcctcttcaaagttttcttctttaaatcataaatgttggaattaatatatcctctttgaaactcactttcttcaagcttctttatttgatggtagtaaatctttgttaagctttatgaggcaagagtaatggaagaagcatattatatatatttatactctaacctcagtgcttgttctagcaagctcaggcatgcgtgaatgtgcccaggcatgttccagcccataccttatatcctttccttattgggaaatgctgttactcctataagcattcttgtaagcaacttcctctttttctttgtctccactatctttacctattgaggacagttttaggttcttagccagttggatgtagcatagactgtgaggtccaaccccagccaatggagatagcacacagcagtagcgacctcatgcttaacagataaatattcctgtctccctttgtttggggtgctctcagctgatgagcaacaccctttctaaagaaattaaagttgtcttgctgagaaaacttttggtctaaatgctgattcttccttgcagcactgaagaagaagcaattatttccaacactttctcatacacaaaaaaagaagaaggtggaagaaaactttcttgtgcaccctatccctcactcagaaagacaacagaaggctcctagtggcaagccctagaggattcatttcttttgggaaccctcttggctgggatactaggactcaggtcaaactcagcattttcagtgtgtgggaagtgtgcttgggtttcactgttacttccaataatgtgatttggtccttggggttcaccaaattttggtatggagtggtgaaccctgttaagtttaagtgtctataaaattaacaaagcaaaataaccattctgccccatggttcagagaccaaatattgtgtaggaaatgctttagcgagagaaacagagaagaataaaaaatgtcctcaagcgctgcattatttcttgttatcgtccagatcttagaggaaaggctttcattttccctcattcagtatgatattagctgtgcatctgtcatttatggcttttattatgttggggtatgttccctgtgtatgtagttttttcagggtttttgttatgaagtgatgttgaactttatcaaacgtttttcagtttcagttgaaacgatcatatgctttttgtccttcattctcttgatatgatgcatcatgttgatgatttccatatggtgcactgtccttgcatcctgggcatgaattccacttgatcatgacaaatgaatttttaatgcattcttgaattccgtttgctggtattttgttgaggatttttgcatcaatattcatcagagatattggcctgcagtttctttttttttcttttttctttgttttgttgtttgtttgtttgtttgttttgatgtgtctatgtctggttttggtatctgggtagtagtgttccatccccttttattttttagaataatttgaataagactggtgttggttctttaaatatttggtagaattccgaagtgaagtcattgggccccgggcttttctttagtggaaggctgtttattatggcttcaatctcgttacttattattggtctattcatgttttgaatttgttccttatttaatcttggtaggctgtgtgtatctaggaatttgtccatttcttttagattttcaaatttattggcacataattgcccattgtagcctctaatcgtcatttgagttcctgcagtaccaattataatgtctccttcttcatttttgattgtatttatttggatcctgcccctttttttcttacttaggctgcctaataatttcttaattttgttgaactttttcttttgtttgtctcgctctgccaccaggctggagtgtagtggtgtgatcttggctcactggaacctccgtctcccaggttcaagcaattctcctgcctcaccctcccaaatagctgggactacaggcaagtgccaccactcccagctaatttttgtatttttagtagacacgggttttcaccatgttggccaggatggtctcgatctcttgacttcataatccacctgcctcagcctcccaaagtgctgggattacaggcatgagccactgcgcccagcctaattttgtttaaattttcaagaaatcaacttcttctttcattgatttctgtattttttatttccattttatttatttaaactctaagctttattctatcttcttctcattttagctttggtatgcttattgcctctctagctctttaatgtgcattgttagattgtttatttgaagttcttcctctctacaccataagacgtaagcatgtcctcattatgtcataagatgtaaccacttacagctataaacttccttcttagttctgcttttgctgtatctcataggctttgttatgttgtgtttccattatcaattgtgtcagaaatttttcaatatttttcttaatttcttcattgagcaactgatcatttgggagcatatttttaaacttccatgtacttacatagtttccaaaatacctcttgtgatcaatttctagttttattccactatggttcaagaagatgcttgatattatttcaattttttttcacattttaagatgtgttttgtgacctaacatatggtctactttttttttttattaaactttaagttgtggggtacatgtgtagaccgtgcagttttgttacataggtatacacgtgccatggtggtttgctgctcccattaacctgtcatctacattaggtacttctcataatgctatccctcccctaacctccaccctctgacaggacctggtgtgtgatgttcccctccctgtgtccatgtgatctatttttgagaatgatccatgtggattagaatgctgtggaaaagactttggattcctaatatccagggagggagacgatgatattactttcaatatcacacgggtgtacacactctctgtgacattgttcctaatatccagtggaagagaggatgatataacacccagggagggagaggatgatattactcttaatattgcagggtgtgtacccatgcctatgatattgttcctaatatcaggagggggagaggatgatattactcagaatatggcagggggtgtacacacactctgtgacatggttcttaatatacaggggagaatgggacaatattactctcaatatcgcagggggcgtacaaccctgtgatttgttcctaatatacaaaaggggacagtatgatattgttcctaaaatcgcagaaggtgtacaacgccctgtgatattgttcctaatatccagggcgggagaggatgatattacccccaatatcacagggggtgtgcactttccctgttacattgttcctatgatccgagtggggggaaatgacattagtcccaatatcgcaggatgtgtacactactcccccatgatattgttcctaatatcaagggggagagaggaggatattactcccaatatcgcaagggaggtacatcctccatgcaatattgttcgtaatattcaggaggagagaggaagatattactctcaatatcgcagaaagtggacacccaccctgtgatgttcttcataatatccagggaagcagacgattatatgactttcaatatcgctgggagtgtacatcccttttgggatattgtttctaatatccaggaagggagaggattatattacttccagtattgcagccagtgtacacatttcttgtgatattgttcctaatatccagaaagggaaaggatgatattactcccaatattgcaggtggtgtacacccccctctgatattgttccttacatcaaggaaaagaaagaagaatattactcccaatatcgaagagagtgtacacccctcctgtgatattgtatttaatatccatggggaaagaggatgttgttactcccaatatcgcagggggtttacacccacactgtgatattgttcctaaaatccagtgaaggagaaaataatattgctcccaatattgcagggtgtatacaggccctcccccgttatattgctcctaatatccagcggtggagaggatattactttcaatttttgcagggagtgtgtaccccctctctgatatttttctaatatcaaggatgggaaaggatgccattactcccaatatcgcaggaggtgtacatgccctgtgatattgttcctaatatccagggaggtagaggatgatattactttcaatattgcaggggctgtacaccctctatgatgttgttattaatatttaggttgggagaaaatgatatttttcctaatatcctgggaaggaaaggatgatattactgtaaatattccagggagtgtacaccttcctaatattctaatattgttcctaatatccaggggtgggagaggattatattactcccaatatcgcagtgggtgtacacccctcctgtgatgttgtttctaatatccaagcgaggagaaaatgatatcactctcaataccgcagggggtgtacaccttccccatcatatcgttcctaatattcagagggaaagaagatgatgttactttcaatatcgcaggggttgtacacaacccctgtgatatttctcctaatatccaggaagaaagaggatgatattgctcccattatagcagacggtatacgcctccctgtaacattgtttctaatatcaagactgggagaggatgatatcacttccagtatcgcaaggggtgtacacctcccccgtgatattgttactaatatccagggggaagaggataatattactttcaatattgcaggggctgtacacccccgtgatattgttgttaatatttaggttgggagaaaatgatattagtccaaatatcgcagagagtgtacacacttccgataatattgttcttaatatccatgggggagacgatgatattacacccaatatcgcagggggtgtagtctccccttgtgatattgtccctaatattcagggaagtaaacgatgatgttagtgtgaatattccagggagtgtacaccccctttgtgatattgtcctaatatccgcaggagagaagataatattactcccaatatcgcagggggtgaacacaccccctgtgatattgtttctaatatccaagcgaggagaaaataatattactcccaatgtctcaggggatatacaccttccctatgatattgtttctaatattcaggtggaaaacgggtgatattactcctaatatccaggaagaaaggggattatgttactccccttatagcagggggtatacacctcccctgtaatattgttcctaatatcaaggctgggatatacgtggggggaaggatgatattactcccaatatcacaggggttataaaaccttctgtgatattgctcctaataaccatggcggaagaagatgatattactcctaatattgcaggaggtgtacactcccccattatgttgttcctagtatgcagaaaaggagaggatgacattattgccaatatcgcagggtgtgtacaccacccatgatattgttcctaatatttagagggacagaggatgatattactcccaatatcgcagggggtgtacacgcatcccctgtgatattgttcttgaaatcgaggggaaagagaattatatttctctaaatattgcagagggtgtacaccgccccctgtgatattgttcctaatagccgggggcggggggagataattaaattactttcaatatctcagagagtgtacatcccccttgtgacattgttcctaatatccagagcaaaagagaatgatattcctcccagtatcgcaggaagtgtacatttaacctgtaatattgtttctaatatccagggggaagagaatagtaatactcccaatatcgtaggggttgtacaccttttctgtgatattgttgcaaatatttagaagagagagagaatattactcgcaatatcacagggaatgtatacttcccctgtgatattgttctaatatctagaaaaagagaggataatattactcctaatattgcagggggtgtacacccccacttgtgatattgttcctaatataaaggaaggtcgaaaaacaaacggggagcccagggggaaggaaggcaggcgaggaagaggcagcgccggggcgccggagggagcagccgggccgcggaagcgcgagcacgagaccggtcgcggtcgcagtcgcatttttgccgttgtcgcggccgccgccgccgaggcttacccggggatgtctgagcccgcgcctcgcggcccccaagctccacgctgcgcccgctgtcccggcctctaagggccgccacgtccctgcggcgcgcgcaggcagaaagcggcttcgtgccggcggagggggcccgggcgggccgggaaaggctgccccaggccccgcgcctaccccatcaccgcggccggcgccgggccgggaggatgagcggtgtggggctctgaagcatggagggggttttgtacaagtggaccaactatctcacaggttggcagcctcgttggtttgttttagataatggaatcttatcctattatgattcacaagatgatgtttgcaaagggagcaaaggaagcataaagatggcagtttgtgaaattaaaggtgacagctttggaggggaccacccttgattggatacataaattctgttcattcagcagacaacacaagaatggaattaatcattcctggagagcagcatttctacatgaaggcagtgaacgcagctgaaagacagaggtggctggtcgctctggggagctccaaagcatgtttgactgatacaaggactaaaaacgaaaaagaaagaagtgaaaccagtgaatcgctgaaaaccaaaatgtctgaacttcgcctctactgtgacctcttaatgcagcaagttcatacgatacaggaatttgttcaccacgatgagaatcattcatctcctagtgcagagaacatcaatgaagcctcttctctgcttagtgccacgtgtaacacgttcatcacaacgcttgaggaatgtgtgaagatagccaatgccaggtttaaacctgagatgtttcaacggcaccatccggatcccttagtttctcctgtgtcaccttctcctgttcaaatgaggaagcgttctgtcagccaccctggttcttgcaccagggaggagtagccactgtataaaagaaccagtatctgcacttcaccgactctcccagcgacgccgaagaacctactcagatacagattcttgtagtgatattcctcttgaagacccagatagacctgttcactgttcaaaaaatacacttaatggagatttggcatcagcaaccattcctgaagaaagcagacttatggccaaaaaacaatctgaatcagaagatactcttccatccttctcttcctgaagaaactgtagtgtccaactttctctaagtattgctatgcaaaagctgctgtaattgaactattgttatagggagtagttttttcccttaggactctgcactttatagaatattgtaaaacagacaaacaagaaaacaaaccacatacttttgaagcgtgttttatctttatatagtttgtttgcaagagtattttcctaataacttcacagtatgaatgtgcatcttttttttctttttttaacaaatgatggtgtaacattttgacatccataaggacaaatgtagatatttttctaaaaaaccgtgaggggactgacagcttggtcagggtgtattgtagcttataaacatgaaatcttacaaggtttcagtttgacagaagtgtgatatatgtaacttgtgccatggaccaaatggtcactttaccacagctaaaaatgagttatgatagcagcttgatggtgattgcattgtattcctttaatcaaaaaggaaacgcaatattctaagtatctttagcccaaataccatgacatattgagcatctttaaataaccagactgtattgtccttcatatgtgaagttgacactactgatttgtcaataccaaattttgggttaaagtgtttaatttttatttatttattttcttgttgcctcaaaagatgattgcattctaacttttgtgacctaccaaatttaagatgtgtatacattgttctttacgttgttctagaaaagagattttaatgctgtagtgacttagctcacttacatcagagaaataaacaactttcaatggaaaaaaatatatataaaggaaggaagaggatgatattacttctcatatagaaggggttgtacaccccccttgtgatattgttcctaatattcagggagggagaggattatattactcccaatatagcagggagtgtacacccccccccccgtgataatgttcctaatattcagggaagcagaggatgatattactttcaatatcacagggggtgtgctgtccccctgttatattgttcttaatattcaggggggagaggatattattatgcccgatatcacaggagaagtacaccccacaagtgatattgttcctaatatccaggggtaaagaggatgatatcgcaggtggtgtacacccctccccgtgatattgtttctaatataaagaaggagagagcatgatattactcccaatatcgctggaggtctacaccccccttgtgatactgttcctaatatccaggaagggaaacaatgatattgctgtgaatattccagggggtgtacacccctttgtaatattgttcctcatatccagggggtagagaggatgatattactcccaatatcgcagggggtgcacggccccactgtgatattgtttttcatatccaggaggggagaggatgacattactctcaatatggcagggggcgaacaccccctgtgatattgtgctagttaggttgggagaaaatgatattactcccaatatcgcagggggtgtacaccgctcctgtgatattgttcctaatatccatgacgggagaggatattactcccaatatcgcagggggtgtacctctcccctgtgggattgttcacagtatccaaaagggaagaggatgatgttactcccaatatcacagggagtgtacaccaccattgtgatattgttcctaatagccagggaagaaaacgatgatattattgtgaatattacagggggtgtacacaccccctgtgatatggtttttaatatacaggttggaaaaggatgatattactcccaatatcacaaaaggtgtacacacccccccatgatattgttcttaatacttcggtggggagaaaatgatattagtctccatatcacaggggtgtgaactcctccggtgatattgtttttaatatcaagaggggaggagatgatattgctttcaatatcgctgggggtgtacatccctcctgtgatattgttccttatatccaggcgaggggaaaataatattactcccaatagtacacaccccatgtggtattgttcctaatactcagggggaaagaagataatattactttcaatatcacagggtttgtacacctttcctgtggtatagttttcaatatccagggggaaggtacatgatattactcccattgcagcaaggggtgtacacacctcctgtgatattgttcctaatatccagaagtggtgaggatgatattactcccagggggtgtacaccccacctatgatattgtttctaatatccaggggaaaagagtgtgatattatgcccaatatcgcagagggtgtacacttatcctgggatattgtttctagtatttggggagggaggagaggatgctattattctcaatatcgcagaaattgtacacccccgctgtgatattcttcataataatcagggaaaaagaggatgatattactaccaatattgcagggggttacacttcccctttggtagtgttcctaatatccaggaagaaagaggatgatattaatcccattttccaggaagtgtacacccaccgtgtcatgttgttcctaatatccagcagggaagaggatgatattactcccaatatcggagagggtgtacacttcccctgttatattgtttctaatacccagggggaagaaggatgacattactgccaatatcacagggtgtgtaccccaccctgctattgttcctaatattcaaaaggaaagatgaaaatattactcccaatatctcagggtgtgtacacctctcctgtgatatcgttcctaatatccacaggaagagagaatattactctcaatattgcaggggggtgtacacccccctgtgatattgttccaaatattcgggcggggagaggatgatattagtcccaatatcgcagggggtgtgcaccaacctgtgatattgttcctaatatccatgcgggggaggacgatatcactctcaatgtcgcaggaagtgtacacctctcttgttatatttttcttaatatccaggagggaaaagatgatattactgccaatatcgcagggtgtgtccaccccccttttatattgttcctaatatccaatggaaaagaggatgacattgctctccatatcccagaaggtgtacaacgcccctgtaatattgttcctaatattttgggggaagagaggatgatataacttataatatcacaggaggtgtacaccacccctatgtattgttcctaatatcctttaagggagaggatgatattactcccaatatctcaggtggtgcctattccccctgtgatattgtttttaatatccaggggaagagagtatgatattacgcccaatatcgcagggggcatacaccctctctgagatattgttcataatatatagagggagagaggatgatattacttccaatatcagaggtggggtacaccccccggttatattattcttgatatccaggaggggagaggttgatattactggatatatagcagggagtgttcacatcttctgtgatactgttcctaatatccagaaaagtagaggatgatattactcccaatatcgcagaacgtgtacacctccctgtgatattgatcctaacattcaaaggggagaggatgatattactcaaaacatcacagggcatgtacactcccctgtgatattgttcctagtatccagaagggagcaagataatattactttcaatatcgcagggggtgtacacccctctttggtatgtttcctaatatccagaaggaaagagggtgctattactttccatattgcaaggggtgtacacccccctgtggtatggttcataatatccagggagggaaagggtgctattattccccatatcgcgaggcatgtacaccctgctgcggtacggttcctaatatccagggggaaagaggatgctattacttcccatatcgcggggtgtgtacacccccgtgtggtatgttttgtaatctccgggaacgaagagggtgttattacccctcatatcgctggaaatgtacactcccctgtggtacggttcacaatatccaggggattgagggtgctattactccccatatcgcggggggagtgcacctccctgtggtatggttcgaaatatccagggtaagagagggtgctattattccccattttgcaggaggcgtacacccctctatggtatgttttgtaatatcccaggtaaggggtgctattgagagaagagagcaaaagaccccccccatattgttctgtattattttatactcagtacctgttttaagaagaaacaaggaagcgaaaccaaaggcaggcagcccggcgccaggcaccagatccaaaaccagacccgaaaccaggcctgggccttcctgaccttagcctgaaagttaaaattcaacccatgacctagcaactgatgttatccatagattccagacattgtatggaaggacattgtgaaatttcttgttctgttctgtttcactctgagtactggtgcatgcagcccttgtcacatacccactagattgctcaatcaatcatggccctttcatgtaaaaaccttagtgttgtgagcccttaaaaaggacagaaattgtgcactcaacaagcttggattttgatactctagtctgctgatgcttccagctgattaaaagccacttccttcactacctcggtgtctgtgggattttgtccgcggctcctcctgctacactgtgactccccttatagagaggggtgtacacccccctttggttcctaatatccagcgggggagtaggtgctattactccccatattgcggggagtgtacacccccttgtagtacggatcgtaaaatcaaggagggagagaaggtgtaattatccccatatcacagggagtgtacacccctttgtggtatagtttgtaatatccacgacgggagagaatgctattactccccatatcgtggagggtgtacaccgccctgtagtatggttcgtaatatccggaaggggagaggttgctattactccccatatggtgggaagtgtacacccccatgtgatatggttcataatatccaggggggtagaggatgatattacccacaatatcatagaaggtgcacacccttttgtgatattgtccataaaatccagaaggggagaggatgatattacttccaatatcacagggggtgtgtagccccatatgatattgtttgtaatatcaaggtagggagaggatgctattccttacaatagctcaaggggtgtaaccttcttgtgatattgtttgtaatatccagaaggggagaagataatttttttattttaaaagtaaactttaatgtcaaaaatgcaaacttgagaagggcagaaagatcaaacagaaggctgccacttcacaattggagggttgcacagtggccgggcagaggcgctcctcactccccagacggtgaggcagccgggcagaggtgctcctcacttccgagatgttgcaggagccgggcagaggtgctcctcacttcccagaacagggggctgccgggcagaggtgctcctcactgcccagacggtttgcaggcctggcagaggcactcctcacttcccaaacggagcagcggcaagccagaggcgctccacacttcccagatggtggggcagccgggcagaggcgatcctcacttctcagagggtagggcggcccagcagaggcgctcctcacttcccacatggtggggcggcaggctagaggcgatcctcacttcccagacggtggtgtggccatgcagaggtgctcctcacttcccagatggtgtggccgccgagctgaggcactcctcacttccctgacagtggggcggctgggcagaggcgctcctcacttcccagacacttggactccgggcagagactctcctcatttcccagatggtggggctgccgggcagaggcgctcctcacttcccagacggttcagaggccgggcagaggcgctctggggagaggataatgttactcccaatatcgcagggggtgcacactccctgtgatattgttccgaatatccagagggggaaaggatgatatagctcccaaaatcgtggggagtgtacacccccctgtgatcttgtttgtaataccaagaagaaaagagaatgctattatttccaatatagcagggggagtacaaccccctgtgatattgttcgtaatatctagggggagagaaaattatattagtcttaatatctcaggggacgttcatccccctgtaatattgttggtaatattcagaatggagaagatgatattgttcttaaaatacaggaaaaaatatgataatattacttccaatatcgaagggggtgtacactctcctgtgatattgttcccaatatccagaatgaaagaggatgctattactcccaatatcccagggagtgtacacccctttgccatattgttcataatatccaggggaagacaggataacattactcccaatatcaccgggggtgtccacccactagtgatatttattgttcatcatatccagaaaaggagaggatgatattactcccaatattgcaggtggtgtacggtccctgtgatattctttgaaatatctagaaaaggagaggatgatatcactccgagtatcacagggggtgtacacccccctgtgatattgttcgtaatatccaggggagaaaaggatgatataattgccaatatttcaggggatgtgcacctccctgtgatattgtttgtaatatccaggggtggagaggatgatattactcaaaataacgtaaacatcctgtgtgtacatcccctgtgatattgtttataatatccaggggggtagaagatgacattacccccaatatcacagagtgtacacacccctgggatactgttcataatatccaggcgggaaagaatgaactacttccaatatcgcaggatatgtacacccccctgtgatatatttcctaatatttatgtgggtaaggatattacccccaatatcacagaaggtgtacatcctctttgtgatattattcctaacatccaggaaaggagagaatgatattactcccagtatcgcagggggtgtacaccacccctgtgatattgttgctaatatccagggggagaggataatattactcccaaaatcacaggggacgtacactcctcctgagatattgttcctaatattcatggggaaaagaatgctactactccaaatacagcagagggtgtacaccatccccgtgatattgttttttatatccaaagggtgaaaggctgatattactcccaatatcgcagggggtgtacaggccccccatgatatcattcttaatatccagggaggcaaagaatgatgttactcccaatattgcaggctgtatacaccccccgtgatattgttcctaatatccagagtaagagaggatgacattgctcccaatattgcaggggttgcacgcacgccctgtgataatattactcccaatatcaacagtgggtgtacactcctcctgtgatattgtttgttatatctaagaaagaagaggatgatattactgtcaatatcacagaaggtgtacagccccttgtgatgttgtttctaatatccagcggtgagaggatggtattactcgcaatattgtagggggtgtccaacggccctgtgatattgtttctcatattcaaaaaggaaaagaataatataactccaaatatcgcagggtgtgtacacttccctgtgatattgatcctaatatccaggaagagagaggatgatattaatcccaatatcacagggggtgtacatcgcttctgtgatattcttcctaatatccagggggggaggggatgctattactcttaaaatcgcagggaacttacactcccactatgatatttttcctaatatccaggaagggagaaaatgatattactcctaatatcacatatcacaatgggtgtacatctccccgtgatattgtttctaatatcaaggatgggagaaaattatattactctcaatatcgcagggggtgtgcacacctcctgtgatattgttcctagtatccagcggaggagatgatattactttaaatattgtagaaggtgtacaacccccctttgatattgttcctaatatccagggggaaaggagatgatattactcctaatatcgcaggggctgtacaaccctatgtgatattgtttcttctaatatccaggggtggagaagataatattactcctaaaatcgaaggggacatacactccccctgtgatatttttcctaatatccagaaggaaagaggatgatattactcctaatattacaagaaatgtatacctgtcctgtgatattgttcctaatatccagaggggtaaatgattatattactcccaatatcgcaggggtgtacaccttccctgagatattgtttctaatatgcagtggaggagaggatggtattactcccaacatcacaggagatgtaaactccccttgtgatattcttcctaatgttcaggacgaaggagggtaatattactcactgtattgcagcagggggtgtagagccccctgtgatattgtttttaatattcaaggttggagaaaataatattccttccaatatcgcatggggtgtacacccttctttttatatagtttctaatatctggggggagaggatgatattactcccaatatcgcagggggattacacccccactgtgatattgtttttaatatccagggtgggagaggataatattactccaaatatcccagggctatacaccctccgtgtgatattgtttctaatatccagaggaagagaagatgatattactcccaatgtcacagggtgtgtacaggccttctttgatattgttcttaatatccatgagggagaggatgatattactcccaatatcgcaaagactgtacaccctttctgtgatattgcttccaatatccagggagggagaggatattacactcaggatcacagggggtgtacaccccaacctgtgatattgtttctaatatctagggaaaatgagggtgatattactatcaatatcacaggaggtgtacactcccttatgatattgttcctaatatccaggagaatgacaggataatattactcccaatatcgcgggtggtgtctccccccactccgtgatattgttcctaatacccagagggggagagaatcatattactcccaatatcgcaggggatgtacacctacatccggcggagtagaagataatattactcacaatatcgcaagaagtgttcaccttccctgttatattgttgctaatatccagggagtgagaagatgatattactttcaatactgagcgtgtacactacccctgtgatattgtttctcatatccagtagaggagaaaatcatgttactcccaatattgcaggggtgaacacctcctttgtgatatttttcctaatatcaggaaagggagagtatgatattacccttaatattgacaggggtgtacacccccctttgatattgttccaatatccaggggggcagaggataatattattcccaatatcgcagagggtgtacaccccccgtgatattgttcctaatatccagagaaataaaaaatagtattatttccaatatcacagggcgtacattttccctgtaattttgttcctaatatctggggggtggggtggcaggataatattactctcaatattggagagggtgtacacccccctgtgatattgttcctaatattcagggtgggagagaatgatgttactcccaatatctcaggagtcgtatacacccccttgtgatattttttctaatatccaggaggcagaggatgatattgctcccaatatcgcagggggtatacacccgagctgtgatattgtttctaatatgcaatatgggggaaggatgattttactttcaatatcgcagggaatgtacactttccttgtgattttgttcctaatatccaggggtggagaagatgctattactatattactcctcatatcgcaggcggtgtacaactccctgtgatatggttcagaatatccagagtgaaaaaggagggtgacattactcccaatatcgggggggtgtacacccctttgtgatgtggttggtaatatccaggggggcagatgagggtgatatcactccccatatcgtggaaggcgtccacttttttgtgatgtggttctttatatcccgaggggagaaggtgatattactccccatatcgcgaagggcatacacccccctgtgatatagctcataatattccggagagtggaggaagatactatgccctatatcgcgggtggcctacaaccccctatggtttggcttataatatccaggggggagagggtaatattgctccccatattgtggagacgtacagccccctgtgatatggtttgtaatatctttggggggcgagggtgatattactccccatatcgcggggagcatacacccccgtgatctggttcatagtatctcaaaggaagaagttgatgtgtacaacttaagggaaaaagttgaagtgaagtgtacacacgccctgtgacgtggttcataatatccaggcgggggagaggagagtgatatttactccccatatcgcgggtgttgtaaactcccctgtgatatagttcataatatccaggggagagaggagggtgatattgctcctcatatcgcgaagggtgtacaaccccctgtgatatggttcataatatccagaagggtagaggacgatgatattactccacatatcttgggaggtgtgatatggttcgtaatatccagcgatgagagaatgatattactccccatatcgcaaaaggtgtgatagggtttgtaatatcctgagggggagagggtgatattaatccctatattgcagaaggactacaccctcccatgacatggtttgtaatatcccagggggtagagtgtgatattactttccatatcacagggggtgtgatatgattcgtaatattcgaagggggagagggtgacactactctccatatcacggggtgtgtgatatggttcttaatatcccaggggttagaggttgatattaccccctttttggggggtgtgtacaccccctgtgatatggttcgtaatatcccgggggagacagggtgacattattccccatatcgaggggatcgtacaccccctgtggtgtggttcataatatccctagggggagatggtgatattactccccatatcagggggcgtgcactcttctgtggtataattagtaatatccagggggcagaggtcgatattcgtttccatatcatgaagggagtacacttccctgtgatatggttcctaatatccaggggggagagggtgatattattccccatattgcggggggacatacaacccctgtgatatggttcataataaccagaaaagaagagggtgatattaatccccgtattgcagagggcatacaccccccctgtgatatggtttgtaatatctaggggaggaaaaggtgatattactttccatattgctgggtgcagacacccctttatgatatggttcataatatccaagttggagagggtgatattacttcccatatcatgggaggtatacccttccctgtgatatggttcgtaatatccagaaggggagagattgatattactccccatattgtggggggcgtacaccttcctgtgatacggtttgtaatatctaggggatatagtgggtgatattactcaccatatcacgggggttgtaacatggtttgtaatatccaggggaggagagggtaatgttactccccatatctcggggcatgtacaccctcctgtgacatggttcgtaatatccaggtcgggagagggtgatattactcctcatattgccgggggtgtgttatggttcataatatcctggggaaggaggctgctatcactctccacatcttgggggatgtacactctcctgtgatatggttcataatatccagggtgggtgagggtaatattactccccatatcgcgggaagtgtacatacccctgtaatattgtttgtaatagaagagagggtgatattactccccacatcgcgggtggtgcccacccccctgtgatatggtttggaatatccagggggatgaggagggtgatattactccccatatctcggtgggagtacatccctctttgatcaagttcataatatccaaaaggaaacaggagagtgatattactccccatatcgccgggggtgtacacgggagggggagtacacccccggcgatatggtctgtaatatccagggaaggagaggagggtgatattactcaccatatcgcaggtggtctacatttacctgtgaaacagtttgtaatatccagggggggaaatgagaatgattttttttttttgagtctcactgtgtcacccaggttggagtgcagtggcacgatcttggctcactgcaacccccgcctcctggactcaagcaattctcctctcccagcctcctgaatagctgggactacaggcgcaccccacaacgtctggctaatttttgtatttttattagagacggggtttcaccatattggccaggctgatctcgaactcctgaccctgtgatccatccgcctcggcctccaaaagtgctgagattacagatgtgagccaccacgcatggcccaaggagaacgatattactccccatatcccagggggtgtatatccccctgtgatatggttcagaatatccggaaggaaagacagggatattacttcccatatcgcaaggggtgtgacatggttcgtaatatcccatgggggagagggtaatattactcttcgtattgtgaagggcatacactcccctgtgatacagttcataatattccggggagtagaggaagatattatgctccatatcgcgggtggcataagccccctgtggtttggttcataatatccagggaggagagggtaatattactccccatattgtggggacgtacaccctcctgtgatatggtttgtaatatcccagaggggagagagtgatattactccccatattgcagggacatacacccccctgtgatatggttcaaaatgtcttttttttttgaaggactggttctttatttcaaaaagacacttgtcaatattcattatcaaaacagttgcactattgatttctctttctcccaatcggccccaagtagaccacatcaaaggagagtacatattaagccaataagctgtaggatgtacacctaacagacctcctagaaaccttaccagaaaatggggacagggtagggaaagaaactttaaaagatcaacaaactgccagcccacggactgcaggggctgtcacagccagatggggtggccagggtgccacaaacccaaagaagcaaagtttcaaaataatataaaatttaaaaagttttgtacataagctattcaagatttctccagcactgactgatacaaagcacaatgagatggcacttgtagagacagcagcttcaaactcagaaaagggtaatgagatgagtttcacatggctaaatcagtggcaaaaacacaatcttctttctttctttctttctttcaaggaggcaagaaaagcaattaagtgctcacctcaacataaggggaacatgatccattctgtaagcagttgggagggggtagagatggaacaaaattttggtctcagaggtcttgccatcttaatttggtcacttctaatgaaaaaaataaaaaatagaaataacattatccaaaggtatcttaaagctgaaaacttgaacagcacattttttgttgttgttgtttggctaactcctcctggaaccacctttctggcttagctagtactttgtacagagcaatgaggcttcccatagtggagtctccctgggctctgtttggctctcagcaaggcaggcctataccttttcctctcctccatggagagaggaatatgcattaaggtgaaaaatcaccttccaaaagtgagaaagggattcgatcgctgcttcagggctgtggtattatatggaatgttttacaaaaggttgctacaaaacaacaaaagaggtaattacaaaatgtgtacatcacaacatactttttaaagacattatgcattgtgctcacattcccttaaatgttgtttccaaaggtgctcagcctctagcccagctggaatctccgggaagaggcggacagtttggtgaaaaagacacagggaaggagcgggcggcggaaggagggggcggcgaaaggagaaagcagccttccagttaaagatcagccctcaattaaaggtcagcttcgggcaggctggcctcaggcggagtctggttcagagggaggagcagcagcagggtgagactgaggcgttctacatctcattcaggtcaagcagagtctggtccagcatcctttgtgtacagaggtgctcccctttggtgcatttcagtttatcttccaagtcatcaattgtcttttccagcttggctaccgatctctcagcaaactcagcatgggtctccgcctcctttattttatcagtaagaatcttgatctcttcctcatatttgtcttctttttgagagtacttttcttcagcagcactcagacacttcaggttctggtccatcagtctaatctgctcatccatctctcggcaaagggattctgccagctcagctcgttcctctgtgcgttccaagtctccttcaatgatcaccaacttacgagccacctcttcatacttcctatctgcctcttctgcaatgtgcttagcttctctgagttggatttcctggagttccatcttttcttcatcttttaaggcccggttttcaataaccttcttacctctctcactctcatcagcagctttttccgcttcttccagcttttgcagggcagtagccaggtgctcctgagcacggtccagctcctcttcaaccagctggatcccacgttcaaggaggccacctcagcctcagcctgttcccgggcccacctttctccctcaacttctcgctggaggcgctcagctcgctcctctgcatcatctgcctgctgctgcagaacctggatcttgcgcttcaccgcctcgatggtggtgatcccagccatggtgcccacccagctactgctagagctccggttcctgcctcctccgatcggcgttgcagcctcctctcacccttacttccgcctcggttcaaaatatcttaagggaaggagttgatattactccccacatcacgggaagtttacatcccctggtgatatggtttgtaatatcccagggtggatagggtgatattactctccatatcgcgaaggagtactcccccctgtgatatggttcataatatccttggggggagagtgtgatattactccccatatcgcgagggccatatactcctttgtgacatggttcgaaatatcccggtgggggagggggtagagggtaatattactccccatacagcgaagagcatacgcccttctgtggcaaggttagtaatacttcagggaaaagagtgcaatattacttttcatattgcagggaacatacactcccctgtgacatggttcgtaatatcccgggggctgagagggtgatatttctccccatatcaccgggggcctacacctgggtgtgatatggctcataatatacagggagggagagggtgatattactccacataccgagtgaggggttacacaccctcgtgacatgttcgaaataccccaaggaggagacaatgatattactttccctgtcgcgggggctacaccctcccagtgatatggttcacaatatcccggggtggagagggtgatattactccctatatcaccggggggtgtacacttccctgggaaatggtttacagtatccccggggggagagggtactattactccccatatcacgttacatatcagggtacacccccacgtgatatggtttgtaacatcccaggaggaagaaaatgatattactccccatatcgcggtggcatacacccctccccgttaaatggttcataatatcttggggtggagagggtgatattactccccatatcacgtggggcatacaccccactatgatatggttcataatatcccggaggggagagggagatattactctccatgtcgcggggggcatatacacccctgtgatatggtttgtgatatcccgggggcggagagggagatattactctccatatcgtggggtcgtacacttttctgtgatatgattcgtaatatccagacggggagagggtgatattacttcccatattgcgggggcgtacacccctctgtgatatggttcataatatcccgaagaaaagagggtgatattactcctcatatcgcggggaacacacaccaccctgtgatatggtttgtaatattcagcgggggagagagtaatattactccctgtatctcggatggcgtacactcccctgtgatatggttcataatatccagaagaaaagagggtgatattactccccatattccagggaatgtacaccaccctttgaatatggttcgtaatatccaggaggggagagggtaatattgctcccaatatcgaaggaggtgttatacggttagtaatatccagagaaggagagggtgacattactccccacatcgtggtgggtgtgcacccacctgtgatatggttcataatattcaggttaagagaggtgatattgctttccatatcgccaagggtgtacactcccgtgaaatacagttcgtaatatccaaaaggggagagggtgatattactcccatatcgtggggggtgtacacccctctgtgatatggttcataatatccagggtggaataaggtggtattactccctgtatctcggggcatgtacatcgcctgtgatatgattcataatatccagaagaagagagggtgatattaatctccatattgctgggggtgtacaaccccctgttgtatggtttgttacactgagttggggagagggttacattactctcaatatcgagtggggcatacacacttatgtgatatggttcataatatcccagggaggagagggtgatattactccccatatcgcgggaggcatacaccccaatgtgatatggtttgtaatatctacatttttttttttgagacgaagtctcgctcttgtcccccaggctggagtatgatggccggatctcggctcactgcaacctcagcctcccgggttcaagcgattctcctgccttggtcccccaagaagttgggattacaggcgcacaccaccacgcccggctactttttgtatttttagtagagaaggggtttcaccatgttggccaggctggtctagaactcctgacctcagatgatccacctgcctcggcctcccaaagtgctgggattacaggcgtgagccactgcacctggcctggtttgtaatatctatgaagggggaaggtgatattactttccatatcacgggaggcgtacaccacgatgtgatatggtttgtaatatccagggggtatactgggtgatattactccccatatcgcggggagtgtatacccttttgtgatatggttcctaatattaagctgaggagaaggtaatattactccccatatcgcaggggtttttatatggttcataatattcaggaagagagagggtgacattactctccatatcacggggtgtgtactcccccatgtgatatggtttgtaatatccagggaaggagaggttaatattactccccatatcgcagggggtgtacacctctctgtggtttgtaatatccaaagggaagaggatgatattatcttcaatatcttggggggatacagtccccagtgatattgttcataatatccagagggggaggggatgatattactcccaatattgcaggtggtgtacaaccccctgtgatattctttataatatagagggggatgatgatattactcccaatatagtaaacaacctgtgtgtacaccccctgtgatattgtttataatatccaagggtggaaaggatgatattactcctcatatcgcagggggtgtatacccctctgtgacattgttcctaatattcaggggaggagaagatgatactactcctcatatcacaggggatgtacacccccctgtgatacttttggtaatatccaggggaggagaaaattatattattccccatgtcacagagggtgtacaccccgctgtgatagtgttcataatatccaggtgaaaagaggatgatattactccgaatatctcaggaagtgtacacccttctgtgatattgttcataatatccaaaggtggagaggaggatactactccccatatcgcagtgggtgtacacccccctgtgatatggttcataatatccaatgtaggagaggatgatattactttccatatcgcggagagtgtacatccccctgttatattgtttgtaatattcagggagaaagaggatactactactccccatatcacacggggtgtatattcccctgtgatatggttcctgatatccaagagatattataatcctctcttggattatgctacctctcatatcgcatggggtgtacacacactttgtgatatcgtttgtcatatccaaggagggagaggattatattaatcccaagatcacggggggtgtacaccctcctgtgatattgtttgtaatattaaggggggagaggataatattactcccaatataattaacaccctgtgtgtactcctccttgtaatattgttcataatatccaatgggggagacgatgatattactttcaatatcgcagaggatgtacatccctttgtaacaatgtttgtaatataaaaggcaagagaggatgatactacttccaaaattgcaggacatgtacaccccccggtgatattgttcctaatatccagtggggaagaggatgatagtagtcccaatatcgcaaagggtgtacacaccccctgggatattgttcctaatataaaaggaggagaggatgctattattcccaatatcacagaaggtgtaaaatcccctgtgatattgttcgtaatattcaggaggggagaggattatattactcccaatatcacagggtgtgtacacagggaggggcaagggccagaagcgggcgggaatccccatgtttgggcggacccagtttctaatggccagcatttgccaatcaaagcttaccagagaactctaaaagccagggctttcctgctagacaagactcatttctggaactgctttaaaaagaaacaaaacttcccaaggaccccttttcctctctgtctgcctaaaataatgttttaaaaactcctaaagcagctgaattcagcccccttcctgggggaatgtatagacggaactcccacctttcccggcatcccaaggccagagtatgtgaaactcctgggtctctatgtgtgtctgagcggctgctctgccaacactccacacagccctgtgtcctggacccaaggcccttatgacctgagctcaagaggggatctcctgatccatgggttgcaaagatccatgggagaagcatggtttctggggcggggtcacacgctcagtcactgtttccctcggatgccggagatggttcctttggctctctgccaatacagggtgaatcatcatccatccctcttttctttgttctcccgggtcaagttgtttgcctagtcagtcccaatgtgagaacctgaatatttcagttgacgcgctgacttcaaaatccccgggcttcgggaggcggagcttgcagtgagccgagatcccgccactgcactccagcctgggcgacagagcgagactccgtctcaaaaaaaaaaaaaaaaaaaaaaaaaaaaaagtccccgggcttttcttttcactcagtggaaggcagctgcttctaattggccatcttggcccgcccccaccacgtgaccttctgtaaaatgcctccactctccaggaacgctctcattatataactttgcctgaaaccaacagcacgctcattgcacatatcatgggctcatttatttcacttataaagaacctggccaaggaagagatagtgcctaaagtggccagtattctgaccgatatgttagaaaaatggtgtgccgaccaattcatgacatgtgtcccaaaactagcaacggaaattgtattcgccgtgttgaggtctctaatccagatgatgctcatctatgtactggaaaaggcagagtcctttcctgacaagctgctgaaactcttcagaaacatctcatatttcctgaagaagatgatgtctggacaagcagcacaggtcgttcagatttaactttctattcatatatccagcacgatattcgcacaattgtcacgaaaccttaccagttgatgagtcctgcacatttcctttaatttcaggaggaagagggtaatccggatgagttttctgacctactctgctgctgtgattaaacaaccaccaggaaattttgacgacactgttctcctgagctcctccctttcctccgggaacaaaacaattgaatttacaaaaataaagtgttatttgactggagtgaggtctcatgtctgcttatgcggtggctcgctgctcagaacagggtgagtctctgggttgtgtgctgaggaggggaggctctcaatctggagaaaacccactgcaggggacacctccatggggtctgagggactgaggatgaggagccggactgggtctagggaaggaggaggtttcagagggtgaaattctggcactaaagcctgggggtgtttgggaacttcctccttccgaagaagtttcagggagggataaagacaaaccctgggctccttgaggggcccttactaatttgagaggactctatcgggaaggagagtgacaatggcctccttgaggactgaggcccctgaataaatgaggcccagatacagtccatgggggatgagaccttcaagggtcacattttggttgggacagaggaaaagtgcagctctgcagccgcagaggaaaacccggcagtgtgaaagcgaccttggaggggccctgtgcgctctgaatgcgtctgagcccccatcccctgtccccgcctctctttctggattcttccagctcggctgtctccgccatcttctgagcgctccaccctgacttattcaagtttcccttctgccttccaagtactccaaaatctttcagatctgtgtccctacccctgtttttagcatgtgttggggctccaggtccctgaaggtttctggcctgaaatccacctccccagcggagtggactgcgttctagagactccacactccgcgaggttcccaggcccctgagggacaaccgagtggcctgcgcacttcagggctccacactcggcaaggtctttcaagcccttggggtccccttcttagttttttccacctttctgggctgcagtcactccataaatgctgggatctgatccccacccccactctcgtttcctcaattctgcgggctacacgctctggcaaggtcctccgggccctggatcccctccctctccctatgcccacgctcctagtcagcccttctggggtccactattttcaggaactaaccgttctcatggagccttgctaaccggaaagctgtgtggaagaaaggctttgaggatagaggtggagatttggctcttccatagtgccactcacccaccccaccatgctgccactgccagacccggacccctgtttcagaacaagtgaccagattcgctcctggacagccctggacactggccttttctctgaaaactactcaccctttctctagtccccacttcatgccagcctcataccctcttccttcccccacgctggcttccgggatcctcctctgctcagacaacctcttctgtgtcccacccccgtttttagaatgctttggggcaccaggttgggggaaggtttctggcctgatatccatctctttccaaactcccttcttcccttgaaaggcttcttgccttcagccccacttctggctccgaggtttcaggacaccctcctcttcatcctcattcttttgaccaccagctttttaggaattcgaacgtccctctcatcttcgtgaatcctgtccaggcatttgttgaccccttcatctgatacccctgacctcacattgccaaaagtctacccctacccagtacactggaattagacaaaatcccaggagttttacctcaactctgagtgtgcccacaggagctctccctgaagccacgtccttttaagcagggtctagggttcctcccttgtcttaatgaactctttgtcacacggaggacgttatggagcccttatgatctttcactgcctttctgcccagcgttttgtctttccatggacatttataatattttccatggacattttgttctctcaatgtccacccctaatttccaacatcccaaagattctcatgtgtttcctgaaagccatttacaggaatggctgtgcccagacccccttccccaggatcctccttcacacctggtaggtgcctctcctagagagatttgcactcagttgtcgtgcagtcacatggcccagatggttgttaatcacccccttcctggcaacagctagcagccagggaatcactggcacagaaacctcagggtgaccaagatgaggccacctctgtgctgaaggctgtgctccagagcctgcttgggatcaggcttaagcaggtcttcagccagacctgatgttacctggtttccttgagctgccctgcctgagctatcgggagcactccctcaatgcacatcttgattccctatctcatgctctgcttctagaaaccatgagctatcaattgctactggcaatggtcctgggaagtcaaccctaagtatggattctggggttggatgactccccacaggacttcagtgagcaacaatcactgctggcagttggaggacagagtcgctagggcatgtgaccactgtgaaaccaccgatgtttcacctggggtaattttggatgaactacggtagaagcactgaaggtacattgcttttggtttggaagattgtaggtaaataatagcgatatgaatgtggaattggatggctgcaaacgagtgccattgatgcattgaaagaggaaaagtcaggctgtcacctgtcactcagcaatttaaagtgtgagagttgggactagatgtggtggctcacatctataatccagagattcgggggaagcttgaagaggtaggatcttttgagtccaggagttccagaccagcctggacaccagagcaagacctcatctctacaacaaaattttcttaaaaattagatgggcttggtggcacgcacctgtacttgtagatctagctaatggggagcatgagataaaaaaatcacctgagtcagggacttaggggttacaatgaggtatgattgtgccagtgcacacactcccacctggccaacagagtgagattctgcttccaaaaaaataagaaataaatcaggtttgagagttggaaagcatcatcttctcctagagccaaaggacatgtacaactgagacccaggaacaaagcttcatcacaaagagaccatcatcagtggagccgggagatgcattccccctcaccctgccttgaggaggcagtggagtcatctgtctgggatcctttctgacccagccctatttgtttgtctctttggcttctttggatttgtatattttagctgttataacactgtaaaacaaacagagtgatttttttgagttgtgtgaatgatgctagctccatagtcaccctgagagtgatgggaacttttgaatttgtggcaagttggagggtagtgtaagtgacctgagattgccaaattggggctagcactggatgtgaggttaggctagtggaaaaatatgcccagaaccagaggagtgtgggctcactgcaggtggttaggctcagatccaaattgtacagatggatagctttggggtaaagaataacatagttgagaagtgcatgtgttagtctgttcatgcactgctataaagaattacctgagactgggtaattatttataaaactcaggtttaattgggtcatggttccacaggctgtacaaaaagtatgatgctggccatcagctcaacttctggggaggccccagaatagttagagtcatggcaaaaagtacaagggaagcaggctcatcttccacggccagagctggagcaagtggtaggagaggtgatacacactttcaaacaagtaggtcttttgagaactccatcaccggacagcacctatgggatggtgctaaattattcatgaaatatccgcctccataatccactcaactgtcaccagcgcagccagccccacctccaacagtggggattacaattccatatgaggtgtgggtggggacacagctccaacctcaatcagtgggcatcctggattgggtctactatagaaggagaaccaggagctgactatgatcttgaaccctacccatgatggccgggcggggtgactcatgcctgtaaccccagcactttgggaggctgaggtgggtggatcgcctgaagtcaggagttagagaccagcctggccaacatggtgaaaacctgtctctactaaaaatacaaaaaattagaccggcgttgtgctggatgcctgtaatcacaccactacgctccagcatgggaaaaaataccaaaacttcgtctcaaaaaaaaaaaaaaaaaaaaaaaaaaaaagactgcccatgaccactgcaccagtgagagggacaccagcatcactgagatgcaagggctggacattcttcataggtcagagctcaaagcaggggacactgatacagagatgggctccatccatagcaccaaagtggtgagaggatgtgggaatggcagaggccagcactttgccatcaatgcaagggggtataaggaggtgacaccagtgccagagtacatcacggggggactgccctacaatatctaggacttacctcttagagcgtgtttcattagcgacaacagatataaatggcagacaggtgtgtccctgcattaacaggaaatagaaatcatcaagaggaacagaaggcagatgtcagcagccccttagaaagtcatcatccttcatacagttaaaatctgagacagttctcacacgagaaggcctaactcaaaaagaggctgggttctcatgaggcaggtttatgcaaaaccaaggaaggtgtacaagtttggaattctccagtttcccttggaaaagacctacagtcatttgcttaggtaactgagcactgaacaaaggtgagtattgttgtcttttagaagctcttggccaagaaggccttgttggcataaaacccatggtttggaaacatcaccatgacccctgttagagtaatggcctaagggtgggggtcaggaaattgatgtattccttgccaacttctgcctctaagtgagtgaactctgtttgtgaacctctctcctctgtggttatgttcctaggctctcatgtataatcaggagtcatagacttagaaacaggaaaaatacttacagtgtttttgtggcctgtgagctatgacttataattttaggaaaaaaacaattgcaaatggaaagcctaagtctatcaatgctcatccaagacaacataatcaataaaaaccaatatcaaatctcaaggcaaattatttcctgtatatagatggcagagatgagcaccaccatcaaaaactcaaggaccagtgctgtgggtccagtcatctgtttcatggaattcaccagtctggtatcttcaaaatccagaaggatgatggcagatggcaggaaagtaatgcaaacgtcatcaggtgtgaccccactgtagcagctgtgatggatgttttctctcaccatagcaataaataacacaacctcggtcacactgtatgcattgttggtctgcaaaatccatgttttgcaaaactcttcaggaaggtggatctgtaatattggcattgacatgagaacaacagcagtatttattcacaatctcaagctctctgtcttcccgtctctctcattagccatccaagtagtcctgaggaaccaagcccatcagaacattctgcaacataatacacagctccattctccattcaaattttgttgttgttgttgttgttgatgagacaacatcttactccatcagccaggctgacgtacagtggggctatctgggctgactgtagtcttgagcttccaggctcaaggcatcctctcacctcagcctcctaagtggcttgaactacagacacacagcgacatgctgggctagtttttgtatattttgtagagacgtgctctcaccatgttattcaggctggactcaaactcctgagcgtaagtgatccaagcaccttggcctcaaagtgctgagattacaagcctgagccactgcacccagcccaatctccattctactgataacaatgtcattaccaggtctgatggacaggaaatggtaaggtttctgaaaacctaaggatcacacagcgagttccaaaggctgaaagtgcatacctgtcgacactgataccaatgacatccaatggtgagaatgacattccttgtagtcctagctctgctcataacaaatctatactgaagtgtaagagtttgatggtcatggggattttccatgtctctgcctttcagcgatgtgccatatctgtgaagtgttcagaaatgcaacagcctgaggcatgctgggcatatcctctaataaaaaggaaaatgccattttatggtcctgtatttctacaagttggaacacatgggcctgtgatccagatgggggaaatgggaatattcccactcattcaccttcatccacgaagcccatttgaaagctttgggcttcccatccttgtagattttagtgttgtgggctgggtgcagtggctttcacctgtactgccaacactttgggaggcctagacaggtgaatccactgaggccaaaagttcgagaccagcctggccaagatggtgaaaccccgtccctactaaaaatacaaaaattagcaaggtattggggccagcacctgtaatcccagctgctcgggaggctgaggctggagaatcgcttgaacccaaaaggcagagactgcagtgacccgatcctgcctttgcactccacctgggcaagcagaacaaaacttctgtcttgaaaaaaaaaacaaaaaacgaacaaaaaagatgttagagttctgggtttagaggtctataccccagaaagagaatggtttcaacaagggacaaagaagttgctttaaacgttgacttgccatttcttttcagtgtgtttgttctcttgcgtcaagagaccaccagaaaagtggtgcaattactctcctgtcaagaatcattgactatcatctgcaagagggtcagatcctggtatataattagggcagaaatacttagtctgagaagggtatgacatccagaggccctattaatgatgtccttttctccatgcctgactctgaccccatgtgctggactgcccctgtgtggatggcctcatggcctgctcggactctgaggtcccaccccaagtggcacctccatggagggctctactcttgtatgggctctgacactcacactgagacactctcccatggacacctcttcacccacttggggtctgaaactgggctactccatccctccctaacctggaacagagagctttcactgctattacacaagtcatagaggctaactcctcatttttccaagctaattattgaaacattagtcctgggttgataagacaagataagttaacttttcataaatttgcttatcaagttttgaataaattcaaataaattcaccttccccacacaccttagttgtcgacatcacacgcgcacccatactcacagggtgagcacgaaggcttcactgtcagtggagaaagtggcaaaacccttctgtgcctcatcctggtctagacctggccctcatcctttcccactcttcccctcactcccttggattcatccacactggcctcctgcctgctgctccacctccctgcgaagctcacccctgcctcagggcctttgcacgtgcagtggcttcaagccatatcctcttcacccagatctcccagatctcctgaatgatcttcttttatcattcaggtctcagcttgcatgtaatcttctcagtgaggattacccaaaccacatagttcattcattcattcaaatattcattcaatggcatattgacaaagcagctacttcatgccaggccttgggccaggtgttatggatatggcaacaaacaaaacaagagttttctgctctcaaatttttacccacttaaaggagatatcatacatcatctgtaaataaatacatcatctgtaaataatgatgtaaataaatacatcatctgtaaatctgtaaataatgatgtaaataaatacatcatctgtaaataaataaagtataataaaagaaaatagtaggtttttttggttggaggtgaccgtgaagtttgcaaataccatcttacaacacattattttattttatttcatttcatttttaattttattattattatactttaagttttagggtacatgtgcacaacgtgcagatttgttacatatgtatacatgtgtgaagttggtgtgctgcacccattaactcgtcatttagcattaggtatatctcctaatgctatccttcccccctcccccaccccacaacagtccccggtgtgtgatgttccccttcctgtgtccatgtgttctcattgttcagttcccccctatgagtgagaacatgcggtatttggttttttgtccttgtgatagtttgctgagaatgatggtttccagcttcatccatgtccctacaaaggacacgaactcatcattttttatggctgcatagtattccatggtgtatatgtgccacattttcttcatccagtctatcattgttggatatttgggttggttccaagtctttgctattgtgaagagtgccgcaataaacatacgtgtgcgtgtgtctttatagcagcatgatttataatcctttgggtatatacccagtaatgggatggctgggtcaaatggtatttctagctctagatcactgaggaatcgccacactgacttccacagtggttgaactagtttacagtcccaccaacagtgtaaaagtgttcctatttctccacatcctctccagcacctgttgtttcctgactttttaatgatcgccattctaactggtgtgagatggtatctcactgtggctttgatttgcatttctctgatggccagtgatgatgagcatttcttcatgtgttttttggctgcataaatgtcttcttttgagaaatgtctgttcatatccttcacccactttttgatggggttgtttgtttttttcttgtaaatttgtttgagttcattgtagattctggatattagccctttgtcagatgagtaggttgtgaaaattttctcccattctgcaggttacctgttcactctgatggtagtttcttttgctgtgcagaagctctttagtttaattagatcccatttgtcaattttggcttttgttgccattgcttttggtgttttagacatgaagtccttgcccgtgcctatgacctgaatggaaatgcctgggttttcttctagggtttttatggtttgaggtctaacatgtaagtctttaatccatcttgaattaatttttgtataaggtgtaaggaagggatccagtttcacctttctacatatggctagcctgttttcccagaaccatttattaaatagggaatcctttccccacttcttgtttttgtcaggtgtgtcaaagatcagatagttgtagatatgtgacattatttctgaggactctgttctgttgcattggtctatatctctgttttggtaccagtaccatgctgttttggttactgtagccttgtagtatagtttgaagtcaggtagcatgatgcctccagctttgctcttttggcttaggattgactttgcaatgcggggtcttttttggttccatgtgaactttaaagtagttttttccaattctgtgaagaaagtcattggtagcttgatggggatggcattgaatctataaattaccttgggcagtatggccattttcacgatattgattcttcctacccatgagcatggaatgttcttccatttgtttgtatcctcttttatttcattgagcagtggttttagttctccttgaagaggtccttcacatcccttgtaagttgggttcctaggtattttattccctttgaagcaattgtgaatgggagttcactcatgatttggctctctgtttgtctgttattggtgtataagaatgcttgtgatttttgtacattgattttgtatcctgagactttgctgaagttgcttatcagcttaaggagattttgggctgagacaatgggttttctagatatacaatcatgtcgtctgcaaacagggacaatttgacttcctcttttcctaattgaataccctttatttccttctcctgcctaattgccctggccagaacttccaacactatgttgaataggagtggtgagagagggcatccctgtcttgtgccagttttcaaagggaatgcttccagtttttgcccattcagtatgatattggctgtgggtttgtcatagatagctcttattattttgagatatgtcccatcaatacctaattattgagagttttcagcatgaagggttgttgaattttgtcaaaggccttttctgcatctattgagataatcatgtggtttttgtctttgggtctgtttatatgctggattacatttattgatttgcatatattgaaccagccttgcatcccagggatgaagcccacttgatcatggtggataagctttttgatgtgctgctggattcggtttgccagtattttactgaggacttttgcatcaatgttcatcaaggatattggtctaaaattctcttttttggttgtgtctctgcctggctttggtatcaggatgatgctggcctcataaaatgagttagggaggattccctctttttctattgattggaatagtttcaggaggaatggtaccagttcctccttgtacctctggtagaattgggctgtgaatccatctggtcctggactgtttttggttggtaagctattgattattgccacaatttcagatcctgttattgctctattcagagattcaacttcttcctggtttagtcttgggaaggtgtatgtgtccaggaatttatccatttcttctagattttctagtttatttgcgtagaggtgtttgtagtattctctgatggtagtttgtatttctgtgggatcagtggtgatatcacctttatcattttttattgcatctatttgattcttctctctttttttctttattagtcttgctaccggtctatcaattttgttgatccttttaaaaaaccagctcctggattcattaattttttgaagggttttttgtgtctctatttccttcagttctgctctgattttagttatttcttgccttctgctagcttttgaatgtgtttgctcttgcttttctagttcttttaattgtgatgttagggtgtcaattttggatctttcctgctttctcttgtgggcatttagtgttataaatttccctctacacactgctttgaatgtgtcccagagattgtggtatgttgtgtcttttttctcgttggtttcaaagaacatctttatttctgccttcattttgttatgtacccagtagtcattcaggagcaggttgttcagtttccatgtagttgagcggttttgagtgagtttcttaatcctgagttctagtttgattgcactgtggtctgagagacagtttgttataatttctgttcttttacatttgctgaggagagctttacttccaagtatgtggtcaattttggaataggtgtggtgtgatgctgaaaaaaatgtatattctgttgatttggggtggagagttctgtagatgtctattaggtccgcttggtgcagagctgagttcaaatcctgggtatccttgttaactttctgtctcattgatctgtctaatgttgacagtggggtgttaaagtctcccattattattgtgtgggagtctaagtctctttgtaggtcactcaggacttgctttatgaatctgggtgctcctgtattgggtgcatatatatttaggatagttagctcttcttgttgaattgatccctttaccattatgtaatggccttttttgtctcttacgatatttgttggtttaaagcctgttttatcagagactaggattgcaacacctgcctttttttgttttccattttcttggtagatcttcctccatccctttattttgagcttatgtgtgtctctgcacgtgagatgggtttcctgaatacagcacactgatgggtcttgactctttatccaatttgccagtctgtgtcttttaattggagcatttagcccatttacatttaaggttaatattgttatgtgtgaatttgatcctgtcgttatgatgttagctggttattttgctcattggttgatgcggtttcttcctagccttgatggtctttacaatttggcatgtttttgcagtggctggtactgactgttcctttccatgtttagcgcttccttcaggagctcttttagggcaggtctggtggtgacaaaatccctcagcatttgcttgtctgtaaaggattttatttctccttcacttatgaagcttagtttggctggatatgaaattctgggttgaaaattcttttctttaagaatgttgaatattggcccccactgtcttctggcttctagagtttctgccaagagatcagccgttagtctgatgggcttccctttgtgggtaacccgacctttctctctggctgcccttaacattttttccttcatttcaactttggtgaatctgacaattatgtgtcttggagttgctcttcttgaggagtatctttgtggcattctctgtatttcctgaatttgaatgttggcctgccttgctaggttgcagaagttctcctgggtaatatcctgaagagtgttttccagcttggttccattctccccatcactttcaggtacactaatcaaacgtagatttaatcttttcacatagttccatatttcttggaggctttgtttgtttctttttactctctttcctctaaacttctcttctcacttcatttcattaatttgatcttcattcacttatatactttcttccacttcatcaaatcggctactgaaggtattgcatgcatcatgtagttctcatgccatggttttcagctctatcaggtcatttaaggtcttctgtacattgttttctctacttagccattcgtctaatcttttttcaaggtttttagcttccttgtgatgggtttgaacatcccctttagctcagagatgtttgttattactgaccttctgaagcctgcttctgtcaacttgtcaaagtcattctccatccagctttgttccattgctggtgaggagctgcgatcctttggaggagaagaggtgctctggtttatagaattttcagcttttctgctctggtttctccccatctttgtggttttatctacctttggtctttgataatggtgacctagagatggggttttggtgtggatgtcctttttgttgatgttgatgctgttcctttctgtttgttagttttccttcgaacagtcaggttcctcagctgcaggtctgttggagtttgccggaggtccactccagaccctgtttgcctgggtatcaccagcggaggctgcagaatagcaaatattgcacaacagcaaatattgctgcctgatccttcctctggaagcttcgtctcaaaggggtgcctggctgtatgaggtgtcagttggcccctactgggaggtgtctcccagttaggctagatgggggttagggacccacttgagaaggcagcctgtccattcacagagctcaaacactatgctaggagagccactgctctcttcagtgctgtcagatggggatgtttaagtctgcagaaatttctgctgccttttattcagctatgccctgcccctacagatggagtctacagaggcaggcaggcctcattgagctgcggtgggctcctcccagttcgagcttccagaccactttgtttacctactgaagcctcagaaatggtgaacacccctcccccacccagtctgccgccttgcagttccatctcagactgctgtgctagcagtgagcgaggctccatgggcgtgggacccactgagccaggcacaggatataatctcctggtgtgccatttgctaagaccattggaaaagcacagtattaaggtgggagtgtcccaattttcccagtacagtctgtcacgggttccctcatctaggaaaggtaaatcccctaaccccttgtgcttcccggtgacgcaatgccccaccctgcttcagctagccctccatgggctgcatccactgtccaaccagcccaatgagatgaacaaggtacctcagttggaaatgcagaaatcacccatcttctgtgtggatcaggctgggagctgcagaccggagttgctcctattcggccatcttggaatggcaatctatgtttgctttttacatttgaaaaaactggtgtcacgtacctaggtattaatcattgtggtatcctcttgccgatttacctctttatcattaactagtgaccctccttgtcttttgttgttacagtctgtgattttagtctattttatctaatatgagaatagctactctggcacttttttggtttccagcttcatgaaatatccttttccatttccctgttttcatttccctttcggtgtctctatagatgaagttgatttctttaaggcaccataagttgggtcttatttctttatccatttgaccatttagagaatttagaacactgtcagtgttattattcataagtaaaaacttaagagtgggtgtagtggtgtacatctgtatttcctgcactttgagagactgaggcgagctgatctcctggggtcaggagtttgagaccggcctggtcaacatgatgaaaccctgtctctactaaaaatacaaaaattagccaagcatgctggcatgtgcctgtaatccaatttacttgggaggctgaggcaggagaagcttgaacctgggagacaaatgttgcagtgagctgagatcacacagagaagtcatctccactctcctcatcagaacctcttgttcacagcatttgtgagcacaaatcaatgatggttattctttcctactaattagggatattttattacacagcaatagcctccagcaaagggaaccatcatacatgattcctacaagttgacagggctggaattatcactgaaaaactaaggtggctatacttgattcccaatgtccaatttttcatgaatagagaaatttatcctttttccccccagccagaaaccaagttttgctcttacgcccaggctggaatcaagtggcacaatctcagctcactgcaacctctgccccccagcttcaagaaattcaccttttgaacaaggagatattaaggatacactatgtgtatgctaccggtggttgcaggagactcagaaaagagagaaacagtcactggcctcgtgcaactgatattctcgggaggagagaaaggcaatcaagaaagaaacatgctgtatttcagacagctgtaagtcctccacaagaaaagaaagcaggtgaggaacataggaaatgtgtcaaccataaggttcccgctaattctataagttggtcagggatatcctccaagaataagcagcatctgagcaatcacctgaagggaggaaggaaggaagactgtgagtggtggcttacacctgtaatcccagcactttgggaggccaaggagggcagattgcctgagctcaggagttcacgaccactcagagcaacctgttgatacccaatctctactaaaaacacacaaaaaaattacccgggtgtggtggcacgcacctgtagtcccagcttccatgcccagctgatttctctctctccatatatatatatatatacacatatattgtttttgcagagatagggtctcactgtgtcacccagtcatcaagcaattctcttatactgttttggaaaagcatgggaattacaggtgtgaaataccctgctggtcctgaaaaatgtgatatttgggattctctgcctggcttgttttacccaaaataatgacctccagttccttccaggttgctgcaaaagacatgattttcactgttttataactgaatagtattcctgtatgtatacataccacattttctttatttattcttctgttgattgacatgtagggtgattccatgtctttgctactgtaaataatgctgcagcaaatatttgtgtgcattttgatctattcctttgagtaggtacccagtactgcaactgcaggactgagtagttgttatattttttgttctttcagaaatctccatagtgtttgccataaaatctgcactaatttacattcccaacaacaatgcataagatttccccttttctccacattctcactaacatttgttatgtttttgtctttttcataatacccattctgactggagtaagatatctcattgtggtggttgttgatatttttgagacggggtctcactctgttgccagactggagtgcagtggtgtgatcgtggcttgctgcaacctccacctcccgggttcaagcaattctcctgcctcagcctcccgagtagctgggactacaggcgcgtgccaacaggcctggctcattttttgtatttttagtaaagacagggtttcaccatgttggccaggatgatcacagtctcttgagctcatcatacacctgcctcagcctcccaaagtgttggaattacagtcatgaggcagcgcacccaacctcaatgtggttttaatgaccatttctctgacgattcatggtgtggagaatttctttgaaataccttttggccatttatatgtgctcttttaaaaactgactcctgtccaggtgcggttgagcatgcctgtaaccccagaacttcgggaggctgaggccaatggatcacttgaggcaaagaggcagaaatcagcctggccaacaaggcaaaaccccatctttactaaaaatacaaaaaatcagccacgggctgtgactcgtgcctgtggtgcaagttactcaggaggttaaggcacaggaattgcttgaacccggtaggcacaggtcacagtgagccaagatcatggcactgcactacagcatgggtaatagagaaagacctgtctcataaaaacaaatgaataaataaataagataaaaaataaaaaagtctctttatgtcctttgccgactttttaatgggattctttggagttttctgttgtagttgagatctttgtttactctcggtattagtcttttgtcaaaggaaaagtttacaaataatttcttccgttctgcagtttgtctgctcactctgttgagaggattatttctttggctgtgcagcagctttttgtttcagtaaagcttttgaatttatataattaaaattttcagtttggtttaaatttgcactggtcgatttttggttttgttgcctgtacttttgaagtcatactcttgaactctttactagacaataaccagaagagttttctctagttttcttctcacatttttattatttcagtacatatatttaagtctataattcatcttcaattgatttttgtagaaatagtgagaaataggagtccaggtttattcttctgcaaatgacaattcaattgttccagcaccaattattgaaaagggtgtgctttcctcaacgtatattcttatcagctttgtcaaagatcagttggctataaatgtgtggctttctttctgggctctctagtctgttacatcaatctgtgtgtctatctgtatactactaccatgctgtattggtgatgatggctttgtaatataatttgaagtcaagaaatgtgatgctcccagctttgtttatttgcttcagaaaggctgagtcaacagctgcagagatgaagctgcccctcctcgcagggctccttcccggaaaaagatcatggctcccactgaccatataaccatggctggaactcctgaaattcccaaagggaggccctacccagtgaggggggatgaatgaaggtcctacttaaggaatctgtctggccacaatcaggcacagcagctgtgctgccttgtgggggaccagaccacctggattccctggagcctgcaggctagaatgtctgagtccatggaaacacagaaatggaggccgccctcacctccccagaaaactgtagtctcaggcagtctccagccgattgccactggttggctgctattccaagccagtgggtcttaacttgagaggtgctgtggaagtggggcccacggaatgaggctgcttggctccctggattcagccccttttctaagggaatgtacagatggaactcccgccttgcccagctttccaagtatataaaactcctgagtctctgtgagtgtctgagcgagtgctctggcaacattcgacacggctctgtgtatctgacccaagacccttatggcatgagctaatgggaggatcttctgatccatgcgtggcaaagatgcatgggagaaacatggtttgtgggtaggggttgtgcattcactactgcttctcttggctgtaggtgaaggtttctttggctctgtgctgatactgggtgcaccatcacccaccccctttgtttcttctcctgggtcaagtcatttgcctaatcagtcccaatgtaggaacctggatacttcagttcaaggtgctgaattcaccgtgcttttcattcaggggaagacagctgcttctcattgggcatcttggcctgcccacttcacgtcactttttgtaaaatccacaccactccaggaatatccattacttaacttcgcctgaaataaacagaaggctcattacacttatcatgggctcacttacttcgcctataatgaaggtgccatggaaatgctagtggatgacgtggtccattttcttagggatgagatagaaaaatggtgtatggctttttaatttaattaaaatttttagtttggtttaaatttacattggtctctttttggttttgttgcctgtacttttgaagtcttactcgtgaactctttactggacaatgaccagaagagttttccctaagtttcttctgatattttgaccatttcagtacatacatttcagtctataattcactttaaattgatttttgtaaacatggtaagaaataggagttcagatttattcttccgcatatgataatgcaactgtcccagtaccaattattgaaaagggtgtgctttccctagtgtatattcttgtcagctttgtcaaagatcagttgcctatgaatgtgtggctttcattttggattctctcgtctgttacatcaatctgtgtgtccacatttatacctgtaccatgctgtattggtgactatggctgtgtaatatattttagagttaggaaatgtgatgctcccagctttgttcatttgcttcagctgaaaaggttgagtccacaattacaaagatggcagccgcccatccccggaggacctccaacccagaaagagatcaggcttcccaccaaccctataaccctggctggagttcctgaaattccaacagggaggaccttcccagtgaggagggatgaatcaaggtcaaatttaaagaaacagtctggccactatcaggcacagcagcagtgctgccttgtgggggacccctcctgctccagaccagctgccctccctggagcccgaaggctagattgtctgagtctacggaaacagagacggtggccgccccaaccacccagaactcggtagtctcaggcacttggcttgctatcttgccactgcttggctggtattccaagcccgtgggacttgagaagtgctgtgatgatggggaccacaggatgaggctgtctggctccctgtgatatggctgtgatgagtggaggaacaccagggctcatgtctcacacagaattggagaaaatgacacaaacacatgtacagtggttttatggcgtgcagtttaataggcaagaacgaaggaagagctccccatactgagacagagggaggggggctccaaagccaaaagaggaaacccggagtgctgtggataccaatgagttatatgaagaaactggagggggcggtgtctgatttgcatagggttcaggcgattggttcgaccaggcatgtcatttatgtggcccacggaaaaactggccctcccacctagcctttgaatatgcacgtgccggacaccctgatttcctacactcatggggatatatgggggtggccatatcgccaggcacaggtggggacaagggccagaagagggcgggaatcgctatgtttgggtggacccagtttctaatggccggcatctgcagatcaaggttaccggagaactctaaaagccggggctttcctgctagacaagactcatttctggagctgctttaaaaagaaacaaaacttcccaaggaccccttttcctccctgtctgcccaaaataatttcttaacaactcgtataacacctgaattcagcccccttactgggggaatgtaccaacggaactcccacctttcctggtttctcaaggctagattgtgtaaacctcctgggtctcggtctgtgtctgagcagctgctctgccaacactccacacagccctgtgtactaggcccaaggccgccgtgactcagcccatgggaggatctcctgatttcttggttgcaaagatccatgggagaaaaatggtttctggggcggggtcacacactcatggcttctcttggctgtgcaagaaggttcctttggctctgttccaatatagcgtggttcatcacccacccctgttttctttgttctcctgagtcaagttgtttgcctagtcagtcccaatgtgagaacctgaatatttcagttcacgtgcttatcgtgaaattcactgagactttaattcagtggaaggcagcctcttctaattggccatcttggcccgccccctccacgtcacctcccataaaatggccacgctctccagggacgatgccattatatatctttacgtgaaaccgacagaacacttattacactttttgtgagctcatttacttcacttataatgaacatggccatggaaatgctagtggagaaagtggtcgattttctgatggatgtgataaaaaaatggtttgccgaccaattaatgacatatgtctcaaaactagtaacgagacccttaatcgctgggttgaagtttctaatcaagaagatgctcatctatgtattcaacaaagcagcttcccttgcttctgaaatgcttccaaacaacatctcatatttcctgaagaagataatgcctggacaagcagcacaagtcattcaggtttactttcagctcataaatccagcaggatattcgcacaattgttgggaaaccttatcagttcatgagtcgtgcatgtttcctttaatttcaggaggaagagggtaatctggaagagtttcctgacctactctgctgctgtgattaaacaaccaccaggaaattttgatgacactgttctcctgagctcctccctttcctcggggaagaaaagcattgaaactacaaaaataaagtgttatttggctggagtgaggtctcatgtctgcttatgcggtggctcgctgctcagaacagggtgagtctctgagttgtacgctgaggaggggaggctgtcaatctagaaaaaacccattgcatgggacacctccatggggtctggggggctgaggatgaggagctggactggatctagggaaggaggaggtttcagagggtgaaattctggcagtaaatcctgggggtgtttgaaaacttcctccctcagaaggagaagactcagggaggaataaggacaaaccatgggtcccttgaggggcatttactaacttaagaggactttatcgggaagcagagtgacaatggcctccttgaggactgaggcccctggataaatgaggcccagatccagatccagtccatgggagatgagaccttcaagggacatatttttgttgggacagaggaaaagtgcagctctgcagctgcagaggaagccttggcagtgtgaaagcgaccttggagggggccctgtgcgttctgaatgcttctgaggtccatcccctgtccccgcctctttttctggattttttgggctccatggtctccgccatcttctgagcgctccacgctgccaccttcagttttctcttctgggctccaaatactccaaaatctttcatatctgtgcccctacccctgtttttagcatgtgttgggactccaggtccctgaaggtttctggcctgaaatccacctccccagcggtgtggattctgctctagagaccccgcacttggcaaggttcccaggcccctgggggacaaccgagtggtatgtgcacttcagggctccacactcggcaaggtctttcaagcccttggggttccctcctcagttttcttcacatgtctgggatgtagtcactctataaatgccgggatgtgatccccaccccagtgattttttttagttccatgagtgttgctatctgaatagtcatcctgagagtgatgggaccttttgaatttgcagcaagttttagattagtgtgagtggcctgagatcgcaaaactggggctagcattggatgtgaggttaggctggtggaaaaatttgcccagaacctgaggagtgtgggctcactgcaggtggttaggatcagcacagaattgcaaggatgtatagctttggggtaaagaataacatggttcagaagtacatgtattagtcttttcatgcattgctataaagaattacctgagactgggtaattaattataaaaactcaggtttaattggctcatggttccacaggctgtacaaaaaggatgatgctggccatcagctcaacttctggggaggcgtcagaaaacttagagtcatggcaaaaagcacaagggaatcaggctcatcctccatggccagagctggagctagtggtaggagaggtgctgcacacttttgaacaatcagatctttttagaactctatcaccagacagcacctagaggatggtgctaaattattcatgaaatatccacccatatgatccactcaattctcaccggcccaaccaggaccacctccaccattggggattacaattacacatgagatgtgggtggggacacagatccaaactcgatcagtgggcatcttggactgggtctactatagaagaagaaccaggagctgactatcatccttaagactgcccatgatggccaggcagggtggctcatgcctgtaatcccagcactttgggaagccaaggtgggtgaatcccctgaggtcaggagtttgagaccagcctcgccaacatggtgaaaccctgcctctactaaaaacacaaaaaattagatgggtgttgtgccagacgcctgtaatcacagctactccagaggctgaggcatgagaattgcttgaacctgggaggcggaggtggcggtgagccccaatcgcactgctacactccagcatgggcaacaataccaaaacatcgtctcaaaaaaaaaaaaaaaaaaaaaaaaggctgcccatgaccactgccccagtgagagggacaccagcatggctaagatcaagtgctggacattcttcatgggtcagacattaaagcaggccacactgttacagagatgggctccattcatagcaacaaagtggtgagaagatgtgggaatggcagaggccagcactttgccatcaatgcaaggtgggcataaggagctggcaccagtgccagagtgcatcaggggaggactgctttgcaatatctagcacttacctcttagagtatgtttcattagggacaacagatataaatggcagacaagtgagtcccttcagtaacaggaaatagaaatcatcaagaggaacagaaacagatgtcagcagccctcatataaagtcatcatccttcatccagttaaaacctgagacagttctcacataagaaggtctaattcaaaaagagactgggttctcatgaggcaggttcatgcaaaaccaagggaagtatacaactttgggattctccagcttcccttggaaaagacctacaatcatttgcttaggtaactgagcactgaacaaaggtgagtattgttatctttcagaagctgttggccatgaaggtcttgctggcataaaacccatggttggaaacatcaccatgacccctgttagagtaatggcctaagggcaagggtcaggaaattgatgtattccttgccaacttctgcgagacgagtgttggtccactcatctctttcacggaattcaccagtctggtatcttcaaaatccagaaggatgatggcagatggcaggaaactaatgcaaacaccatcagttgtacctccactgtagcagcagtaatggatgttatctcttcattgtaatatccagggagggagaagatgacattattctcaatattctaaacaccctgtgtgtacagcctctgtgatattttttgtaatatccgtgtgggagagaattatattactcctaatatctcaggggttgtgccccctctgtgacaatgttcctaacacccaggaggggataggatgatatcacttttagcatcacagggggtgtacaccccactgtaatattgttcataatatccgggggggagagaatgatattactcccaatatcgcaaagactgtacaccaacctgtgatattatttgtaatatccataagaggaagaataatattactcccaatgtcacaggaagtgtacacccttctgtgatattgttcaaaagatccagttagggaggggatgatattactctcaatatcttaaacaccctgtaggtaagccctctgtgatattcctcataatatccagagggagaggatgatattactcccaatattgcatgaagtctacaccccacctgtgatattgttcctaatatccaggatgggagaggatgatattactcccaatgtcgcaggggatgtacaccttccctgtaatattgttcgtaatatctagaaaaggagaggataatattactttcaacatcgcagggggtgtacaccttccttgttatattgttgctaatatccagggaaaaagaagatgacattaccaccactattgcagaaggtgtacacccccccttgatatagttcctaatatccagaaaaggagaggagatattactccaaatattgcaagaggtgtacattcccctgtaatatttttcctaacattcaggaagaaagagagtgatattgcccttaatattgaagggagtgtgccccccccgtgatattgtttctaatatccaagaaatgaaaggatgatattactcccaatatcacaggggctgtacagccccctcccatgatattgttcccaacatcggggggggggtgaaatagtattattcccagtatcacaataggtgtacacacctgtcgtgatattgttcctaatacccatgggggaaaggacgatattattcttaatatctcagagggatgtacaccctccctgtgatattgttcctaatatccggggtgggagaggatgatattacccccaaaatctcaaagggtgtacacccctcttgtgatattgttcctaatatccagggtggagaggataatattattcccaatatccaggaaaggaaacgatgatgttactgtgaatattccagggggtgtcctcccctctgtgatattgttcctaatatccaggttggggagattatgatatttctccaaatatcacaaggggtgtacaccaaccctgtgttattgttcctaatatcgatggggggagaggacgatattactcccaatatcacagggggtgtacaccacctttatgatattgttcctaatatccatgaagaaagaggatgatattactttcaatatcgcaggggatgtacactccccctgtgatattgttagtaatacctaggagaagaaagtgtgatattactcccaatatcgcaggggatgtacacgcttcctgtgatattgttcctaatatttagggggaaaggggatgatattactcccaatatcgaatggtgtgtacacccccccgtgattctttttttttttttttttttttttttgagatggagtcttgctctgccgcccagactggcgtgcaatggcgcaatctcggctcactgcaacatttgcctcccaggttcgcacgattctcctgcctcagccttcggagtagctgggattataggcagctgtcaccataccaggctaatttttgtatttttagtagagttggggtttcaccatgttggtcaggctggtcttgaattcctgacctcaaataatccacccaccttggcctcccaaagtcctgggattacaggcataactttccctgtgatattcttcctaatattcaggaagaaagaggatgatattgctcccaatatcgcagagagtgtgcactcctcctgtgatatggttcttaatattcagaggaggagaggatgatattactttctatattgcagaaggtgtacacctccctcgtgatgtctttcctaatatccagtgggggagaggttattagtctcaaaatcacagaaggtgtaaacccccatttgatattgttcctaatattcaggggtggggagagaaaggtattactcctagtatttcagggcatgaacacccccaccgtgatatcattcctaatatccagaaggggaggcaatgatatttctcctaatatcacaaagggtgtacaccccttctgtgatattgtaaatattctgtgtgtacacccccctgtgttatagtctgtaatatccgggtgggggagagggtgatatttctccccatattgtaggggatgtacacccttctgtgatatggttcgttatatccagggaagaaaaaggtaatattgctgcccatattgtggagagtgtacacccccatgtaatatggttcgtaatatccaggagtggagagggtgatactgctccttacatcgaggaaggtgtacaccttattgttatatgattcgcaatatccaggggaggagagagtgatattgctccccatgtcgcagggggtgtaaaccctccgtgatatgattggtaatatccaggaaaggaaagggtgatatttctccccatatcgcgggggacgtacatcctcctgtgatatggttcgtaatatccaggaggaaagaggaaaatattgctcttcataacccgaggggtgtacaacccctgtgatatggttcgtaatacccagaagtgtacacccctctgtgatatggtttgtaatatccagggggttagagggtgatattgctccccatatcgcagtgggggtacacccccctggattggttcataatattcatggggggagaaatttacatttatcctcatatcagggggggtgtacaccccccgtgatatggttcgtaatatccaggggaagaaagggtgatattgctccttatatcgcggaaggatcaccctcccctgtgatatggttcataatacccagacgggaagagggtgatattgttcttcataaagcgaagggtgtacagccccctgtgatatggttcataatatgcaaaaggggagagggtgatattgctccccatatcacggagggtgtactcccttctttgatatggttcgtaatatccaggggtgtagatggtgatatagctcgccctattggggagggtgttcacccctctgtgatattgttcgtaatgtccagggaaagagaggatgatattactcccaatatcgcagaaggtttacaccactctgtgatattgttcataatatccagggaaggagaagacgatattactcccaatatggcagggggtgtagaactcctgtgatattgtttgtaatatccaggcaaggagaggatattactctcaatatcgcagaaggtttacacccctatgtgatactgttcatgatatccagggaaaaagaggatattactccctatatcacaaagggtgtacacccctttgtgatattttttgtaatatccaggggagagaggataatattactctcaatatcagaaggggtgaaaaccctcctgtgtcattgttcataatatttagggaaggagagagtgatattactccaaatatcacagtgggtgtacacccccctatgatattgttcctaatttccagaaggggagatatgatattattgccaatatcgcagaaggtgtacaccttactctgacattgtttgtaatatccagatggggaaatgatgatattactcctaatatcacagggggtgtacacccccttgttttattgtttgtaatattcaggggaagagacgattatattactcccaatatcgcagggtgtgtacaacactctatgatattgttcataatatccaggggaggagaggaagtgtacacccccccgtgatattgttcgtaatatccagaggtagagaggatgatattactcccaatattgcaggtggtgtacacctttctgtgatattgtcatgatattaagaaggggagaggatgatattactaacaatatcacaaaaactgtacactccctgtgatattgttcataatatccagaagaagggaggatgatattattctgaatctcgcagaagatatacaccaccctgtgatatggttcataatatcctaggggaaagaggatgacataactgtcaatatcgcagggggtgtacaattccctgtgatattgttcacaatattcagagggaaaaaggataatattactttcaatatcgcaggcggtgtacacattactgtgttattgtttataatatccggaatgagagaaaattttctcccaatatcacaggaggtgtacactcccctgtgatattgttcgtaatatccagggaggggagaggatactattactcccaacatctcagggagtgtaggccccccctttgatattgttcctaatattcggaagtggagaagatgatattacttccaaaatcgcagggggtgtacactccctctgtaatattgtttctaatattcatgagtggaaagaaagatattactcccagtattgcaggggacatacaccacactgtgatcttgttcacaatattcgggggggagaggatgatattactcccaatatcaaagtaggtgtacacccccttctgatattgatcgtaatatccagaattaaagatgataacgttactcccaatattgcagggggtgtacatttttgaatactgttcataatattaagagggggaggggatgatatctgtcccaatatcgcaaagtgtgtacacctcctgtgacattgtcccaaatatccagaggaaaaaaggatgttattactcttaatatctcagagagtgtacacctccctgtgatattgtttgtaacatccagaagaaagaggctgatattactcttaatatcgcagggggtgtacacccccgccccgggatattattcgtaatatccagggggaagtggaatgttcagaatgggagaggatgatattacttgcaatatcatagtgggtgtacaccccactgtgatattgtttgtaatatccgggaaaggagaaaatgacattcctccccatatggcaggggctgtacaccacctatcatattgttcaaaatatccagaaggggagaggatatgtctccaagtatcacagggggtgtacaccccgctgtaatattcttcctaatatccagggtgtgagaggataatagtactcccaatatcccagggcatgtacaccccccttgtgatgttgttcctaaaattcatggggagaaagaatattactcccaatatcacagggggtgtacatacactctgtaatattgttgccaatatgcagcaggagagaggatgatattactcccaatatcacaggggctgtacaccccgctgggatattgtttctaatatcaagggggaaaaaggatgatattactcccaatgtcgcagggtgtgtacttcctctttgtgacattgttcctaatatccaggagagaagagggtgacattccttccaaaactgaaaggggtgtacacaccctttgagatattgtctttaatatccagaacgaaacaggatgatataactcctaatactgcaggggggtacaccctctctgtgatactgtttctaatatccaggaggggaaagaaaaatattaatcccaatatcacagggggtgtacattccccctttaatattgttcctaatatccaggaagacacaggatgatactatttccagcagcacagggcatgtacacccctttgtgatattgttcctaatatccaggaaaagagaggatgatattactgtcaatattgcagggcgtatacactggttctgtgatattgtttctaatatccgggggtggagaaaatgatattactcccaatattccagcgggtgtacacccgttctatgatattgttcctaatatctgggggagagagaatgatattattgtcaatatcacaggggatgtacagattccctgtgatattgtttctaatattcacagggggagaagggtataatactcccgatatcgcagggggtgtacactccccctgtgaagttgttcctaatatccagggattgagagaatgatattactcccaatatcacaggcggtgtaaaccccctgtgtgatattgttcctaacatccagaggaaaagatgatgatattattttcaatatcacagggggtgtacgcatccctgtgatattgtttctaatatccaggggaggagaggatgatattattgttaatatcgcagggggtgtaccccaccctgtgatactgttcctaatatccggggtggaagaggataatattgctcccaatatcgcaaagggtgtacaaccttcctgagatattggtcctaatatccagggagggagaggatgatattactttcaatatcacagggagtttacacaacccctgcgatattgttcctaatatccagcggaagaagagttaggataatactattttcaaaattgctgggtctgtaccccctccccgtgatattgtttctaatatccaggaggggagaaagtaatatgactcccaatatcttagaagatgtacaccctccccataatattatttcttacatccagggggtagaggatgattttgctttcaatatcacagagggagtaaacctttccggtgatattgtttttaatatttaaaaagagagaagataaaattactcccaatacaaaggggatgtattgtgtactcccccctctgatattcttttttaatatccagatggagagaggatgatattactttcaatattgcatgggatgtataaatcccctgtgttattgttctgaatatacaggtggggagagtatgatattactccaaatatcgcagggggttctttccccctgtgatattgttcctaacattcagggagggagaggatgatattactcttaatattgcagggggtgtacccacgcctatgatattgttcctaatatccagagggggagaggatgatctaactcagaatatgacaaggggtgtacacacagcctgtgatatggttcctaatatacaggggagaaggggataatatttctcccaatatcgcagggggtgtacaaccccctgtgatactgttcctaatatacagaaggggacagcatgatattgttcctaatatcgcaggaggtgtacaacgccctgtgatattgttcctaatatccagggcgggagaggatgatattaccctcaatatcgcagggggtgtgcactttccctgttatattgttcctatgatccgggtggggggaaatgacattagtcccaatatcgcaggatgtgtgcaccgctcccccgtgatattgttcctaatatcaagggggagagaggaggatattactcccaatatcgcaagggatgtacatcctccatgcgatattgttcgtaatattcaggaggagagaggatgatattactcttaatatcgcagaaagtggacacccaccctgtgatgttcttcataatatccagggaagcagacgattatatgactttcaatatcgctgggagtgtacatcccttttgggatattgtttctaatatccaggaagggagaggattatattactctcagtattgcaggcagtgtacaccttttttgtgatattgttcctaatattcagaaagggaaaggatgatattactcccaatattgcaggtggtgtatatccccctctgatattgttccttatatcaaggaagagaaagaataatattactcccaatatcaaagacagtgtagacccctcctgtgatattgtatttaatatccatggggaaagaggatgatgttactcccaatatcgcagggggtttacacccacactgtgatattattcctaaaatccagtggaggagaaaataatattgctcccaatattgcagggtgtatacaggccctcccccgttatattgctcctaatatccagcggtggagaggatattactttcaatttgtgtagggagtgtatacccccctgtgatatttttctaatatcaaggatgggaaaggatgacattactcccaatatcgcaggaggtgtacacgccctgtgatattgttcctaatatctagggaaggagaggatgatattactttcaatattgcaggagctgtacaccctctgtggtattgttcttaatatttaggttgggagaaaatgatatgagtccaaatatcgcagaaggcatacacacttccaataacattgttcttaatatccgggggagagggtgatattactcccaaaatctctggggggtgtacacccccttctgatatttttcctaatatccagggaaggaaacgatgatattactataaatattccaaggagtgtacaccttcctaatatcctaatattgttcctaatatccaggggtgggagaggattatattactcccgatatcgcagtgggtgtacacccctcctgtgatattgtttctaatatccaagctaggagaaaatgatatcactctcaataccacagggggtgtacaccttccgcatcatattgttcctaatattcagagggaaagaagatgaagttactttcaatatcggaggggttgtacacaacccctgtgatattgctgctagtatccaggaagaaaggggattatgttactccccttatagcagggggtatacacctcccctgtaatattgttcctaatatcaaggctgggatatacgtggggggaaggatgatattactcccaatatcgcaggggttatacaaccttctgtgatattgctcctagtaaccagggcagaagaagatgatattactcctaatatcgcaggaggtgtacactcccccattatgttgttcccaatatgcagaaaaggagaggatgacattattgccagtatcgcagggtgtgtacaccacccctgtaatattgttccaaatatttagggggagagaggatgatattactcccaacatcgcagggggtgtacacacatcccctgtaatatagttcttaaaatctaggggaaaaggggatcttatttctctaaatattgcagagggtgtacactccccggtgatattgttcctaatagccgggagggagataattaaattactttcaatatctcagagagtgtacatcgcccttgcgatattgttcctaatatccagagcaaaagagaatgatattactcccaatatcttaggagtgtacatttaacctgtaatattgttcctaatatccagggggaagagaatagtattactgccaatatcgtaggggttgtacaccttttctgtgatattgttgcaaatatttagtagagggaaagaatattactcgcaatatcacagggaatgtatacttcccctgtgatattgttctgatatccagaaaaagagagggtaatattactcccaatattgcagggggtgtacaccccccttgtgatattgatcctaatataaaggaaggaagaggatattactcctcatatagaaggggttgtccaccccccttgtgatattattcctaatattcagggaagcagaggatgatattattttcaatatcacagagggtgtgcagtccacctgtgatattgttcttaatattcggggggagaggatgttattatgcctgatatcgcagtagaggtacacccctcaagtgatactgttcctaataaccaggggtgaagaggatgatattactcccaatatcgcaggtggtgtacacccccccatgatggtttctaatatacagagggggagaggaaaatattactcccaaaatcgctggaggtctacaccccccttgtgatattgttcctaatatccaggaaaggaaacgatgatattactgtgaatattccagggggtgtacacccgctttgtaatattgttcctcatatccagggtgtggagaggattatattactcccagtatcgcagggggtgcacgacgcccctgtgatattgtttttcatatccaggaggggagattattatcaatatggcaaggggtgaacaccccctgtgatattgtacttaatagttaggttggcagaaaatgatattagtctcgatatcgcagggggtgtgcactccgcctggtgatattgcttttaatatcaagggggagaaaatggcattactcccaatatcgcagggggtgtacaccgctcatgtgatattgttcctaatatccaggtggagagaacataatattactcccaatatcgcacaaggtgtacacccctcctgtgatatggttcctaatatccatgggaggagatgatgatattactcccaatatcacaggggatgtacaccacccttgtgatattgttcctaatatccagggaagaaaacgatgatattattgtgaatattacagggagtgtacacactccctgtgatattgtttttgatatacagggtgggagaggatgatattactcccaatatcacataaggtgtacaccccccgtgatattgttctaaatatttcggtggggagaaaatgatattagtctccatatcacagggggtgtgtgctcctcaggtgatattgtttttaatatcaagagggggaggagattatattactttcattatcacagggggtgtacacccctcctgtgatattgttccttatatccaggcgaggggaaaataatattactctcaatatcgcaggaggtgtacacaccccatgtgatattgttcctaatattaagggggaaagaagataatattactttcaatatcacagggtttgtactcctttcttgtgatatagtttttagtatccagggggaaagagcatgatattactcccattgtagcaaggggtgtacacacctcctgtgatattgttcctaatatccagaagtggtgaggatgatattactcccaatatcgcagggggtatacaccccacctatgatattatttctaatatccatgggaaaagagtatgatattacacccaatgtcgcagagggtgtgtatttttcctgtgatattgtttctaatattcaggcggggagaagatgatattactctcaatatagcagaaattgtacatccccgctgtgatattcttcataataatcagggaaaaagaggatgatattactaccaatattgcaggggggttacacttcccctatggtagtgttcctaatatccaggaagaaagaggatgatattaatcccattatccaggaagtgtacacccaccctgtcatgttgttcctaatatccagcagggaagaggatgatattacaccccccccccgtgatattctccttaatatccaggaggggagaggctgatattactggatatatagcaggggtgttcataccttctgtgatattgttcctaatatccagaaaaggagaggatgatattacttccaatatcgcagaaggtgtacacctccctgtgatattgatcctgacattcagaaggggagaggatgatattactcaaaataccgcagggcatgtgcattcccttgtgatattgttcctaatacccagaagggaacaggataatattactttcaatatcgcagggagtgcacacccccctttggtatggttcttaatatccagaaggaaagagggtgctattactttccatattgcaaggggtgtacaccccactgtggtatggttcataatatccaggcagggagagggtgctattactccccacagtgcggggcatgtacaccctgctgcggtacggttcctaatatccagggggagagaggatgctatgactccctatatcgcggggtgtgtacacccctgtgtggtatgttttgtattctccaggaacggagagggtgttgttacccctcatatcgctggaaatgtacactcccctgtggtatggttcgtaatatccaggggattgagggtactgttacccccatactccccatatcgtggggggagtgcacctccctgtggtatggttcgaaatatccagggtaagagagggtgctattattccccattttgcaggaggcgtacacccccctatggtatggttcgtaatatccggggtgaggggatgctatcaaaagaagagagaaagagaccccccatattgttctatattattttatactcagtacctgttttaagaagaaacaaggaagtgaaaccaaaagcaggcagcccggcgccaggcaccagacccaaaaccagacccgaaaccaggcctgggcctgcctgaccttagcctgatagttaaaattcaacccatgacctagcaaccaatgttatccatagattccagacattgtatggaaggacattgtgaaatttcttgttctgtgctgtttcactctgattaccggtgcctgcagcccctgtcacatacccactagattgctcaatcaatcatggccctttcatgtaagatctttagtgttgtgagcccttaaaaaggacagaaattgtgcactcaacaagctcggattttgagacgctagtctttcgatgcttccagctgattaaaagccacttccttcactacctcggtgtctgtggggttttgtccgcgactcctcctgctacactatgactccccatatcaaggggggtgtacacccccctgtggttcgtaatatccagcaggggaaaaggtgctattactccccatattgcagggagtgtacacccccttgtagtatggatcgtaaaatcaaggggggagggaaggtgtaattatccccatatctcagggggtgtacacccctttgtggtaaagtttgtaatatccagggatattacagggatattatccccaaattaatacttttataatttcttatgcctgcctttactgcaatctctgaacataaattgtgaagatttcatggacatttatcacttccccaatcaatacttttataatttcctatgcctgtctttactttaatctcttaatctcatcatctttgtgagctgaggatgtatgtcgcctcaggaccctgtgatgattgcattaactccacaaattgtttataaaacatgtgtatttgaacaatatgaaatctgggcaccctgaaaaagaacaggataagagcgatgttcagcgaacaagggagataagcataaggtctgactgcctgtggggctgggcagaacagagtcacatttttcttattgcagaaaatgagtaggagaaatatcactgggaagggaacgcattcctaggggaggcctatggacggccgctctgggggtgtatcccttatgtggttgaagataagggatgaaatacaccctggtcccctgcagtgccctcaggcttgctaggattagaaattccagcctggcgaattctagtcagaccagttctctgctcttgaaccccgtttcctgttaagatgtttatcaatgacaatgcgtgcacagcaggacatggaacctcaatagtaattccattttctccctggccttgtgaccttgctaggcccttctgcccttgtgatcttttattgccatttgaagcatgtgatctctgtgacccactccctattcgtatccccctccccttttgaagtccctaataaaaacttgctggttttgcagatcaggtggtcatcacagaacctgccgatatgtgatgtcaccccggaggctcagctgtaaaatttctctttcgtactctttcactttatttctcagaccaggtgacacttaaggaaaatagaaaagaacctactttgaaatattgggggctagttcccccaatagacattgttcctaatatccagaaaaaaagaagatgatattactcccaatatcacaggggttgtgaaccccacctgtgatatggttcctaatatccaggaagggagagaatgatattactctccatattgcagggggtgtgcacatccctgtgatattgttcctaatatccaggggaggagagggtgatattactcccaatattgcaagggttgtaaactccaccctgtaatattgctcctaatatttaggatttagggggggagaggataatattactcccaatatcgcaggggatgtatatgccctctttgatattgttcctaatatccagggggggagaggataatattactttccatatcacaaagagtgttcacccccctgtgatattgttcctaatatccaaaaaggaagaggatgatatcaatcccaatatcacaggaagtgtacaccccccccttttatattgtttctaatatccaggggaaatgagggtgatatttctctcaatatagcagaatgggtacactccccctgggatattattcctaatatccaggggaaaaaaagaggttgatattcttcccagtatagcagggaatgaatacaccctttgtgatattgcttctaatatcaaggggaaaagaggatgatatgactcccaatatcacaggggatgtaaacctgtggcgttgttgctaatatcaaggagggaagagtatgatattactcctaatgtcgccgaaggtgcacactttccctgtgatattgttcctaatatccaaaagggaagagaatgatattacccccagtattgcagggtgtacaccacccctgtgatattgctcctaatacccaggaaaaaagagaatgctattacccccaatatctaaggggacgtataccttccctgtgatattgtttctaatatccaagtggggagaggatggttttactctcaatattgcagggagtgtacactccccctgtgatactgtttctaatactcgggctgggagaaatagtattactcccaatatcgcagtgatattgtttccctgtgatattgtttctaatatctagtgggggagataattatattactaccccatacacaggggagggtgtacattcccctgtgatattgtttgtaatatccagggaaggagaggatgttactcccaatatcacaggggttgtacaccccttttttgatattgttcctaatatctggggggcagagaattatattactgtcaatatcacagagtgtgtacaccccctctgttatattactctttatattcagggcggtagaggatgatattactccctatatcacagggggtgttcacccctcctgtgatattgtttataatatctaaggggaaagaggatgatatcactctcaatatcaaaggaaatgtacacctttcctgtgatattgtttttattatataggggggcagaggatgatattaagaacaataccacaggggatgtacacccacgtattgatattgtccctaatatgtatggggaaagaggacagtgtaactcccgatatcgcagagtgtgtacacccccttgtgatattgtttctgatatacacggggagaaaagataatatttcttccaaaattgcagggggtgtacaaccccctgtgatattgtttttaatatccagtgggggagagaatattactcccaatattgcagggcgtgtacacaacccctgtgatattgttcctaatatccagagtaggggaggatgacattactttcaatatcgcaaggggtgtacattcccctgtgatattgctcctaatatccatgaggggagaggatgatattattcctaatatggcaggggctgtacaccttccctgtgatattgtttctaacatccagtgggggagaaaatgatattactccctatatcacagaaggtgtacactttccctgtgatattgttcctaatatccagaaggggagaggataatattactcccaatatcgcaggaagcttacaactcccctgtgatattgtttctaatatccagggaggtagggatgatattactcccaatatcgcaggggatgtacactcccccgtgacattgtttctaataaccagggggtgagaggatgatattacgcttaataccgaagggggtgtacacacccttgtgatattgtgcctaatagccagggggaagaaaattatattaattttaatatttatggggaaaaaggatgatattactcccaatatcacaggggctgtacaccgaccttttgatattgtttttaatatccagaagagaagaggataatattgctcccaatatcagaaaaggtgtaaaccccttctgtgatattggtcctaatatccagggagggagagaataatattactaccaatatcacagaaggtgcccacccccaaggtgatattgctcctaatatccaaagataatagggtgatgttactcccaatatcacaggaggtgttcacaccccttgtgatattgtttctaacgtacagggaagggagaggatgatattattcccaatatcacaggaggtgtatactcctctgtgatattgattttaatattcggggggaaaggatgatattactccctatatcgcagagggtgtacaccctctgtaatattgatcctaatatccagggcgggataggatgatattactcccaatatcgcagaaagtctacacaacccccagtaatattgtttttactatccagggggaagaggatgacattactcccaatttcacagagtgtgtacactcaccatttgatattgtttctaatatctagggggagagaatatattactcccaatatcacaggaattgtacaccacctctgtgacattcttgtgaatatccggggaaaaagagaataatattactcccaatattgcagagcgtgtacacccctccatgatatcgatactaatatttttttaaagaggatgatattactcccattgtcacaggatgtgtacaccccccttgtgaaattgttcataatattctggggggagagcataatattactccccatatcgaaaaaggtgtccaccctccttataatatggttcctaatatccaggatattacttaatccaggatacttgtaataccctaaatatacaattgcttgaacctccacctcccaggttcaagcaattcttctgcctcagcctcccgagtagctgggactacaggggcacaccaccacacccagctaatttttttttcttgtatttttagtagagatggggttttgccatattggccaggctggtctcaaactcctgaccttgtgatctgcccacctcagcctcccaaagtgctgggattataggcgtgacccaccgtgccaagccaggaagaggatgctctatagatttccccaataagagatggctttgcagggccattccaaaatatgtcaaagaaatacatttggggataaaatactttgatttcctttagggaatgttatctattatgtgatgctataccagagtcaggttggagtcggttatcttattgcaacaaagagtctgttccgtcactgttgggatctctattttttcctcttatttcttgagacagggtctcactctgtcacccagtctggagtgcagtggtgcgatcttcattcactgaaacctctgcctcctgtgttcaggtgattctcgtgcctcagccccttaagtaactaggattacaggtgtgcgccaccacacccagctaatttttgtattttcagtagagatggtattttgccctgttggccaggctggtcttgaactcctggcctcgtgtcatctgcccacctcgacctcccaaagtgctgggactgcaaatgtgagctattgtgcccagccaggatctctgttttaatgttagtgctggtcactttgcatgaactccaaagggaagaaatataatgaggtgtgtctgaccccctgccttctcatcgtgacctgaattagtttttcaggtttgcaggggatacccttggacaagaaggggctctattcggttggttggggggattagaattttactttttgtttacaatatttctcctgaaagagttaggggctcacaaggaatttccgcgtgagcaacttatgaggaaagccatctgggaagatatgtgtccttgtgtcactgggatattctcgtttaccccaatgatacggcaatgacgcagggttgtgaaattacagctatgtgtttggggaaaaaagaaagcaggattgtgtgactacgtttccaaacttcacttgcccttagccatagtgagttgggggcctggagattctgttttctttcacaatgatatagatacaattaaatgtatagaaagcaaaaaaataaaaaggtgagtaatgaggaacctctgattcctgagtggccatgtagttacccatggcacagagccacagttactgaaggtaaagtttgctggggaatttagaaatgaatccagctcttggaggagtcagtttactggatgcctaagaaaatgcaaacaaaataagaaaaaagggtaatattcaatcccatagttattgttacctgtcatagctaaagtaaaattaaaacagagtgctggcttcaatcttgatgctacactaagcttagatttcagtgaatgtgagtctcagccactagctcagagccacctcccaaagaccaaatcatgtagggacaatagaaagtacttctgagaattgtggttaccaagaacctagtaactgttggggaggagcaaaacaaagtacagaaaccagagggtacaatctgagtgagactgctatcagcttctggaggagcctttactaaaatgaatgatgagagtaactggatgatgagagtaactaatggatgatgagagtaagcaatgtctttggttttcttttttttttttttttttttttagcagacgtctcactcttgtcgcccaggctggagtgtaatggcatgatctcgcctcactgcaacctccacctcctgggttcaagcaattctcctgtctcagcctcccgagtagctgggactacaggcactcatcaccacacctggctaatttttgtatttttagtattttctggtgagggtccaggtttccggaaacaactcagagacatatgttaagatgttatctttagttttcacagggaaccaaatatgttacgactccaatttccttggctattgttttaagttaccattaccttctcgttgatcaagttgctcatttacttctcaagcctagctagatgcctggaatttcccttgaaggaagtcaagattttcctttatctccatactggctgatggtgatcgagtaagcccctaagaggggtccctgctccatctcgagatgctgctagattctacagtgcctaataaacagctctcgcctggccgacaaagagctgcttgctctctggatagcaattccaaagtgaacagacaacatcctgtttggaagactgccactctgttagaagaagcatcaggaaaacctttcttttgagctatttataactaacagcaattgaccaagtatacttttgtgagtgaaactgacctttctccctgtaagaattctccaaaatttggaaactatttgtgagtatttttacttatggcaatataattattggcacaagctcaatcagattcggttttctttcgtaacaggaaccattggagatactcattactctttgaaggcttacagtggaatgaattcaaatacgacttatttgaggaattgaagttgactttatggagctgataagaatcttcttggagaaaaaaagactgggtatattttcaatatgctttccttttaaggtccctcacctgtggaaagtaaagaatgtcactttctgacaggctcaggaacctcaagttatgtagggatctcaagaagatgggggaattcacccagttcatacaggtgaaattgctgttgcaaagattatgaatatgagagaagtccagcatggctgacttcatctcgtgtctggcctcaggctggctgcccttgctcactcttgggcataggccaagctagccatgggaggaatttagtttatagtttaactttgaagcacggatgataatagtctctccctaaaatgaaccccttccttgctcagggactgaaactacctttgtatgacaaatgaaagcccacaagattaagattatgagaggggcctgaattctgctaaaatgcaggtgtagctgactgataacaagtcattgtcccacagcttgcctttctataatctcttgcttctcaggagtcacatggccagaggtcctgagatttccagtcctgtgacccccacccagagatggacttagtgcatgaggaccattttccacacccctatgatttcatcctcaaacaatcagcagcaaccattccctagccccctgccttccaaattatccataaaaatcctagcctctgagttattagggagattgattaataatcccagtcctaccccttgggttgctctgatttaattaaaccttctctactgcaataccacggactcagtaaattggttttgtctgtgcaatgggcaagaagaacatgttgcatggttatacaggtactacaagcacagtctgatggcaaattattggttttgcttcctgcccttgatgtttctaaacatctagtccaaaattacttgtgaaaggtccagcaaagccaattttaaaagaggctatatggccaatcactattctttctacacattattgcaaataatcaggccacggctgggcacggtggctcatgcctgcaatcccagcactttgggaggctgaggcaggatcacctgaaatcaggagttcaagaccagcctaggcaacatgataaaaccctgtctctactaaaaatacaaaattagccaggcatggtggcatgcacctgtaatcccagctacttgggagactgagggaggagaatcacttgaacctgggaggcagagattgcagtgagctgagatcacaccactgcactccagcctgggcaatagagtgagactttgtctcaaataataataataataatcagaccaagtataatgaaattaaaatttattttgcaaataaattggtcctactacaatttatccttcatagaaatgtggaaactgaagataaaaaaaattaggtttcagaagaaaactatactacacctgttattagattctagccctaaacattgtttttgaggtttttattatttacctgcaatttggtctaaattctgaattatttcctgactacaagtatccaaggaataaatgggttttctttttctttatgatagttttagttggcttctaatgcaacaacaatttttattgtaatcctgtgtgcattctattcctactattcaaattattaatgttatagatctttcattgtagtacttctgaattaaccaaaatcacagtattctgaagatgattctacaaagcctgctgtttctacaaaggctgctgatgatttctacaaagcctgctgtagtgttgctgtggcctctgcttaaaaaagtagaaaacacattgatgcagcatgttcaccccaacctccctgcctaaaggctcagggaccatcttggaagaggaaggcgcgtgagattgtaagagccgaattagggggatggagtgtggagaataaggacacttcatcttggatgctcacctgccaaattgacttctgatgaaagccagctccagaaatgtgcctacagttactactttcacctaaaccctgcccttagtcaaatccttctcttcttctaagcaatcaacttcaattccttgtataacccacagtataaaagggcttttataccattctatcctattgcatgtaagccttgggtctgggaggtaacagtgtgggattccaccatctcatctccctgccacccaaacatgcctgctcttctttaagcaatattaaatgtttgtacttcagaaatttgatttgtcagcctcttcttcagactctcagcttctttggcctttgggagtaaatttgcataggcctgctcaaaacaggatgttctgggggtttgggggtgttgttttgttttgttttttgttttgtttagagacagggtctcactctgtcacccaggttggagtgcagtggtgcaatcatggcacactgcagcctcaaactcctaggctcaagcaatccccccaccttggcctcccaaagttctgggattacaagcataagccaccatgcccagccctggacttttctttaaagacatttacacagtgtaggaattactgtgggtgcactgctcaggtccccttctccaggatgctcattcctacctcatagatgattttcctgcagagatttgacctcagctgaagggcagtcacctggtccaggtggttgctattcacctccttcctgagaacagccaacagccagggacacgctagcacagagatataagagcgaccaaggtgaggccccttctgtgctgcggtgcatgctccagagcctccctgggatcagacttaagagggtctccagccagatctggtcttcgctgctttcctcgagctccccagcgcactcctgcaatgcatcttttttttttttttttttttttttgagacggagtttcactcttgttgcccaggctggaatgcaatggcgcaatctcagctcaccacaacctctgcctcgcgggttcaagtgattctccttcctcagcctcccaagtacctgggattacaggcatgcaccaccacgcccagctaattttgtatttttagtagaaacgggtttctccatgttggtcaggctggtttcgaactcctgacctcagttgatcctcctgcctcagccttccaaagtgctgggattacaggtgtgagccactgtgcctggcccaatgcacctcttgaatcacctcctcatgctttgcttttagagaacatgatccccaacatgtgattccagcaaagattctagaaagccaaccgtgacaatcacttctgggtttagatgacccccccccaccacaagatggcagtgagcacctcatcacagaggtgctgatggtctgcagcaccgcgccaggccagaacgtgccttttacagaagaaaataacccagtagctgactaggatggtgaggagggctggtgagcactgcggtagtgagagggacactagcatcactgagatgcaagtgatggtcatttttcataggtcaaagctcaaagcaggggacagttacagggcagggcttcatagcaccagtgtgatgaaagtatctgggagtggctaaggccagcactatgccatgggaagcaaggtgggcctgaggaggaggcagcagcgtcagcctgcaacaagtgggggctgccctgcagagacctaagagtcatgttatagagcacagtgtctgtaaggccaagaagtgtggacagccaagtgtgtcaattactagacatactcaagaggagcaggaagggcagggcatggtggctcatgcctgtaatcccagctacttgggagactgaggaaggagaatcgcttgaacccgggaggtgaaaattgcaatgagccgagatttcgccactgcactccagcctgtgtgatgggagcgggactccatctcaaaacaaaaaaagaaaaaggaaaaagaaaaaaagaaaaacctaggtatacttctcaagcaaataaaaataatcaaaaccaatatcatgcccgggcacaaatttcatatatataacagatttaaatatatgagggtgattatcctctcatatctccatttttttttgtttttccatttttttctttactaaaaaaagttaatgccaatgacacacaatttttttttttttttttttttttgagatggagtctcacttcttcgccctggctggagtgcaatggcgtgatctcgactcactgcaaagtctgcctcctgggttcaagcaattctcctgcctcagcctcccaagtagctgggaccacaggagtgagccaccacacccagctaatttttgtatttttaatagagacggggtttcaccatattggccaggctggtctcaaactcctgatctcaaataatctgcccgcctcggcctcccaagattctgggattataggcgttgagccactgcgccccgcctatgtatgattttttttttaattttattttcataagtttttggggaacaggtggtattttgttacatgagtaatttctttagttgtgatttgtgagattttggttcacccatcaactgagaagtatacactgaacccaatttgtggtcttttatccctcacccccttcccaccctttcccccggagtccctgaagtccattgtatcattcttatgcctttgcatcttcatagcttagctcttgaacccttactttctgtttgagggagaagacatatcatctacaagtagatactgtgtaaacattccattgcatgactatcccataacttatttattatttgtgtttggttatttgctgctatgtaacaaccccactcccaactaaatggtgtgacaattccatgattctgtggatcaaaaattctgaaaagtcaaacccaaggagttttgtctctgctccatgatgctaaagcctccgcaggggtgaggcgaatggctcagggtgactgaaaagctcagggttggaacagctggggatgaggcctctatgtataagatgattcttcactcacaggtctgaaactatggtggggacagccagaaggctcggctcagctgggacagtcacctgagccctacacatgacctctccaacatggtgatcctgaagcagttgggtttcttacacagcatcacacttttcttttttttttttttttttgagatgaaatattgctctatcacccaggctggagtgcagtggcacgatctcagctcactgcagcctccgcctaccaggttcaagcgattctcctgctccagcctcccaagttgctgggattgcaggcgcctgccaccaagcccagctaatttttgtatttttagtagagacggggtttcaccttgttggccaggctagtcttgacctcttgacctcaggcgatccgcctgcctcggcctcccaaagtgctgggattacaggcatgagccaccgcgcccggccaaagctcacacttcttatgattcagccttagatgtcacatcagttcattttccccacacttattagtgttagaagtcacaagcccacccatactcaggggactggcacacagaccccactctcaatggaaggggtgggacaccaccattcctgctgatgggcatttgggtaacttcctgtttgaagctattaagattgggctgctgtggccgggcgcagtggctcacgcctctaatcccagcactttgggaggccgaggcgggcggatcacgaagtcaggagatcgagaccatcctggctaacacggtgaaaccccgtctttactaaaaataccaaaaaaaaaaaaaattagctgggcatggtagcgggcgcctgtagtcccagctactcgggaggctgaggcaggagaacggcgtgaacccgggaggcggagcttgcagtgagccgagattgtgccactgcactccagcctaggcgacagagcaagactccgtctccaaaaaaaaaaaaaaagattgggctgctgtgactattctagtaggtgtctttggtgagcgcctacacgtgtttctctttttctctttagtatatgcccaggaggggaactgctggctcccagataccgtatgttcagggtcacacacacttccacagggttttccaaagcccttgtaccagcacgcactcccagcacctgtgtgactgctccagctgtcccacagtctcatcagttctattgctgatattttcattttagcttaagttatatttaataggaaaattaccgttgcctctgccccccgttcctgcctgtaggagtttctcgtagctgttgctacaggtggccacaaatctgtcacttaaacccacacaaattgatgtccttatggctttggagtcagaagtgtcaactgaaggtactagcagggctgtactgacctggtggcctcagggagcatctgtgctgcttctccaccttctagaggctgctgcatccctcgctccagccccttcctgacaccactcaccctcctacttctgttatcacatcctcaccttctctgtgttcagggctccctctgtctctctcttgcaagcacacttgggattccattgagggccacccacataacccaggagaatttctccacctcaatatccttaacaactgcagagcccttttgccataaaagttaccattcacgggttccagggattgtgacatgggtagctttaggagtgattattcctgcctgtctcccgctcaccagaacttggactttctctctcaacaggagccccctgtgtgggaatagcctgtctcaacgacgccctctataaggacctgcttcctcaaaggacctcatagtcgggtcctgcccctcagtgtccagtctgccttggctggaggggctgcaggggtgtgttggcgccacctggtggagacagggcatcacagcaggtgggagcccagtagaagcacaaccaaaacatgggtaatgtttaaaattttctggctaagcgctgtggctcacgcctgtaattccagcactttgggaggccgaggtgggtggatcacatgaggacgggagtttgagaccagcctggccaacatggtgaaacatcccctctactaaaaaatacagaaaaattagctggacatgtggcgcgctcctgtaatcccagctactcgagaggctgagacacgagaatcgcttcaaccccggaggggttgccgagatcgcgccactgcactccaggctgggcgatagagcgagactctgtctcaaaaaaaaaaaaagaagaggggaggcgaggggaggggaggggaaaagggggaatttgtttggagctgagacatccatcttctcctgacctcagatatttgcactcctggttatgaagccttcacacttggactgaatacaccaccagctttcccgatttccagcgtgcaaatggcagatcgtgagacttctcagcttccataattacatgagccaatttatatatataaattgggtcctccagaaaaacagaataaattatatatataattatacgcataacttaattaaattatacgtataacttagctatatatataatttattctgtttttctgaagaaccctactgacacaaatgttgagcatcttttcatgtgcttattggcttaataacttgtacatcttctttggggaaatgtctattcaagttctttgcccattttgtaactgaactattaatatttgtctttacattgttgagttgtaaaagttccttatatattctagatactagagccttatcagatatatttctgcaactattttctcctaatatataggttgtgtttttattttctttttctttttttttttattgagacagtctcactctgtcacccaggctggagtgcagtggcatgatcttggctcactgcagactcgacctgccaggctcaagcaattctcccacttcagcctcctgagtagctgaggttataggcacttgccatcgcacccagctaatttttgtattttttagtagagccgaggtttcgccatgttgcctaggttggtcttgaactccctgcctcaaagcgatctgtcagcctcagtctccctaagtgctggaagtacaggtgtgagccacagtgcccggccatctattttcaatagtgttttttgatgtacacaggtttggaattttgataatgttcaattcatccatttttttttttttttttttggttctttctactggaccaccactcttgagccctctaatccaacctccacgcggcagccagagggagctctctaaatgtaattactctttccctgctccacctgctcaaaacagtgtcacatttgtgatttaaaacagtatttctcaaacctaatttgcaaacaaagcaggtggaactcttcttgtatgcacagcatctgatttggttggtctggcatgggtctgggagtgagcacacctaccaagcggctgctggggtaacttgcgttttccactgatgatttcagcaatgtttccggtcccacatgctcctccagaaccttgtactcccccatgaaaaggtggagtccatttccccttcctttatttatttttttgagacgaagtttcactcttgttgcccaggctggagcgcaatggcgtgatctcagctcaccgcaacctccgcctcctgggttcaagcaatgcttctacctcagcctcccgagtagctgggattacaggtatgtgccaccacgcccagctaattttgtatttttagtagagacggggtttctccatgtcggccaggctggtctcaaactcccgacctcaggtgatccgcccgcctcagcctcccaaagtgctgggattacaggcgggagccaccgcgcccggctatttccccttcctttgaacctgatcaggacttgacgatggcatcaacatggtgagagtgaccctgcatggcttatgaggctgggttacacaaggcgatgttgcttctgactggctccctctcaggatacatgcccttggaacccatcctctaagctccttgggagcccaacttagcccatgtggagacaagacagggagagaaacagaggcacccccagccctcagccagcatcaaccgccagacaggagagcaaatgcgccaacaatgattccagctgaagcctcagacagcgtggagcagagatgagggatccctgcagattgcagatgcgtgagcaaaatgcatgctgtcactgttttgaaacaacaatgtctgggggctgtttgttatgcagcaatagacagctgtaacaatgctgttactgctgtattccatgaatgactgcactttgagtagcagggggctagatcactagataagccccatggcttctgtgtatgctatttttctacttttatatccttttcattcactttttttttttttttttttgagacagagtctcactctgttgcccaggtgggagtgcagtggtgcaatcttggcggactgcaacctccacttcccgggttcaagcaattattgtgcctcagcctcctgagtagctgcgactatagatgcacccccatgcctggctagtttccgtatttttagtagagacggggttttgccatgttggccaggctgatctcagactcctgacctcaggtgatccacccaccttggcctcccaaagtgctgggattacaggcgtgaaccactgcacccagcctcattcactttctttacttggctcatttttccttgttgcctcaattctcctctaagatcactttcctgacatttcagcctgggcctgttgccttctctgggtcccctccgcctcctgtgcctcccccatctcagccttgatccctcagattatacttcctctgtccccaccctgaccatcttggctgtccctggatagggatgggtatcttctcccactggtctgggagatctggaaggacaggcctggaaaagacttggtcactgctggaaggagctcagttagtgtggtgctgaggacagtacgggtgaggctggccccttcacccaaactcccactctcttccatagatttcacctctgtggcccaggccataggattagggcaactccccttaaacatcgagtccatcctccaagctgtccttttttttttttttttttttttttttgagacagagtctcgctctgttgcccaggctggagtgcagtggcgcgatctcggctcactgcaagctccacctccagggttcactccattctcctgcctcagcctcccgagtagctgggactacaggagcctgccaccacacccggctaattttttgtatttttagttgagacggggtttcaccgtgttagtcaggatggtctcgatctcctgacctcgtgatccgcccgcctcggcctcccaaagtgctgggattacaggcgtgagccatcgcgcccggcctcatgctgttcttgaatagtgagcacctgttacaagtcgccccaccagcctctcacttgtacccccctcatctctttctccccaagagacagaggaccctggcacttgtgaagcatgacccagaccctggggccatggcatccaacatcctcattccccatgacccctactgtctagatgtagctgccaagagacccccagactccccgggcctctgtctagagtgccaagacagagagagaatgccctgccgcttgcatgctttgtggggtgtccttcccccttccctggctgctaggcgtgacttcaacgttctccccaacccccaaacagcagcactgacaccagctgcagacctggctcaggttagctaatgaggaccaggctggggatggagcctgaacccctaaaccccagtcctgtaccccaccctaatcctggggtctccactggacaaaacgaagcagcttggtttttcgttgttattgtttttgagatagagtatctctctgtctcccaggttggagtgcagtggcgtgatctcagctcactgcagcctccgcctcccgggttcaagtgattcttgtgccgcagcctccccagtagctgggattacaggcgcgtgccaccacacccagctaatttttgtatttttagtagagacagggtttcaccatgttggccaggctggtctgaaactcctgacctcaagtgatttcccagcctcggcctcccaaagtggaagcggcttatttttaaggagaaaactcccgtggaaaggaatcagcacctcctctgtcaacatttcacttctctgaaaagactctcacttccaacagaaagtgctttgtaacacaacaatgaggctgggcgaggtggctcatgcctgtaatcccagcactttgggaagctgaggcgagtggatcacgaggtcagaagttcgagaccagcctgaccaatatggtgaaaccccgtctctactaaaaatacaaaaattagttccgtgtggtggcgtgagcctgtaatcccagctactcaggaggctgaggcaggagaatggcttgaacccaggagatggaggttgcaatgagccgagatcacgccactgcactccagcctgggcaacagagtgagactccgtctcaaaaaaaaaaaaaaaagaatgagaacatatggacacagggaggggaacaatacacacaaacaaaatttagaaacaggtgaaaataattttagtaatatttttactaatactgatatgctcaaaatattattatttcaataagtaatctaaaaattattgagatgtcttatgttcttttcatcatactaagcctttaatatttggtgtgtattttacactcacagcacatctcaatttgcagtccccatgtttcaagcactaaataaccatgtgtgtccggtggctaccatactggacagcgttgatctgaaatcgcatctgtatgcatcaccagcatatttgcagagatccccatctcagcagcacacctgaggctcatctgcgaaagcacctgcaacttctctacaacctcccacatcacctccaaacacatcctcatgtcatctgcaaacacacccatagctcacaggccaatgcctaaatatcattgcaggcaccttcagagaaagcacttactaaaggggtatacttgattccacatctgctttgacctgcaaatctcccttctcctttacatacatttgcatctcatttgtatgtcaatctaaatccactggcagagcctcagatcatcatctcaaagtcaggtggatgtggggctgggcaggcctccaggtgttcctcctcctgcttcctctggggctcttgatcctcctcctcttccttgctgctctcctcctcctcctccaatatggtgaccagttcctcccgcagcgcccccatctccagccccaggctgcacagctgtcccagcagctggacatccactcggcgcaggttcccctgccagtaggaaggggacgtcacagggatgccaccccagagagcaaggggtctctccaggacctgggtgagagcaggtcccaactcatgtcctggccacagcgcctgggcagggtcctcactgtgcccatggaccctaactgccttcctgcttctcagagtgtctcttgatctctaactcttctctttgtctctccatttcattgtccctgacttctctctctctgtctcctccctctcttatctatatctgtccctgtttccctttgtctctgtccccatttattttttgtctttccatgcccctgtctctctgtctttatgtgttgccatttctctgcccctgcctttggctctctttctctcgcttgccctctctctgccctccccaactttctcaaattcagtctgtctctccatctctgttcctgctctccgtctctgcttcccacctctgtccctctcttttgggatctccctgtccccacctctgttcccgtccctcactctatgtctgtctctcggtgtctgtacatgcctctcatgtctctgcttctatctctcagattctgtttttcgatctctggccttctctatttttgttcatttccattcattctcatttcctctctttctctttcccttccaaacccctcactcaccagctcctccctgatccacagcagactatcgcaggcacctccagtgtctgcccctgcagtcctgagggtctgaccagggatttccactggggagacctccctcagggcctgggggggtgggcccagccccggaggcaccagtccagcctgattcagctgcctccacagttccatcgtctctgagctatggctgcaaggagcaggaagtagcaaggtccagggtggcctggtcccctggggagctgtgtgcgtggtggagagtaaagggcagagggagtgggatgggggttcctgggaaaggtatcccaaagtccactcttcagagagaatcagctggccttgtgcttttctttttccttctgaagtctaacctcaactctgctcacagggttcaaacatagcctcttgcagaggtctaactccacccttccctgcctgtctcaggcctgacccctcaggggcgctcagtgtctgtagatgcctggcaccctctgtccttccacctgccccccaccaccacttctccagcctctcctcagcctccatttgacctctggcttgcccatagcttggtccttgcttgtcctcttggcacgggtcatcctagggctttcccaccagtgtgcctttgggggcaggaatggctcccaggggcaccaagacagcaatcccttagctggagtgcctgtgtccaggctgctggcctagggccaagcagccaattctgctgaccctggacttgcctatgggtatattatccctgttgagggtgagggcttctgctgtggaaaagtctgggaagcactgcaggcctctctcggccttggacccttccttcagacccaaggtgcatatatatacatatatataatggtagatcacgaggtcaggagatcaagaccatcctggccacatggtgaaaccccgtctctagtaaaacacaaaaaattagccgggcatgctgccgcgtgcctgtagtcccagctactcgggaggctgaggcaggagaatggtgtgaacccaggaggtggaggttgcagtaagccaagatcacgccactgcattccagcctggcgacagagcaagactccatcttaaaataaacaaatgaacaatatatatatatatgtattttgttttttgagacagagtctcgctctgtcatccaggctggactgcagtggtgcaatcttggctcactgcaacctccgcctcccgggttcaagcgattcccctgcctcagcctcctgaacagctggggttacaggtgcacgccaccacacctggcgaatttttgtatgtttagtggagacggggtttcaccatgttagccaggctggtctcaaacccctgacctcaggtgatctgcccacctcggcctcccaaagtgctgggattacaggcgtgagccaacgcgcccagccccaagtcccttttaccatagaaagtaacatagtcacagtgcccagggattcacaggtatggggagagggttcgttattcagctgccacacccaccttcctaaacctgctgcccttccagtttcctcacgtgcacagccacgcccgtctgcttttagtttctcaatctgttggcttaaccttcaaaacaggcccaggatttgagcacttctcaccattccctctgccccatccccattcatctcttgcctagactgctacagcagcctcttttactggtcccctgcatccacccttgccctctaaggcaagggtccccagtccctgggccaaggaccagtaccagcccctcgcctgctaggaactgggccgcacagcaagagatgagcagcgggtaagtgagcattaccgcctgagctccgcctcctgtcacatcagcagtggcattagattctcataggaggcaaaccctattgtgaactgtgcgtgcgggggatctaggttgcctgctccttatgagaatctaatgcctgatgatctcaggtggaacagtttcatcccaaaaccatccccaccccacccccgacccccagtctatggaaaaattgtcctccacgaaaccagtccctggtaacaaaacggttagggaccgctgctctaaggtacattctccacctggcagaaataatctttacaaaatgtaaatccgattttgacactcccttcttcccactgtgaatagaataaaaccctaccaggcctgcaccgtcagcccctgcccacctctcaacccagtctcctatctctgtctgcaagctggttcccacctcaaggcctctctgctctagaggctacctctccctgcagcgcttttcccctagatctttgaatggctctttccttatcattcacttctacttcaatgtcacctcttcagagaggcctttgctgatggccctacacccagtcacttttttttatctgcttctcatcaaaattgccttgctgattcctttgtttcttattcatcctctcccacatccatcctctcccagcccagaatgttgacttcctgagagagggactgggtctgtcctgctcaccatggtaacctcggcatctagaacagtgcctgccatcacgtggtaggtgctcagtaaatattcttggaactaatgaatgaataattctatccacaagacttcacaatggctcttcatgctgcgatctagctttcaactccaaactggtcttgagatctcacctcagtctctaaccttgacatctaacctcttcacccactctcttacctgaccctaatttttaaaaatgacgtggtcagcttttcagccccctcattccctgtttttaggaggtagtgagtggaagctggaagaataagaaagcttggggagactgcaattgcagtcaggaaagaaaggtactctgccgggaagaacaccccatcttctcctagggaaagattgtggagtcctggggtttgttttgtttttcaattttttgttttaagagacagcgtctcgctctgtcacccaggctggagtgcagtggcgcaatcacagctcactgcaacttcgacctccccggctcaagtgatccccccgcctcagcctcgtgagtagctgggaccacaggcgtgcaccaccacgcccggctaacattttattttttgtggatataaggttgccctatttctttgtggagataaaggctcccctatgttgcccaggctggtctcgaactcctggcttcaagcgatgctttcgcctcggcctccacaaagtgctgggttcacaggtgcgtgagcccgacctgtgtctcgttttgaagctcagggagagggcgctgtgagcaatccctaaaccctttaagagtaaaaagtgcgtgcacctttaagaggacggttagaaaacgcggggcgtggccacaggagaataagttcgcgctgaaccaggagcgtgggataagaccggccccttccggttacgaaaccttagcaagatggcggctccctgggcgtccctgcgcctggtcgcccccatgtggaatgggcgtatcaggggcatccatcgcctgggtgcggcagtggccccagagggcaatcagaagaagaaaaggacaatactccagttcctgaccaactatttctacgatgtggaggctctgagggattacttgctccaaagggagatgtacaaggtgcatgagaaaaatcgatcttacacctggctggagaagcaacatggtccatacggcgcaggtgcctttttcatcctgaagcagggaggcgcagtcaagtttcgagacaaggagtggatcaggccagataagtatggccatttctctcaggagttctggaatttctgtgaagtgcctgtcgaagctgtggatgccggtgactgtgacatcaactacgagggcctggataacctcctccgcctgaaggagctccagtccttgtcgctgcagcgctgctgccacgtggacgactggtgtctcagccgcctctacccactggccgactcgttgcaggagctctcgctggccggttgcccccgcatctccgaacggggcctcgcctgcctccaccacctccagaacctccgcaggctggacatctcggacctccctgccgtgtccaaccctggcctcactcagatattggtggaggagatgctgcccaattgcgaggttgtgggagtcgactgggctgagggcctgaagtcagggccggaggagcagcctcgggacacagccagccctgtccctgcctagcctttagccctgtccccactcacgtggcttctcagcgggctgcatggaatgtctggtagctcaccacacttctggcttccatttgtcttcactcaacgtcagggtgggggagtggtgctggccaatcacaggagagagcgtgagttcccagtatttattcctggctgcccttggctaaaggtcacagctcctgtcaccctgtcaggcagccctttccatgcccctgttcaggcctggggaggtaaaggctcaggctgttagtagccgcagagagccacactcaccttgtcaggagactcttctcaaactgtccttatgtgagtgcactgccatttcttgcagggaccctgactgacacaggggctactactgacactttacagggatggttctcccccgtgcagggccgctgtgcccactgcaggacatgcagcatccttcgccccactccactcactaaaggccagcgcaccccaggccccatagtattgctggttatggatttattgactttatgttccaaattcagctttttcagttggctgttttttgaaaggggataagctttgtcagtagagggcaccgaacaggcattataggaggaaaggcgcctccttcgtggttcttgttggttgtgcttctgcctctggacgccgcagtgcatgtggcttccccagcacccagctcctgaagcaccaggcggtcagcagctgcccttggcaccctccagccctcagaagttgcgtaggagacacagcgcctccactgaggcacctctctgggaataacgttccccagcaccccaaatggatttccagtcaattcagaagcattttaccagtgaagccctcattattccagttcactgttaaagccagtaattctctatattaaactttccctgttcggtttatactccggagtataaaccgaacaggggtggccaagctgctgtgggccgccgccgtgcagaaccgctggaactcacgcttggggcgacggctacagttggattttgcccctgcaggcaggttcggtgtcgatactggcgttgatagcgctgctgccgtttgacgtggcgaatatgggcttgtttctcggcctgatcgccgtgttgtcgtagttcgcagccacccagga
